United States Patent Application Publication US 2011/0183924 A1 - sequence listing, part 163

SEQ ID NO: 420320 - DNA, 1649 bp, Homo sapiens
tgcgcggctgctgggtgaacggcatccgcaggctcatcgtcagccggcgcggcgacgaagaggagttcttcgagatccgcacggagtggtcggaccgcagcgtgctctacctgcaccgcagcctggcggacctgggccgcctgtggcagcgcctgcgcgacgcctttcccgaggaccggtccgaactggcgcaggggccgctgcggcaaggactggttgccataaaggaagcccacgacatagagaccaggcttaatgaggtggagaagctgctgaagacgatcataagcatgccctgtaaatattctagatcggaagttgtgctcaccttcttcgaaagatctcctctggatcaggtgttaaaaaatgataatgtgcataaaattcaacccagctttcaaagtccagtcaaaatatcagaaatcatgaggtccaatggattttgtttagcaaataccgaaacaatagttattgaccacagtataccaaatggaagagaccagcacctgggcgtggacccaacagagcatttatttgagaatggcagtgagtttccctcagagctggaggacggggacgacccagcagcctacgtcaccaacctgtcatattaccacctggtccccttcgagacagacatttgggactgaacctctctatcaggcctcccccgcctcagctgttcactgccagctctgatgctgtccactgtgctggcccccatggtcacagctgctgccccagctctggaactcccagacgtcccaggccccactgacgccaggaggcctgggtgtcctgcaagtggagcagcaggggctcctagtgggccaggctgaccgcagagtctccagcaagctgaggtcacagccggaggccacagggcctgtgttctgagggtcttcactccctgcttggtgcccacagggctgcgcactgccagggcagggacagttcctgtggggctcgctctcactgctactgcttcctgggaggtgcatccctcttggtgaagtggcctagtgccccccagccaccctgactccccaccattccctcccacggcaaacgcacaaaacgtcttgagggagattttgacaagtcacccattccaggtgccacaggcaggggatgtttagtaatccaggatttctctgagaactgggatatgtggcctttttttttttctttttatcttttatctggaaactgggtttgggtcaaccccaggagtatttgcagaaggcccagcacagtggggggtattggctgcagggcagggaaggcattgccgactagataaccgtgtgagcttggactgagcgttggtggttcttcccaaaggaaaggaatttctcccggcctgccaggtctctgggccttcagcgcgggtcctggtgctgcggccacaccaccctggggtgctcattgacagagctgccataatgaacttgaaaggacgggaatcacgagggaagctggggctcccctgcccacaggagaggatccccgttcttcaagcttctctgctcagtgtctactaacgaccgacatttgctaatgtaaataatagtaaattattgagaattctaattcttttacacagtctgtttttaatctattttaattaaataaaatctatgactcta

SEQ ID NO: 420321 - DNA, 1606 bp, Homo sapiens
tgcgcggctgctgggtgaacggcatccgcaggctcatcgtcagccggcgcggcgacgaagaggagttcttcgagatccgcacggagtggtcggaccgcagcgtgctctacctgcaccgcagcctggcggacctgggccgcctgtggcagcgcctgcgcgacgcctttcccgaggaccggtccgaactggcgcaggggccgctgcggcaaggactggttgccataaaggaagcccacgacatagagaccaggcttaatgaggtggagaagctgctgaagacgatcataagcatgccctgtaaatattctagatcggaagttgtgctcaccttcttcgaaagatctcctctggatcaggtgttaaaaaatgataatgtgcataaaattcaacccagctttcaaagtccagtcaaaatatcagaatagttattgaccacagtataccaaatggaagagaccagcacctgggcgtggacccaacagagcatttatttgagaatggcagtgagtttccctcagagctggaggacggggacgacccagcagcctacgtcaccaacctgtcatattaccacctggtccccttcgagacagacatttgggactgaacctctctatcaggcctcccccgcctcagctgttcactgccagctctgatgctgtccactgtgctggcccccatggtcacagctgctgccccagctctggaactcccagacgtcccaggccccactgacgccaggaggcctgggtgtcctgcaagtggagcagcaggggctcctagtgggccaggctgaccgcagagtctccagcaagctgaggtcacagccggaggccacagggcctgtgttctgagggtcttcactccctgcttggtgcccacagggctgcgcactgccagggcagggacagttcctgtggggctcgctctcactgctactgcttcctgggaggtgcatccctcttggtgaagtggcctagtgccccccagccaccctgactccccaccattccctcccacggcaaacgcacaaaacgtcttgagggagattttgacaagtcacccattccaggtgccacaggcaggggatgtttagtaatccaggatttctctgagaactgggatatgtggcctttttttttttctttttatcttttatctggaaactgggtttgggtcaaccccaggagtatttgcagaaggcccagcacagtggggggtattggctgcagggcagggaaggcattgccgactagataaccgtgtgagcttggactgagcgttggtggttcttcccaaaggaaaggaatttctcccggcctgccaggtctctgggccttcagcgcgggtcctggtgctgcggccacaccaccctggggtgctcattgacagagctgccataatgaacttgaaaggacgggaatcacgagggaagctggggctcccctgcccacaggagaggatccccgttcttcaagcttctctgctcagtgtctactaacgaccgacatttgctaatgtaaataatagtaaattattgagaattctaattcttttacacagtctgtttttaatctattttaattaaataaaatctatgactcta

SEQ ID NO: 420322 - DNA, 2034 bp, Homo sapiens
  misc_feature (1752)..(1752): n is a, c, g, or t
  misc_feature (1759)..(1759): n is a, c, g, or t
  misc_feature (1806)..(1806): n is a, c, g, or t
  misc_feature (1845)..(1845): n is a, c, g, or t
  misc_feature (1847)..(1847): n is a, c, g, or t
  misc_feature (1851)..(1851): n is a, c, g, or t
tgcgcggctgctgggtgaacggcatccgcaggctcatcgtcagccggcgcggcgacgaagaggagttcttcgagatccgcacggagtggtcggaccgcagcgtgctctacctgcaccgcagcctggcggacctgggccgcctgtggcagcgcctgcgcgacgcctttcccgaggaccggtccgaactggcgcaggggccgctgcggcaaggactggttgccataaaggaagcccacgacatagagaccaggcttaatgaggtggagaagctgctgaagacgatcataagcatgccctgtaaatattctagatcggaagttgtgctcaccttcttcgaaagatctcctctggatcaggtgttaaaaaatgataatgtgcataaaattcaacccagctttcaaagtccagtcaaaatatcagaaatcatgaggtccaatggattttgtttagcaaataccgaaacaatagttattgaccacagtataccaaatggaagagaccagcacctgggcgtggacccaacagagcatttatttgagaatggcagtgagtttccctcagagctggaggacggggacgacccagcagcctacgtcaccaacctgtcatattaccacctggtccccttcgagacagacatttgggactgaacctctctatcaggcctcccccgcctcagctgttcactgccagctctgatgctgtccactgtgctggcccccatggtcacagctgctgccccagctctggaactcccagacgtcccaggccccactgacgccaggaggcctgggtgtcctgcaagtggagcagcaggggctcctagtgggccaggctgaccgcagagtctccagcaagctgaggtcacagccggaggccacagggcctgtgttctgagggtcttcactccctgcttggtgcccacagggctgcgcactgccagggcagggacagttcctgtggggctcgctctcactgctactgcttcctgggaggtgcatccctcttggtgaagtggcctagtgccccccagccaccctgactccccaccattccctcccacggcaaacgcacaaaacgtcttgagggagattttgacaagtcacccattccaggtgccacaggcaggggatgtttagtaatccaggatttctctgagaactgggatatgtggcctttttttttttctttttatcttttatctggaaactgggtttgggtcaaccccaggagtatttgcagaaggcccagcacagtggggggtattggctgcagggcagggaaggcattgccgactagataaccgtgtgagcttggactgagcgttggtggttcttcccaaaggaaaggaatttctcccggcctgccaggtctctgggccttcagcgcgggtcctggtgctgcggccacaccaccctggggtgctcattgacagagctgccataatgaacttgaaaggacgggaatcacgagggaagctggggctcccctgcccacaggagaggatccccgttcttcaagcttctctgctcagtgtctactaacgaccgacatttgctaatgtaaataatagtaaattattgagaattctaattcttttacacagtctgtttttaatctattttaattaaataaaatctatgactctaaaaaaaaaaaaaaaaaaaaaaaaagttttacatttgtttacaatttcttataaacacttcattataattgttttatacaaacaacagttttttacttatgttnatcattnatttgcttactagtttttcatttcagataatccttttagaatcattncccttcttgaagatcatccttttgtagtctctttactgnangtgngctgaggatcatctgtttttcatctgagcatctgtttggtttacagttccgctctgttggcaaactctaagcctaatagctttttctcaagttctaacccttctttttgggcaaccattggtcgctggttaaggaaggcctactcacggtatttgacctgtctctgctttcttgcctttttct

SEQ ID NO: 420323 - DNA, 773 bp, Homo sapiens
tgcgcggctgctgggtgaacggcatccgcaggctcatcgtcagccggcgcggcgacgaagaggagttcttcgagatccgcacggagtggtcggaccgcagcgtgctctacctgcaccgcagcctggcggacctgggccgcctgtggcagcgcctgcgcgacgcctttcccgaggaccggtccgaactggcgcaggggccgctgcggcaaggactggttgccataaaggaagcccacgacatagagaccaggcttaatgaggtggagaagctgctgaagacgatcataagcatgccctgtaaatattctagatcggaagttgtgctcaccttcttcgaaagatctcctctggatcaggtgttaaaaaatgataatgtgcataaaattcaacccagctttcaaagtccagtcaaaatatcagaaatcatgaggtccaatggattttgtttagcaaataccgaaacaatagttattgaccacagtataccaaatggaagagaccagcacctgggcgtggacccaacagagcatttatttgagaatggcagtgagtttccctcagagctggaggacggggacgacccagcagcctacgtcaccaacctgtcatattaccacctggtccccttcgagacagacatttgggactgaacctctctatcaggcctcccccgcctcagctgttcactgccctgcagccaataccccccactgtgctgggccttctgcaaatactcctggggttgacccaaacccagtttccagataaaagat

SEQ ID NO: 420324 - DNA, 1538 bp, Homo sapiens
gtgcaagccgagggatagaacctgtgatgggaagacttctgctctgcgcttctcatggggagatagaaaagcacccgagccttcatgcctcgagctatggactggttgccataaaggaagcccacgacatagagaccaggcttaatgaggtggagaagctgctgaagacgatcataagcatgccctgtaaatattctagatcggaagttgtgctcaccttcttcgaaagatctcctctggatcaggtgttaaaaaatgataatgtgcataaaattcaacccagctttcaaagtccagtcaaaatatcagaaatcatgaggtccaatggattttgtttagcaaataccgaaacaatagttattgaccacagtataccaaatggaagagaccagcacctgggcgtggacccaacagagcatttatttgagaatggcagtgagtttccctcagagctggaggacggggacgacccagcagcctacgtcaccaacctgtcatattaccacctggtccccttcgagacagacatttgggactgaacctctctatcaggcctcccccgcctcagctgttcactgccagctctgatgctgtccactgtgctggcccccatggtcacagctgctgccccagctctggaactcccagacgtcccaggccccactgacgccaggaggcctgggtgtcctgcaagtggagcagcaggggctcctagtgggccaggctgaccgcagagtctccagcaagctgaggtcacagccggaggccacagggcctgtgttctgagggtcttcactccctgcttggtgcccacagggctgcgcactgccagggcagggacagttcctgtggggctcgctctcactgctactgcttcctgggaggtgcatccctcttggtgaagtggcctagtgccccccagccaccctgactccccaccattccctcccacggcaaacgcacaaaacgtcttgagggagattttgacaagtcacccattccaggtgccacaggcaggggatgtttagtaatccaggatttctctgagaactgggatatgtggcctttttttttttctttttatcttttatctggaaactgggtttgggtcaaccccaggagtatttgcagaaggcccagcacagtggggggtattggctgcagggcagggaaggcattgccgactagataaccgtgtgagcttggactgagcgttggtggttcttcccaaaggaaaggaatttctcccggcctgccaggtctctgggccttcagcgcgggtcctggtgctgcggccacaccaccctggggtgctcattgacagagctgccataatgaacttgaaaggacgggaatcacgagggaagctggggctcccctgcccacaggagaggatccccgttcttcaagcttctctgctcagtgtctactaacgaccgacatttgctaatgtaaataatagtaaattattgagaattctaattcttttacacagtctgtttttaatctattttaattaaataaaatctatgactcta

SEQ ID NO: 420325 - DNA, 2016 bp, Homo sapiens
tgcgcggctgctgggtgaacggcatccgcaggctcatcgtcagccggcgcggcgacgaagaggagttcttcgagatccgcacggagtggtcggaccgcagcgtgctctacctgcaccgcagcctggcggacctgggccgcctgtggcagcgcctgcgcgacgcctttcccgaggaccggtccgaactggcgcaggggccgctgcggcaaggactggttgccataaaggaagcccacgacatagagaccaggcttaatgaggtggagaagctgctgaagacgatcataagcatgccctgtaaatattctagatcggaagttgtgctcaccttcttcgaaagatctcctctggatcaggtgttaaaaaatgataatgtgcataaaattcaacccagctttcaaagtccagtcaaaatatcagaaatcatgaggtccaatggattttgtttagcaaataccgaaacaatagttattgaccacagtataccaaatggaagagaccagcacctgggcgtggacccaacagagcatttatttgagaatggcagtgagtttccctcagagctggaggacggggacgacccagcagcctacgtcaccaacctgtcatattaccacctggtccccttcgagacagacatttgggactgaacctctctatcaggcctcccccgcctcagctgttcactgccagctctgatgctgtccactgtgctggcccccatggtcacagctgctgccccagctctggaactcccagacgtcccaggccccactgacgccaggaggcctgggtgtcctgcaagtggagcagcaggggctcctagtgggccaggctgaccgcagagtctccagcaagctgaggtcacagccggaggccacagggcctgtgttctgagggtcttcactccctgcttggtgcccacagggctgcgcactgccagggcagggacagttcctgtggggctcgctctcactgctactgcttcctgggaggtgcatccctcttggtgaagtggcctagtgccccccagccaccctgactccccaccattccctcccacggcaaacgcacaaaacgtcttgagggagattttgacaagtcacccattccaggtgccacaggcaggggatgtttagtaatccaggatttctctgagaactgggatatgtggcctttttttttttctttttatcttttatctggaaactgggtttgggtcaaccccaggagtatttgcagaaggcccagcacagtggggggtattggctgcagggcagggaaggcattgccgactagataaccgtgtgagcttggactgagcgttggtggttcttcccaaaggaaaggaatttctcccggcctgccaggtctctgggccttcagcgcgggtcctggtgctgcggccacaccaccctggggtgctcattgacagagctgccataatgaacttgaaaggacgggaatcacgagggaagctggggctcccctgcccacaggagaggatccccgttcttcaagcttctctgctcagtgtctactaacgaccgacatttgctaatgtaaataatagtaaattattgagaattctaattcttttacacagtctgtttttaatctattttaattaaataaaatctatgactctactttgatctgtccaggatgtttgtgtataaaggcgtggttctttctgtcccctgccttgggacagggtggaaactaaaactgactcctggggcctggtccctccccctcttcctgtcacattccgtgagtgacaaagtgtgttatgttcttaccctagggaagtggtctgcccagattgattttttcttttcctccatttttctttttggcagccacaggaattctctttgatgacccagctgcaaagcacatggactttcctttggttttgcatttccctctgccttccagctgtgttgtttaaagcatctcaatttcaaataggctagtaggtggctcactccggggttgaccggttgcctttct

SEQ ID NO: 420326 - DNA, 2529 bp, Homo sapiens
cccgcagccctggcgcagacgcgtgggctccgtggcgatgcggggtgttgcctgaggctccactgaagctatggcataatttgcagaatttgcacttcattacttttctgaaattcaaacaaattctgaaactgcacgagttctggctgagagctgtggatctgtgcattttgatggtgacagtgcctacgtggggatgagtgacggaaacccagagctcctgtcaaccagccagacctacaacggccagagcgagaacaacgaagactatgagatccccccgataacacctcccaacctcccggagccatccctcctgcacctgggggaccacgaagccagctaccactcgctgtgccacggcctcacccccaacggtctgctccctgcctactcctatcaggccatggacctcccagccatcatggtgtccaacatgctagcacaggacagccacctgctgtcgggccagctgcccacgatccaggagatggtccactcggaagtggctgcctatgactcgggccggcccgggcccctgctgggtcgcccggcaatgctggccagccacatgagtgccctcagccagtcccagctcatctcgcagatgggcatccggagcagcatcgcccacagctccccatcaccgccggggagcaagtcagcgaccccctctccctccagctccactcaggaagaggagtcggaagtgcatttcaagatctcgggagaaaagagaccttcagccgacccaggaaaaaaggccaagaacccgaagaagaagaaaaagaaggaccccaatgagccgcagaagcctgtgtcggcctacgcactcttcttcagagacactcaggccgccatcaagggtcagaaccccagtgccactttcggtgacgtgtccaaaatcgtggcctccatgtgggacagcctgggagaggaacagaagcaggcctacaagaggaagacagaagcagcaaagaaggaatatctgaaggccctggcagcctaccgggctagcctcgtctccaagagctccccagatcaaggtgagaccaagagcactcaggcaaacccaccagccaaaatgctcccacccaagcagcccatgtatgccatgccaggcctggcctccttcctgacgccgtcggacctgcaggccttccgcagtggggcctcccctgccagcctcgcccggacgctgggctccaagtctctgctgccaggcctcagtgcgtccccgccgccgccaccctccttcccgctcagccccacactgcaccagcagctgtcactgccccctcacgcccagggcgccctcctcagtccacctgttagcatgtccccagccccccagccccctgtcctgcccacccccatggcactccaggtgcagctggcgatgagcccctcacctccagggccacaggacttcccgcacatctctgagttccccagcagctcgggatcctgctcacctggcccatccaaccccaccagcagcggggactgggacagcagctaccccagtggggagtgtggcatcagcacctgcagcctgctccccagggacaaatcgctctacctcacctaatcccgcctccctaccatccctgaggctcgctggaaggcactgctcagagcctgaagggctgacagcagaaaagaggccctggccagaggcagggtggcccatcggagagagcagtgacacacccattgcccgggggctgagtctcttcctcaacctcccaccagactctgcagaggcagcccactgcccaccaccagcccaaagaacctgcaggaaccttccgcccgctgacctgcttgctccagggtaactgtggaccctgtcctcgccctgcgcacggtaccctatgtctggacacccggccccagctccagccccagcccaggtgggccgcccctggcggggtcgcttaccaacggacacccaccccagatgcatgggccagagggccggcccccggcatagatgtgcacatcggttttccagtgtgaacaaaagattacgaaacctagaaactgttggttccgtgtaagtagttgactacgtgttttagaactgtgctgaagacatctgtaagactattttgtgggggaaaaaagtagtttcctttaaggtaaaaagcattttatatgatccttagcacatttttaagttttatcttaagggagacgcgcacaaaagcggctgccaaaccgtttcgtcatcctcacagcaaggaccggacgcttgctagccaccccggagcactgctctccttttaatcatgtattcatctattttaaattgccggcgacgacttttgtctatttatgaagaaaccttgagaacgaagttacagcttatcctaccgtgtgtgtggttttggggtttcgtttgggtttgggttcttgacgtcgtttgcagctgtttcctggccctggcgagtgtctgtcttggtgcccagtgcttctctcaaatctctttataataaaacttctgaaaagctgaaaaaaaaaaag

SEQ ID NO: 420327 - DNA, 2474 bp, Homo sapiens
gccgccgcgcccgccatggacgtccgcctgtacccctcggcgcccgcggtgggcgcgcggcccggggccgagccggccggcctggcgcacctggactattaccacggcggcaagtttgatggtgacagtgcctacgtggggatgagtgacggaaacccagagctcctgtcaaccagccagacctacaacggccagagcgagaacaacgaagactatgagatccccccgataacacctcccaacctcccggagccatccctcctgcacctgggggaccacgaagccagctaccactcgctgtgccacggcctcacccccaacggtctgctccctgcctactcctatcaggccatggacctcccagccatcatggtgtccaacatgctagcacaggacagccacctgctgtcgggccagctgcccacgatccaggagatggtccactcggaagtggctgcctatgactcgggccggcccgggcccctgctgggtcgcccggcaatgctggccagccacatgagtgccctcagccagtcccagctcatctcgcagatgggcatccggagcagcatcgcccacagctccccatcaccgccggggagcaagtcagcgaccccctctccctccagctccactcaggaagaggagtcggaagtgcatttcaagatctcgggagaaaagagaccttcagccgacccaggaaaaaaggccaagaacccgaagaagaagaaaaagaaggaccccaatgagccgcagaagcctgtgtcggcctacgcactcttcttcagagacactcaggccgccatcaagggtcagaaccccagtgccactttcggtgacgtgtccaaaatcgtggcctccatgtgggacagcctgggagaggaacagaagcaggcctacaagaggaagacagaagcagcaaagaaggaatatctgaaggccctggcagcctaccgggctagcctcgtctccaagagctccccagatcaaggtgagaccaagagcactcaggcaaacccaccagccaaaatgctcccacccaagcagcccatgtatgccatgccaggcctggcctccttcctgacgccgtcggacctgcaggccttccgcagtggggcctcccctgccagcctcgcccggacgctgggctccaagtctctgctgccaggcctcagtgcgtccccgccgccgccaccctccttcccgctcagccccacactgcaccagcagctgtcactgccccctcacgcccagggcgccctcctcagtccacctgttagcatgtccccagccccccagccccctgtcctgcccacccccatggcactccaggtgcagctggcgatgagcccctcacctccagggccacaggacttcccgcacatctctgagttccccagcagctcgggatcctgctcacctggcccatccaaccccaccagcagcggggactgggacagcagctaccccagtggggagtgtggcatcagcacctgcagcctgctccccagggacaaatcgctctacctcacctaatcccgcctccctaccatccctgaggctcgctggaaggcactgctcagagcctgaagggctgacagcagaaaagaggccctggccagaggcagggtggcccatcggagagagcagtgacacacccattgcccgggggctgagtctcttcctcaacctcccaccagactctgcagaggcagcccactgcccaccaccagcccaaagaacctgcaggaaccttccgcccgctgacctgcttgctccagggtaactgtggaccctgtcctcgccctgcgcacggtaccctatgtctggacacccggccccagctccagccccagcccaggtgggccgcccctggcggggtcgcttaccaacggacacccaccccagatgcatgggccagagggccggcccccggcatagatgtgcacatcggttttccagtgtgaacaaaagattacgaaacctagaaactgttggttccgtgtaagtagttgactacgtgttttagaactgtgctgaagacatctgtaagactattttgtgggggaaaaaagtagtttcctttaaggtaaaaagcattttatatgatccttagcacatttttaagttttatcttaagggagacgcgcacaaaagcggctgccaaaccgtttcgtcatcctcacagcaaggaccggacgcttgctagccaccccggagcactgctctccttttaatcatgtattcatctattttaaattgccggcgacgacttttgtctatttatgaagaaaccttgagaacgaagttacagcttatcctaccgtgtgtgtggttttggggtttcgtttgggtttgggttcttgacgtcgtttgcagctgtttcctggccctggcgagtgtctgtcttggtgcccagtgcttctctcaaatctctttataataaaacttctgaaaagctgaaaaaaaaaaag

SEQ ID NO: 420328 - DNA, 1168 bp, Homo sapiens
cccgcagccctggcgcagacgcgtgggctccgtggcgatgcgggtttgatggtgacagtgcctacgtggggatgagtgacggaaacccagagctcctgtcaaccagccagacctacaacggccagagcgagaacaacgaagactatgagatccccccgataacacctcccaacctcccggagccatccctcctgcacctgggggaccacgaagccagctaccactcgctgtgccacggcctcacccccaacggtctgctccctgcctactcctatcaggccatggacctcccagccatcatggtgtccaacatgctagcacaggacagccacctgctgtcgggccagctgcccacgatccaggagatggtccactcggaagtggctgcctatgactcgggccggcccgggcccctgctgggtcgcccggcaatgctggccagccacatgagtgccctcagccagtcccagctcatctcgcagatgggcatccggagcagcatcgcccacagctccccatcaccgccggggagcaagtcagcgaccccctctccctccagctccactcaggaagaggagtcggaagtgcatttcaagatctcgggagaaaagagaccttcagccgacccaggaaaaaaggccaagaacccgaagaagaagaaaaagaaggaccccaatgagccgcagaagcctgtgtcggcctacgcactcttcttcagagacactcaggccgccatcaagggtcagaaccccagtgccactttcggtgacgtgtccaaaatcgtggcctccatgtgggacagcctgggagaggaacagaagcaggcctacaagaggaagacagaagcagcaaagaaggaatatctgaaggccctggcagcctaccgggctagcctcgtctccaagagctccccagatcaaggtgagaccaagagcactcaggcaaacccaccagccaaaatgctcccacccaagcagcccatgtatgccatgccaggcctggcctccttcctgacgccgtcggacctgcaggccttccgcagtggggcctcccctgccagcctcgcccggacgctgggctccaagtctctgctgccaggcctcagtgcctgaccaggcttcagtgcctgaccaggcttcagtgcctgaccaggcttcagtgcctgacc

SEQ ID NO: 420329 - DNA, 2404 bp, Homo sapiens
cccgcagccctggcgcagacgcgtgggctccgtggcgatgcgggtttgatggtgacagtgcctacgtggggatgagtgacggaaacccagagctcctgtcaaccagccagacctacaacggccagagcgagaacaacgaagactatgagatccccccgataacacctcccaacctcccggagccatccctcctgcacctgggggaccacgaagccagctaccactcgctgtgccacggcctcacccccaacggtctgctccctgcctactcctatcaggccatggacctcccagccatcatggtgtccaacatgctagcacaggacagccacctgctgtcgggccagctgcccacgatccaggagatggtccactcggaagtggctgcctatgactcgggccggcccgggcccctgctgggtcgcccggcaatgctggccagccacatgagtgccctcagccagtcccagctcatctcgcagatgggcatccggagcagcatcgcccacagctccccatcaccgccggggagcaagtcagcgaccccctctccctccagctccactcaggaagaggagtcggaagtgcatttcaagatctcgggagaaaagagaccttcagccgacccaggaaaaaaggccaagaacccgaagaagaagaaaaagaaggaccccaatgagccgcagaagcctgtgtcggcctacgcactcttcttcagagacactcaggccgccatcaagggtcagaaccccagtgccactttcggtgacgtgtccaaaatcgtggcctccatgtgggacagcctgggagaggaacagaagcaggcctacaagaggaagacagaagcagcaaagaaggaatatctgaaggccctggcagcctaccgggctagcctcgtctccaagagctccccagatcaaggtgagaccaagagcactcaggcaaacccaccagccaaaatgctcccacccaagcagcccatgtatgccatgccaggcctggcctccttcctgacgccgtcggacctgcaggccttccgcagtggggcctcccctgccagcctcgcccggacgctgggctccaagtctctgctgccaggcctcagtgcgtccccgccgccgccaccctccttcccgctcagccccacactgcaccagcagctgtcactgccccctcacgcccagggcgccctcctcagtccacctgttagcatgtccccagccccccagccccctgtcctgcccacccccatggcactccaggtgcagctggcgatgagcccctcacctccagggccacaggacttcccgcacatctctgagttccccagcagctcgggatcctgctcacctggcccatccaaccccaccagcagcggggactgggacagcagctaccccagtggggagtgtggcatcagcacctgcagcctgctccccagggacaaatcgctctacctcacctaatcccgcctccctaccatccctgaggctcgctggaaggcactgctcagagcctgaagggctgacagcagaaaagaggccctggccagaggcagggtggcccatcggagagagcagtgacacacccattgcccgggggctgagtctcttcctcaacctcccaccagactctgcagaggcagcccactgcccaccaccagcccaaagaacctgcaggaaccttccgcccgctgacctgcttgctccagggtaactgtggaccctgtcctcgccctgcgcacggtaccctatgtctggacacccggccccagctccagccccagcccaggtgggccgcccctggcggggtcgcttaccaacggacacccaccccagatgcatgggccagagggccggcccccggcatagatgtgcacatcggttttccagtgtgaacaaaagattacgaaacctagaaactgttggttccgtgtaagtagttgactacgtgttttagaactgtgctgaagacatctgtaagactattttgtgggggaaaaaagtagtttcctttaaggtaaaaagcattttatatgatccttagcacatttttaagttttatcttaagggagacgcgcacaaaagcggctgccaaaccgtttcgtcatcctcacagcaaggaccggacgcttgctagccaccccggagcactgctctccttttaatcatgtattcatctattttaaattgccggcgacgacttttgtctatttatgaagaaaccttgagaacgaagttacagcttatcctaccgtgtgtgtggttttggggtttcgtttgggtttgggttcttgacgtcgtttgcagctgtttcctggccctggcgagtgtctgtcttggtgcccagtgcttctctcaaatctctttataataaaacttctgaaaagctgaaaaaaaaaaag

SEQ ID NO: 420330 - DNA, 2599 bp, Homo sapiens
gccgccgcgcccgccatggacgtccgcctgtacccctcggcgcccgcggtgggcgcgcggcccggggccgagccggccggcctggcgcacctggactattaccacggcggcaaggtgttgcctgaggctccactgaagctatggcataatttgcagaatttgcacttcattacttttctgaaattcaaacaaattctgaaactgcacgagttctggctgagagctgtggatctgtgcattttgatggtgacagtgcctacgtggggatgagtgacggaaacccagagctcctgtcaaccagccagacctacaacggccagagcgagaacaacgaagactatgagatccccccgataacacctcccaacctcccggagccatccctcctgcacctgggggaccacgaagccagctaccactcgctgtgccacggcctcacccccaacggtctgctccctgcctactcctatcaggccatggacctcccagccatcatggtgtccaacatgctagcacaggacagccacctgctgtcgggccagctgcccacgatccaggagatggtccactcggaagtggctgcctatgactcgggccggcccgggcccctgctgggtcgcccggcaatgctggccagccacatgagtgccctcagccagtcccagctcatctcgcagatgggcatccggagcagcatcgcccacagctccccatcaccgccggggagcaagtcagcgaccccctctccctccagctccactcaggaagaggagtcggaagtgcatttcaagatctcgggagaaaagagaccttcagccgacccaggaaaaaaggccaagaacccgaagaagaagaaaaagaaggaccccaatgagccgcagaagcctgtgtcggcctacgcactcttcttcagagacactcaggccgccatcaagggtcagaaccccagtgccactttcggtgacgtgtccaaaatcgtggcctccatgtgggacagcctgggagaggaacagaagcaggcctacaagaggaagacagaagcagcaaagaaggaatatctgaaggccctggcagcctaccgggctagcctcgtctccaagagctccccagatcaaggtgagaccaagagcactcaggcaaacccaccagccaaaatgctcccacccaagcagcccatgtatgccatgccaggcctggcctccttcctgacgccgtcggacctgcaggccttccgcagtggggcctcccctgccagcctcgcccggacgctgggctccaagtctctgctgccaggcctcagtgcgtccccgccgccgccaccctccttcccgctcagccccacactgcaccagcagctgtcactgccccctcacgcccagggcgccctcctcagtccacctgttagcatgtccccagccccccagccccctgtcctgcccacccccatggcactccaggtgcagctggcgatgagcccctcacctccagggccacaggacttcccgcacatctctgagttccccagcagctcgggatcctgctcacctggcccatccaaccccaccagcagcggggactgggacagcagctaccccagtggggagtgtggcatcagcacctgcagcctgctccccagggacaaatcgctctacctcacctaatcccgcctccctaccatccctgaggctcgctggaaggcactgctcagagcctgaagggctgacagcagaaaagaggccctggccagaggcagggtggcccatcggagagagcagtgacacacccattgcccgggggctgagtctcttcctcaacctcccaccagactctgcagaggcagcccactgcccaccaccagcccaaagaacctgcaggaaccttccgcccgctgacctgcttgctccagggtaactgtggaccctgtcctcgccctgcgcacggtaccctatgtctggacacccggccccagctccagccccagcccaggtgggccgcccctggcggggtcgcttaccaacggacacccaccccagatgcatgggccagagggccggcccccggcatagatgtgcacatcggttttccagtgtgaacaaaagattacgaaacctagaaactgttggttccgtgtaagtagttgactacgtgttttagaactgtgctgaagacatctgtaagactattttgtgggggaaaaaagtagtttcctttaaggtaaaaagcattttatatgatccttagcacatttttaagttttatcttaagggagacgcgcacaaaagcggctgccaaaccgtttcgtcatcctcacagcaaggaccggacgcttgctagccaccccggagcactgctctccttttaatcatgtattcatctattttaaattgccggcgacgacttttgtctatttatgaagaaaccttgagaacgaagttacagcttatcctaccgtgtgtgtggttttggggtttcgtttgggtttgggttcttgacgtcgtttgcagctgtttcctggccctggcgagtgtctgtcttggtgcccagtgcttctctcaaatctctttataataaaacttctgaaaagctgaaaaaaaaaaag

SEQ ID NO: 420331 - DNA, 216 bp, Homo sapiens
gtgagtgcgcgtccagtggctggatcggcgccccccagggtctctccccaacctcgcaggcttttcgtcaggcccctggtagtggggatgaggcaggagagaggcgtcccggcgcggatcccggggcctcccgggctgggcctccctgagtgcgccctcaggccccaggggagcggcttctggcaaagcctccctgcagttcgccaggggcagcaa

SEQ ID NO: 420332 - DNA, 3000 bp, Homo sapiens
gaggatggagactggtattggaaagtaacttttctgctgggctcaggagtttttatatgctcaagctatagacaactgtaccaacgcaatagactaatgtaatctaactattctacaaacggccacacctacccagactaactggaaaacaatagtttataactggaattaaatagttgctgttctttaattaatgagatcggtgttcttgaaaagctacagcgtacgaactctaccctggtccatatctgctttttaaagccttccccagaaccgctctcacttcagccttggtgccttcccggatataccctccagaggcttccccggtccccatcctggacgtcagcctctgcacctagaggccggcttagagggaagacgggcagaggcgggggagacaggagagagagaaacggtctattcctccttaactccgggccccctcgagggcctcacccctcctcccgggggctgagattggagaggaagtgggaaggctccaatctgttcctcactccagcgccctcatgcccccacccttctcttcagctcggggcttcggcgcgcctcgtccccgcccttcgccccgggagaggagcgggcggcgtgggagggctcgcggagaaaggcccaggggagtggacgacctccgcccggcagccacatcctcagcagcagagacccggagccatccgcccgcgggcgagccaggcccgagggcagccccggagaccgcggtggccggatgcgcgggcgcgtcacttccgggcggtgcagcggcggccgcttggaagatggctgcgccctgtggctcggagctgcccgccaactcgccgctaaaaattccgaagatggaggtgctttccccggcttctcctggtggcctgagcgacggaaatccatcgctgtccgacccttccacgcctcggggtgcctccccgctcgggccgggcagtgcggcgggctcgggggcagcggcgtccgggggtctcgggctggggctggggggccgcagcgccgcctcgtcctcggtctccttctcccctggtggcggcggtggcggggctgcggcagccgccgccgccgcctgccggggcatgtcgtggacgccagccgagacgaacgcgctcatcgcagtgtggggcaacgagcggctggtggaggcgcggtaccagcagctggagggagccggcacggtgttcggcagcaaggcccccgggccagccatgtacgagcgcgtgtcccgggccctggccgagctgggctacgagcggaccccgtcccagtgccgggagcgcatcaaggagctggagtcagatggcagcactatggaggactattcacaggaggactggggaaaccacagtcaggatctccatggctatccaacagatcaggaattggatgaaatacctgtcacaaagagaacattaaaaataaaacaagagtcttctgaagaagcacagaagagagacatcatgcagaatattgtacagattttggaatcggtacagttgaaatgggaactttttcagagctggacagacttttcaaggctccatctttctaataaactggccatttttggaattggttataacacccgttggaaagaggatatccgttaccattatgctgagatcagctcccaggtgccccttggcaagcgacttcgggagtacttcaactctgagaagcctgaaggacggatcattatgacccgagtgcagaaaatgaactggaaaaatgtttactacaaatttttagagatcactattagcgaagctaggtgcttggagctgcacatggaaattgactggatacccattgcccactccaaaccaactggtgggaatgttgttcaatatttattgcctgggggtattcctaaaagcccaggcctttatgccattggctatgaagaatgtattgagaggcccctctcaccacacatggagcaaagttccctggacccaggaaaagagggccgggttgacctggaaaccctttcagcacaagcctcattacaggtggaaatagaacccacccgaattatctattgctacctcgggattgctgaggtcaggactctacagcagtgcttatttttacatttccaagcgaataccaaaaccttcagcaaagattgggttggtattaacgggtttttgtctcagaactgtattgtggatcccggagtttcccccaaatccatctacatcaaatttgtagaagtagagagggattttctttccgcaggctctttagttgagtgcctggaaaaagccattggataccccttaaaatttaacaactgaatgtcatccttcataaggatttgggctcttagctccttcttctctactcacttcccattacccggaccacccctcatccagatgccgccgtcagactcttcatggaaaccctttcttcaattgggccagtacgacttctaaggaatcatagtagacttgggccagaaaaaacagacctcacctgaaaatgctcattttgagcaagcaagatatatagcgaacttgcatggtgggtcagctatttcttttttaaaaacagaaaaacaatttttaaatggattttagagccctaatataaacaaatgtaggtacattccatattggacaaaacttatactttgagtttcatatgaaattgaaaaattgtatttttttcacaatgtttcatttttacacatctctatgtctctatataagtaatatttacaaccctgaataaataagcaatagataatggcaagttaaatcttgattcacagttaaaaagactttttcaatatcacccttagctactattgtatataatttagattttcatttttttcaccagccaagtgttttgctatttccaatcagtattgcttgcaaagacctttgtttctgtgatgtaccaactttacagttgtgttgccatttaaacctttttttaaaaaaaaaaaattaaagtaattcctggccc

SEQ ID NO: 420333 - DNA, 1685 bp, Homo sapiens
tatatcgcgagactatccacaggtaggcgactgggtgtaaaccgtggtccggatcaccatggggtatcctacagagtcatggcagattggatgaattcacctgtcacgaagagaacattgtaattgctagcaagagtcttctgaataagcactgaagagagacatcatgcagaatattgtacagattttggaatcggtacagttgaaatgggaactttttcagagctggacagacttttcaaggctccatctttctaataaactggccatttttggaattggttataacacccgttggaaagaggatatccgttaccattatgctgagatcagctcccaggtgccccttggcaagcgacttcgggagtacttcaactctgagaagcctgaaggacggatcattatgacccgagtgcagaaaatgaactggaaaaatgtttactacaaatttttagagatcactattagcgaagctaggtgcttggagctgcacatggaaattgactggatacccattgcccactccaaaccaactggtgggaatgttgttcaatatttattgcctgggggtattcctaaaagcccaggcctttatgccattggctatgaagaatgtattgagaggcccctctcaccacacatggagcaaagttccctggacccaggaaaagagggccgggttgacctggaaaccctttcagcacaagcctcattacaggtggaaatagaacccacccgaattatctattgctacctcgggattgctgaggtcaggactctacagcagtgcttatttttacatttccaagcgaataccaaaaccttcagcaaagattgggttggtattaacgggtttttgtctcagaactgtattgtggatcccggagtttcccccaaatccatctacatcaaatttgtagaagtagagagggattttctttccgcaggctctttagttgagtgcctggaaaaagccattggataccccttaaaatttaacaactgaatgtcatccttcataaggatttgggctcttagctccttcttctctactcacttcccattacccggaccacccctcatccagatgccgccgtcagactcttcatggaaaccctttcttcaattgggccagtacgacttctaaggaatcatagtagacttgggccagaaaaaacagacctcacctgaaaatgctcattttgagcaagcaagatatatagcgaacttgcatggtgggtcagctatttcttttttaaaaacagaaaaacaatttttaaatggattttagagccctaatataaacaaatgtaggtacattccatattggacaaaacttatactttgagtttcatatgaaattgaaaaattgtatttttttcacaatgtttcatttttacacatctctatgtctctatataagtaatatttacaaccctgaataaataagcaatagataatggcaagttaaatcttgattcacagttaaaaagactttttcaatatcacccttagctactattgtatataatttagattttcatttttttcaccagccaagtgttttgctatttccaatcagtattgcttgcaaagacctttgtttctgtgatgtaccaactttacagttgtgttgccatttaaacctttttttaaaaaaaaaaaattaaagtaattcctggccc

SEQ ID NO: 420334 - DNA, 1815 bp, Homo sapiens
gccgagatggcgccattgcactccaggctgggcaacaagagcgaagtgctgtctcaaaaaatatataaataaagagactgaacttccttggaggctttgtagatattattaagagttgttttagtttggtgaaaatagttaacatattggcttatggagagcaatctcacgtttaggataaatttagtctggcagtgcctacaaattaagtctgaggtgaactacttttgaacagttgagttagaaagtatttggtagccaccagggaaaagagatcttatttcaagaaaataattagtgaaactcagtaaagtagaagggagattagaaggaacaaagggaggcagagatgggatagagactggttgcaacttaactaaatttggaagctgggattaagcccttgatttatcttttgaaatgccatataagatagcataagatgtaccattaaattcaggaaactgggctaataatcagaaatatgtgttagaaataaagaccatggtaaaaatggaagggttgtacaagagaataaaattattcaggttttgtctgtggatttgcataatgatatttatttgctgtgtgccacatggcagaaaaggaagtgaaataacacccctctgtcccgtccttttccccagaaagaaatcactggcttcatttgttggtttgtttagctggcagcttgagttggtagaacagacgagtagattgtctagctttagacgtaggtattagtgtactgtttcttgatcattgatgtttgagacctggaatttgtagcattattgatttgacctctgttttaaattttagcggcttccacaaagactgagttagtaaggaatacaactatgtaagtaatatgttttactagctaatttgtctaggcaattatttttaccctgtattcattccttcttaatcaagagtaggcaggtattctttgctttgggaaattcttctttctgtcctcccttccctcactttttccaaattctgggcacaacagcagctctctctcttctgtggcaggtgtgcatcctattggctggctggtatttcttgttttttttcccccttattctttttaaatgggggtgggggtataaaaatatgtgtatggggtacatgcaataatgttgtaatgtttcttgttgtttaatggataattaattgcaaaataattgttttaattataacatgtttgagtaaatgctaaattagtatttttttctaatataataatgaatttgaaatctagcattcctgtaacaatgtgtctatgtttgtctgtctgtgtctgtctaatagtaattaatatctgtggtccgtacctggaagaggaagtacagctttaaaggaataacaaaagactttgtgtcttagacccttcgcaggtgttacagtcgggtgaaagaacatggtgttgggaaaagaaagagcagttacacatttgaacagttggaacaggtgtttggtcagggaggatgggatgctcagccctgccagcctgtacttattaacagtagtggcttgtaccaggagctggagtcagatggcagcactatggaggactattcacaggaggactggggaaaccacagtcaggatctccatggctatccaacagatcaggaattggatgaaatacctgtcacaaagagaacattaaaaataaaacaagagtcttctgaagaagcacaagtctctctttggaatcaaagaattcccattgtcatctgattccatgtctggaaagagggtgagagttcagggatgaggagtttttcccccaaattgtagcca

SEQ ID NO: 420335 - DNA, 3023 bp, Homo sapiens
gccgagatggcgccattgcactccaggctgggcaacaagagcgaagtgctgtctcaaaaaatatataaataaagagactgaacttccttggaggctttgtagatattattaagagttgttttagtttggtgaaaatagttaacatattggcttatggagagcaatctcacgtttaggataaatttagtctggcagtgcctacaaattaagtctgaggtgaactacttttgaacagttgagttagaaagtatttggtagccaccagggaaaagagatcttatttcaagaaaataattagtgaaactcagtaaagtagaagggagattagaaggaacaaagggaggcagagatgggatagagactggttgcaacttaactaaatttggaagctgggattaagcccttgatttatcttttgaaatgccatataagatagcataagatgtaccattaaattcaggaaactgggctaataatcagaaatatgtgttagaaataaagaccatggtaaaaatggaagggttgtacaagagaataaaattattcaggttttgtctgtggatttgcataatgatatttatttgctgtgtgccacatggcagaaaaggaagtgaaataacacccctctgtcccgtccttttccccagaaagaaatcactggcttcatttgttggtttgtttagctggcagcttgagttggtagaacagacgagtagattgtctagctttagacgtaggtattagtgtactgtttcttgatcattgatgtttgagacctggaatttgtagcattattgatttgacctctgttttaaattttagcggcttccacaaagactgagttagtaaggaatacaactatgtaagtaatatgttttactagctaatttgtctaggcaattatttttaccctgtattcattccttcttaatcaagagtaggcaggtattctttgctttgggaaattcttctttctgtcctcccttccctcactttttccaaattctgggcacaacagcagctctctctcttctgtggcaggtgtgcatcctattggctggctggtatttcttgttttttttcccccttattctttttaaatgggggtgggggtataaaaatatgtgtatggggtacatgcaataatgttgtaatgtttcttgttgtttaatggataattaattgcaaaataattgttttaattataacatgtttgagtaaatgctaaattagtatttttttctaatataataatgaatttgaaatctagcattcctgtaacaatgtgtctatgtttgtctgtctgtgtctgtctaatagtaattaatatctgtggtccgtacctggaagaggaagtacagctttaaaggaataacaaaagactttgtgtcttagacccttcgcaggtgttacagtcgggtgaaagaacatggtgttgggaaaagaaagagcagttacacatttgaacagttggaacaggtgtttggtcagggaggatgggatgctcagccctgccagcctgtacttattaacagtagtggcttgtaccaggagctggagtcagatggcagcactatggaggactattcacaggaggactggggaaaccacagtcaggatctccatggctatccaacagatcaggaattggatgaaatacctgtcacaaagagaacattaaaaataaaacaagagtcttctgaagaagcacagaagagagacatcatgcagaatattgtacagattttggaatcggtacagttgaaatgggaactttttcagagctggacagacttttcaaggctccatctttctaataaactggccatttttggaattggttataacacccgttggaaagaggatatccgttaccattatgctgagatcagctcccaggtgccccttggcaagcgacttcgggagtacttcaactctgagaagcctgaaggacggatcattatgacccgagtgcagaaaatgaactggaaaaatgtttactacaaatttttagagatcactattagcgaagctaggtgcttggagctgcacatggaaattgactggatacccattgcccactccaaaccaactggtgggaatgttgttcaatatttattgcctgggggtattcctaaaagcccaggcctttatgccattggctatgaagaatgtattgagaggcccctctcaccacacatggagcaaagttccctggacccaggaaaagagggccgggttgacctggaaaccctttcagcacaagcctcattacaggtggaaatagaacccacccgaattatctattgctacctcgggattgctgaggtcaggactctacagcagtgcttatttttacatttccaagcgaataccaaaaccttcagcaaagattgggttggtattaacgggtttttgtctcagaactgtattgtggatcccggagtttcccccaaatccatctacatcaaatttgtagaagtagagagggattttctttccgcaggctctttagttgagtgcctggaaaaagccattggataccccttaaaatttaacaactgaatgtcatccttcataaggatttgggctcttagctccttcttctctactcacttcccattacccggaccacccctcatccagatgccgccgtcagactcttcatggaaaccctttcttcaattgggccagtacgacttctaaggaatcatagtagacttgggccagaaaaaacagacctcacctgaaaatgctcattttgagcaagcaagatatatagcgaacttgcatggtgggtcagctatttcttttttaaaaacagaaaaacaatttttaaatggattttagagccctaatataaacaaatgtaggtacattccatattggacaaaacttatactttgagtttcatatgaaattgaaaaattgtatttttttcacaatgtttcatttttacacatctctatgtctctatataagtaatatttacaaccctgaataaataagcaatagataatggc

SEQ ID NO: 420336 - DNA, 3391 bp, Homo sapiens
taaatggcagccaatggagggtggtgttgcgcggggctgggattagggccggggcgaatggctggcaatcttactgggattacagaacaaagagcctccccgcgctcccgctctccgctcctctccccgcgccgccccgccctccgccgcagcccgcgccgggggtgggggccgccgagcgccagccccccggccggccgattccccccccgcgccccctccccgcgcctccctccccgccctcgccgcgccgccgtcctcgcctccctctgcctctccttcccccattctcccggattaattaaggaggcagcggcaggaggctgagtcctggccgcgggccggggccggggcgccgctggcaggagcgcttggggatcctccaaggcgaccatggccttgctgggtaagcgctgtgacgtccccaccaacggctgcggacccgaccgctggaactccgcgttcacccgcaaagacgagatcatcaccagcctcgtgtctgccttagactccatgtgctcagcgctgtccaaactgaacgccgaggtggcctgtgtcgccgtgcacgatgagagcgcctttgtggtgggcacagagaaggggagaatgttcctgaatgcccggaaggagctacagtcagacttcctcaggttctgccgagggcccccgtggaaggatccggaggcagagcaccccaagaaggtgcagcggggcgagggtggaggccgtagcctccctcggtcctccctggaacatggctcagatgtgtaccttctgcggaagatggtagaggaggtgtttgatgttctttatagcgaggccctgggaagggccagtgtggtgccactgccctatgagaggctgctcagggagccagggctgctggccgtgcaggggctgcccgaaggcctggccttccgaaggccagccgagtatgaccccaaggccctcatggccatcctggaacacagccaccgcatccgcttcaagctcaagaggccacttgaggatggcgggcgggactcgaaggccctggtggagctgaacggtgtctccctgattcccaaggggtcacgggactgtggcctgcatggccaggcccccaaggtgccaccccaggacctgcccccaaccgccacctcctcctccatggccagcttcctgtacagcacggcgctccccaaccacgccatccgagagctcaagcaggaagcaccttcctgcccccttgcccccagcgacctgggcctgagtcggcccatgccagagcccaaggccaccggtgcccaagacttctccgactgttgtggacagaagcccactgggcctggtgggcctctcatccagaacgtccatgcctccaagcgcattctcttctccatcgtccatgacaagtcagagaagtgggacgccttcataaaggaaaccgaggacatcaacacgctccgggagtgtgtgcagatcctgtttaacagcagatatgcggaagccctgggcctggaccacatggtccccgtgccctaccggaagattgcctgtgacccggaggctgtggagatcgtgggcatcccggacaagatccccttcaagcgcccctgcacttatggagtccccaagctgaagcggatcctggaggagcgccatagtatccacttcatcattaagaggatgtttgatgagcgaattttcacagggaacaagtttaccaaagacaccacgaagctggagccagccagcccgccagaggacacctctgcagaggtctctagggccaccgtccttgaccttgctgggaatgctcggtcagacaagggcagcatgtctgaagactgtgggccaggaacctccggggagctgggcgggctgaggccgatcaaaattgagccagaggatctggacatcattcaggtcaccgtcccagacccctcgccaacctctgaggaaatgacagactcgatgcctgggcacctgccatcggaggattctggttatgggatggagatgctgacagacaaaggtctgagtgaggacgcgcggcccgaggagaggcccgtggaggacagccacggtgacgtgatccggcccctgcggaagcaggtggagctgctcttcaacacacgatacgccaaggccattggcatctcggagcccgtcaaggtgccgtactccaagtttctgatgcacccggaggagctgtttgtggtgggactgcctgaaggcatctccctccgcaggcccaactgcttcgggatcgccaagctccggaagattctggaggccagcaacagcatccagtttgtcatcaagaggcccgagctgctcactgagggagtcaaagagcccatcatggatagtcaagagagggattccggggaccctctggtggacgagagcctgaagagacagggctttcaagaaaattatgacgcgaggctctcacggatcgacatcgccaacacactaagggagcaggtccaggaccttttcaataagaaatacggggaagccttgggcatcaagtacccggtccaggtcccctacaagcggatcaagagtaaccccggctccgtgatcatcgaggggctgcccccaggaatcccgttccgaaagccctgtaccttcggctcccagaacctggagaggattcttgctgtggctgacaagatcaagttcacagtcaccaggcctttccaaggactcatcccaaagcctgatgaagatgacgccaacagactcggggagaaggtgatcctgcgggagcaggtgaaggaactcttcaacgagaaatacggtgaggccctgggcctgaaccggccggtgctggtcccttataaactaatccgggacagcccagacgccgtggaggtcacgggtctgcctgatgacatccccttccggaaccccaacacgtacgacatccaccggctggagaagatcctgaaggcccgagagcatgtccgcatggtcatcattaaccagctccaaccctttgcagaaatctgcaatgatgccaaggtgccagccaaagacagcagcattcccaagcgcaagagaaagcgggtctcggaaggaaattccgtctcctcttcctcctcgtcttcctcttcctcgtcctctaacccggattcagtggcatcggccaaccagatctcactcgtgcaatggccaatgtacatggtggactatgccggcctgaacgtgcagctcccgggacctcttaattactagacctcagtactgaatcaggacctcactcagaaagactaaaggaaatgtaatttatgtacaaaatgtatattcggatatgtatcgatgccttttagtttttccaatgatttttacactatattcctgccaccaaggcctttttaaataagtaaaaaaagaaaaa

SEQ ID NO: 420337 - DNA, 453 bp, Homo sapiens
cagagcacttttccagggagctcaggaggctgagacagaaaagcctcagcttccagtgtcaacagccttttcccctccttccagccaaagacagcagcattcccaagcgcaagagaaagcgggtctcggaaggaaattccgtctcctcttcctcctcgtcttcctcttcctcgtcctctaacccggattcagtggcatcggccaaccagatctcactcgtgcaatggccaatgtacatggtggactatgccggcctgaacgtgcagctcccgggacctcttaattactagacctcagtactgaatcaggacctcactcagaaagactaaaggaaatgtaatttatgtacaaaatgtatattcggatatgtatcgatgccttttagtttttccaatgatttttacactatattcctgccaccaaggcctttttaaataagtaaaaaaagaaaaa

SEQ ID NO: 420338 - DNA, 3207 bp, Homo sapiens
taaatggcagccaatggagggtggtgttgcgcggggctgggattagggccggggcgaatggctggcaatcttactgggattacagaacaaagagcctccccgcgctcccgctctccgctcctctccccgcgccgccccgccctccgccgcagcccgcgccgggggtgggggccgccgagcgccagccccccggccggccgattccccccccgcgccccctccccgcgcctccctccccgccctcgccgcgccgccgtcctcgcctccctctgcctctccttcccccattctcccggattaattaaggaggcagcggcaggaggctgagtcctggccgcgggccggggccggggcgccgctggcaggagcgcttggggatcctccaaggcgaccatggccttgctgggtaagcgctgtgacgtccccaccaacggctgcggacccgaccgctggaactccgcgttcacccgcaaagacgagatcatcaccagcctcgtgtctgccttagactccatgtgctcagcgctgtccaaactgaacgccgaggtggcctgtgtcgccgtgcacgatgagagcgcctttgtggtgggcacagagaaggggagaatgttcctgaatgcccggaaggagctacagtcagacttcctcaggttctgccgagggcccccgtggaaggatccggaggcagagcaccccaagaaggtgcagcggggcgagggtggaggccgtagcctccctcggtcctccctggaacatggctcagatgtgtaccttctgcggaagatggtagaggaggtgtttgatgttctttatagcgaggccctgggaagggccagtgtggtgccactgccctatgagaggctgctcagggagccagggctgctggccgtgcaggggctgcccgaaggcctggccttccgaaggccagccgagtatgaccccaaggccctcatggccatcctggaacacagccaccgcatccgcttcaagctcaagaggccacttgaggatggcgggcgggactcgaaggccctggtggagctgaacggtgtctccctgattcccaaggggtcacgggactgtggcctgcatggccaggcccccaaggtgccaccccaggacctgcccccaaccgccacctcctcctccatggccagcttcctgtacagcacggcgctccccaaccacgccatccgagagctcaagcaggaagcaccttcctgcccccttgcccccagcgacctgggcctgagtcggcccatgccagagcccaaggccaccggtgcccaagacttctccgactgttgtggacagaagcccactgggcctggtgggcctctcatccagaacgtccatgcctccaagcgcattctcttctccatcgtccatgacaagtcagagaagtgggacgccttcataaaggaaaccgaggacatcaacacgctccgggagtgtgtgcagatcctgtttaacagcagatatgcggaagccctgggcctggaccacatggtccccgtgccctaccggaagattgcctgtgacccggaggctgtggagatcgtgggcatcccggacaagatccccttcaagcgcccctgcacttatggagtccccaagctgaagcggatcctggaggagcgccatagtatccacttcatcattaagaggatgtttgatgagcgaattttcacagggaacaagtttaccaaagacaccacgaagctggagccagccagcccgccagaggacacctctgcagaggtctctagggccaccgtccttgaccttgctgggaatgctcggtcagacaagggcagcatgtctgaagactgtgggccaggaacctccggggagctgggcgggctgaggccgatcaaaattgagccagaggatctggacatcattcaggtcaccgtcccagacccctcgccaacctctgaggaaatgacagactcgatgcctgggcacctgccatcggaggattctggttatgggatggagatgctgacagacaaaggtctgagtgaggacgcgcggcccgaggagaggcccgtggaggacagccacggtgacgtgatccggcccctgcggaagcaggtggagctgctcttcaacacacgatacggcccgagctgctcactgagggagtcaaagagcccatcatggatagtcaagagagggattccggggaccctctggtggacgagagcctgaagagacagggctttcaagaaaattatgacgcgaggctctcacggatcgacatcgccaacacactaagggagcaggtccaggaccttttcaataagaaatacggggaagccttgggcatcaagtacccggtccaggtcccctacaagcggatcaagagtaaccccggctccgtgatcatcgaggggctgcccccaggaatcccgttccgaaagccctgtaccttcggctcccagaacctggagaggattcttgctgtggctgacaagatcaagttcacagtcaccaggcctttccaaggactcatcccaaagcctgatgaagatgacgccaacagactcggggagaaggtgatcctgcgggagcaggtgaaggaactcttcaacgagaaatacggtgaggccctgggcctgaaccggccggtgctggtcccttataaactaatccgggacagcccagacgccgtggaggtcacgggtctgcctgatgacatccccttccggaaccccaacacgtacgacatccaccggctggagaagatcctgaaggcccgagagcatgtccgcatggtcatcattaaccagctccaaccctttgcagaaatctgcaatgatgccaaggtgccagccaaagacagcagcattcccaagcgcaagagaaagcgggtctcggaaggaaattccgtctcctcttcctcctcgtcttcctcttcctcgtcctctaacccggattcagtggcatcggccaaccagatctcactcgtgcaatggccaatgtacatggtggactatgccggcctgaacgtgcagctcccgggacctcttaattactagacctcagtactgaatcaggacctcactcagaaagactaaaggaaatgtaatttatgtacaaaatgtatattcggatatgtatcgatgccttttagtttttccaatgatttttacactatattcctgccaccaaggcctttttaaataagtaaaaaaagaaaaa

SEQ ID NO: 420339 - DNA, 1419 bp, Homo sapiens
tagaatcagctcggtccttccaaagcggagatctgacagacaaaggtctgagtgaggacgcgcggcccgaggagaggcccgtggaggacagccacggtgacgtgatccggcccctgcggaagcaggtggagctgctcttcaacacacgatacgccaaggccattggcatctcggagcccgtcaaggtgccgtactccaagtttctgatgcacccggaggagctgtttgtggtgggactgcctgaaggcatctccctccgcaggcccaactgcttcgggatcgccaagctccggaagattctggaggccagcaacagcatccagtttgtcatcaagaggcccgagctgctcactgagggagtcaaagagcccatcatggatagtcaagagagggattccggggaccctctggtggacgagagcctgaagagacagggctttcaagaaaattatgacgcgaggctctcacggatcgacatcgccaacacactaagggagcaggtccaggaccttttcaataagaaatacggggaagccttgggcatcaagtacccggtccaggtcccctacaagcggatcaagagtaaccccggctccgtgatcatcgaggggctgcccccaggaatcccgttccgaaagccctgtaccttcggctcccagaacctggagaggattcttgctgtggctgacaagatcaagttcacagtcaccaggcctttccaaggactcatcccaaagcctgatgaagatgacgccaacagactcggggagaaggtgatcctgcgggagcaggtgaaggaactcttcaacgagaaatacggtgaggccctgggcctgaaccggccggtgctggtcccttataaactaatccgggacagcccagacgccgtggaggtcacgggtctgcctgatgacatccccttccggaaccccaacacgtacgacatccaccggctggagaagatcctgaaggcccgagagcatgtccgcatggtcatcattaaccagctccaaccctttgcagaaatctgcaatgatgccaaggtgccagccaaagacagcagcattcccaagcgcaagagaaagcgggtctcggaaggaaattccgtctcctcttcctcctcgtcttcctcttcctcgtcctctaacccggattcagtggcatcggccaaccagatctcactcgtgcaatggccaatgtacatggtggactatgccggcctgaacgtgcagctcccgggacctcttaattactagacctcagtactgaatcaggacctcactcagaaagactaaaggaaatgtaatttatgtacaaaatgtatattcggatatgtatcgatgccttttagtttttccaatgatttttacactatattcctgccaccaaggcctttttaaataagtaaaaaaagaaaaa

SEQ ID NO: 420340 - DNA, 1691 bp, Homo sapiens
taaatggcagccaatggagggtggtgttgcgcggggctgggattagggccggggcgaatggctggcaatcttactgggattacagaacaaagagcctccccgcgctcccgctctccgctcctctccccgcgccgccccgccctccgccgcagcccgcgccgggggtgggggccgccgagcgccagccccccggccggccgattccccccccgcgccccctccccgcgcctccctccccgccctcgccgcgccgccgtcctcgcctccctctgcctctccttcccccattctcccggattaattaaggaggcagcggcaggaggctgagtcctggccgcgggccggggccggggcgccgctggcaggagcgcttggggatcctccaaggcgaccatggccttgctgggtaagcgctgtgacgtccccaccaacggctgcggacccgaccgctggaactccgcgttcacccgcaaagacgagatcatcaccagcctcgtgtctgccttagactccatgtgctcagcgctgtccaaactgaacgccgaggtggcctgtgtcgccgtgcacgatgagagcgcctttgtggtgggcacagagaaggggagaatgttcctgaatgcccggaaggagctacagtcagacttcctcaggttctgccgagggcccccgtggaaggatccggaggcagagcaccccaagaaggtgcagcggggcgagggtggaggccgtagcctccctcggtcctccctggaacatggctcagatgtgtaccttctgcggaagatggtagaggaggtgtttgatgttctttatagcgaggccctgggaagggccagtgtggtgccactgccctatgagaggctgctcagggagccagggctgctggccgtgcaggggctgcccgaaggcctggccttccgaaggccagccgagtatgaccccaaggccctcatggccatcctggaacacagccaccgcatccgcttcaagctcaagaggccacttgaggatggcgggcgggactcgaaggccctggtggagctgaacggtgtctccctgattcccaaggggtcacgggactgtggcctgcatggccaggcccccaaggtgccaccccaggacctgcccccaaccgccacctcctcctccatggccagcttcctgtacagcacggcgctccccaaccacgccatccgagagctcaagcaggaagcaccttcctgcccccttgcccccagcgacctgggcctgagtcggcccatgccagagcccaaggccaccggtgcccaagacttctccgactgttgtggtaacattgctgctgggatctccaagtctagggggtgggacagaggtcactcatgcaggggacagcctcccagggcaggtcaggatgcctgggccctcttaggttggaaggagccatgtctgggcatgggagtgggactggacagatggtgtcctggctgagacccccttggaccttgggtctctgctcagccatctgtgaatgatgtccttggccttggactaagaggacgcctgcgaggactccctgggtcccagctactcgggaggctgaggcaggaggatcacctgagcccaggagtttgaggctgcattgagctatgattgcacacctctgcactccagcctgggtgacagcacagctctgtctcaaaaaaaaaaaa

SEQ ID NO: 420341 - DNA, 151 bp, Homo sapiens
ctgtgacttcctgtgccctctaggtgaggccctgggcctgaaccggccggtgctggtcccttataaactaatccgggacagcccagacgccgtggaggtcacgggtctgcctgatgacatccccttccggaaccccaacacgtacgacatc

SEQ ID NO: 420342 - DNA, 670 bp, Homo sapiens
  misc_feature (12)..(12): n is a, c, g, or t
  misc_feature (42)..(42): n is a, c, g, or t
  misc_feature (44)..(44): n is a, c, g, or t
  misc_feature (46)..(46): n is a, c, g, or t
ggcacgagcggncacgagcggcacgaggatcctgcgggagtngnanaggaactcttcaacgagaaatacggtgaggccctgggcctgaaccggccggtgctggtcccttataaactaatccgggacagcccagacgccgtggaggtcacgggtctgcctgatgacatccccttccggaaccccaacacgtacgacatccaccggctggagaagatcctgaaggcccgagagcatgtccgcatggtcatcattaaccagctccaaccctttgcagaaatctgcaatgatgccaaggtgccagccaaagacagcagcattcccaagcgcaagagaaagcgggtctcggaaggaaattccgtctcctcttcctcctcgtcttcctcttcctcgtcctctaacccggattcagtggcatcggccaaccagatctcactcgtgcaatggccaatgtacatggtggactatgccggcctgaacgtgcagctcccgggacctcttaattactagacctcagtactgaatcaggacctcactcagaaagactaaaggaaatgtaatttatgtacaaaatgtatattcggatatgtatcgatgccttttagtttttccaatgatttttacactatattcctgccaccaaggcctttttaaataagtaaaaaaagaaaaa

SEQ ID NO: 420343 - DNA, 3436 bp, Homo sapiens
taaatggcagccaatggagggtggtgttgcgcggggctgggattagggccggggcgaatggctggcaatcttactgggattacagaacaaagagcctccccgcgctcccgctctccgctcctctccccgcgccgccccgccctccgccgcagcccgcgccgggggtgggggccgccgagcgccagccccccggccggccgattccccccccgcgccccctccccgcgcctccctccccgccctcgccgcgccgccgtcctcgcctccctctgcctctccttcccccattctcccggattaattaaggaggcagcggcaggaggctgagtcctggccgcgggccggggccggggcgccgctggcaggagcgcttggggatcctccaaggcgaccatggccttgctgggtaagcgctgtgacgtccccaccaacggctgcggacccgaccgctggaactccgcgttcacccgcaaagacgagatcatcaccagcctcgtgtctgccttagactccatgtgctcagcgctgtccaaactgaacgccgaggtggcctgtgtcgccgtgcacgatgagagcgcctttgtggtgggcacagagaaggggagaatgttcctgaatgcccggaaggagctacagtcagacttcctcaggttctgccgagggcccccgtggaaggatccggaggcagagcaccccaagaaggtgcagcggggcgagggtggaggccgtagcctccctcggtcctccctggaacatggctcagatgtgtaccttctgcggaagatggtagaggaggtgtttgatgttctttatagcgaggccctgggaagggccagtgtggtgccactgccctatgagaggctgctcagggagccagggctgctggccgtgcaggggctgcccgaaggcctggccttccgaaggccagccgagtatgaccccaaggccctcatggccatcctggaacacagccaccgcatccgcttcaagctcaagaggccacttgaggatggcgggcgggactcgaaggccctggtggagctgaacggtgtctccctgattcccaaggggtcacgggactgtggcctgcatggccaggcccccaaggtgccaccccaggacctgcccccaaccgccacctcctcctccatggccagcttcctgtacagcacggcgctccccaaccacgccatccgagagctcaagcaggaagcaccttcctgcccccttgcccccagcgacctgggcctgagtcggcccatgccagagcccaaggccaccggtgcccaagacttctccgactgttgtggacagaagcccactgggcctggtgggcctctcatccagaacgtccatgcctccaagcgcattctcttctccatcgtccatgacaagtcagagaagtgggacgccttcataaaggaaaccgaggacatcaacacgctccgggagtgtgtgcagatcctgtttaacagcagatatgcggaagccctgggcctggaccacatggtccccgtgccctaccggaagattgcctgtgacccggaggctgtggagatcgtgggcatcccggacaagatccccttcaagcgcccctgcacttatggagtccccaagctgaagcggatcctggaggagcgccatagtatccacttcatcattaagaggatgtttgatgagcgaattttcacagggaacaagtttaccaaagacaccacgaagctggagccagccagcccgccagaggacacctctgcagaggtctctagggccaccgtccttgaccttgctgggaatgctcggtcagacaagggcagcatgtctgaagactgtgggccaggaacctccggggagctgggcgggctgaggccgatcaaaattgagccagaggatctggacatcattcaggtcaccgtcccagacccctcgccaacctctgaggaaatgacagactcgatgcctgggcacctgccatcggaggattctggttatgggatggagatgctgacagacaaaggtctgagtgaggacgcgcggcccgaggagaggcccgtggaggacagccacggtgacgtgatccggcccctgcggaagcaggtggagctgctcttcaacacacgatacgccaaggccattggcatctcggagcccgtcaaggtgccgtactccaagtttctgatgcacccggaggagctgtttgtggtgggactgcctgaaggcatctccctccgcaggcccaactgcttcgggatcgccaagctccggaagattctggaggccagcaacagcatccagtttgtcatcaagaggcccgagctgctcactgagggagtcaaagagcccatcatggatagtcaaggaactgcctcctcacttggcttctctccccctgccctgcccccagagagggattccggggaccctctggtggacgagagcctgaagagacagggctttcaagaaaattatgacgcgaggctctcacggatcgacatcgccaacacactaagggagcaggtccaggaccttttcaataagaaatacggggaagccttgggcatcaagtacccggtccaggtcccctacaagcggatcaagagtaaccccggctccgtgatcatcgaggggctgcccccaggaatcccgttccgaaagccctgtaccttcggctcccagaacctggagaggattcttgctgtggctgacaagatcaagttcacagtcaccaggcctttccaaggactcatcccaaagcctgatgaagatgacgccaacagactcggggagaaggtgatcctgcgggagcaggtgaaggaactcttcaacgagaaatacggtgaggccctgggcctgaaccggccggtgctggtcccttataaactaatccgggacagcccagacgccgtggaggtcacgggtctgcctgatgacatccccttccggaaccccaacacgtacgacatccaccggctggagaagatcctgaaggcccgagagcatgtccgcatggtcatcattaaccagctccaaccctttgcagaaatctgcaatgatgccaaggtgccagccaaagacagcagcattcccaagcgcaagagaaagcgggtctcggaaggaaattccgtctcctcttcctcctcgtcttcctcttcctcgtcctctaacccggattcagtggcatcggccaaccagatctcactcgtgcaatggccaatgtacatggtggactatgccggcctgaacgtgcagctcccgggacctcttaattactagacctcagtactgaatcaggacctcactcagaaagactaaaggaaatgtaatttatgtacaaaatgtatattcggatatgtatcgatgccttttagtttttccaatgatttttacactatattcctgccaccaaggcctttttaaataagtaaaaaaagaaaaa

SEQ ID NO: 420344 - DNA, 3284 bp, Homo sapiens
taaatggcagccaatggagggtggtgttgcgcggggctgggattagggccggggcgaatggctggcaatcttactgggattacagaacaaagagcctccccgcgctcccgctctccgctcctctccccgcgccgccccgccctccgccgcagcccgcgccgggggtgggggccgccgagcgccagccccccggccggccgattccccccccgcgccccctccccgcgcctccctccccgccctcgccgcgccgccgtcctcgcctccctctgcctctccttcccccattctcccggattaattaaggaggcagcggcaggaggctgagtcctggccgcgggccggggccggggcgccgctggcaggagcgcttggggatcctccaaggcgaccatggccttgctgggtaagcgctgtgacgtccccaccaacggctgcggacccgaccgctggaactccgcgttcacccgcaaagacgagatcatcaccagcctcgtgtctgccttagactccatgtgctcagcgctgtccaaactgaacgccgaggtggcctgtgtcgccgtgcacgatgagagcgcctttgtggtgggcacagagaaggggagaatgttcctgaatgcccggaaggagctacagtcagacttcctcaggttctgccgagggcccccgtggaaggatccggaggcagagcaccccaagaaggtgcagcggggcgagggtggaggccgtagcctccctcggtcctccctggaacatggctcagatgtgtaccttctgcggaagatggtagaggaggtgtttgatgttctttatagcgaggccctgggaagggccagtgtggtgccactgccctatgagaggctgctcagggagccagggctgctggccgtgcaggggctgcccgaaggcctggccttccgaaggccagccgagtatgaccccaaggccctcatggccatcctggaacacagccaccgcatccgcttcaagctcaagaggccacttgaggatggcgggcgggactcgaaggccctggtggagctgaacggtgtctccctgattcccaaggggtcacgggactgtggcctgcatggccaggcccccaaggtgccaccccaggacctgcccccaaccgccacctcctcctccatggccagcttcctgtacagcacggcgctccccaaccacgccatccgagagctcaagcaggaagcaccttcctgcccccttgcccccagcgacctgggcctgagtcggcccatgccagagcccaaggccaccggtgcccaagacttctccgactgttgtggacagaagcccactgggcctggtgggcctctcatccagaacgtccatgcctccaagcgcattctcttctccatcgtccatgacaagtcagagaagtgggacgccttcataaaggaaaccgaggacatcaacacgctccgggagtgtgtgcagatcctgtttaacagcagatatgcggaagccctgggcctggaccacatggtccccgtgccctaccggaagattgcctgtgacccggaggctgtggagatcgtgggcatcccggacaagatccccttcaagcgcccctgcacttatggagtccccaagctgaagcggatcctggaggagcgccatagtatccacttcatcattaagaggatgtttgatgagcgaattttcacagggaacaagtttaccaaagacaccacgaagctggagccagccagcccgccagaggacacctctgcagaggtctctagggccaccgtccttgaccttgctgggaatgctcggtcagacaagggcagcatgtctgaagactgtgggccaggaacctccggggagctgggcgggctgaggccgatcaaaattgagccagaggatctggacatcattcaggtcaccgtcccagacccctcgccaacctctgaggaaatgacagactcgatgcctgggcacctgccatcggaggattctggttatgggatggagatgctgacagacaaaggtctgagtgaggacgcgcggcccgaggagaggcccgtggaggacagccacggtgacgtgatccggcccctgcggaagcaggtggagctgctcttcaacacacgatacgccaaggccattggcatctcggagcccgtcaaggtgccgtactccaagtttctgatgcacccggaggagctgtttgtggtgggactgcctgaaggcatctccctccgcaggcccaactgcttcgggatcgccaagctccggaagattctggaggccagcaacagcatccagtttgtcatcaagagaaaattatgacgcgaggctctcacggatcgacatcgccaacacactaagggagcaggtccaggaccttttcaataagaaatacggggaagccttgggcatcaagtacccggtccaggtcccctacaagcggatcaagagtaaccccggctccgtgatcatcgaggggctgcccccaggaatcccgttccgaaagccctgtaccttcggctcccagaacctggagaggattcttgctgtggctgacaagatcaagttcacagtcaccaggcctttccaaggactcatcccaaagcctgatgaagatgacgccaacagactcggggagaaggtgatcctgcgggagcaggtgaaggaactcttcaacgagaaatacggtgaggccctgggcctgaaccggccggtgctggtcccttataaactaatccgggacagcccagacgccgtggaggtcacgggtctgcctgatgacatccccttccggaaccccaacacgtacgacatccaccggctggagaagatcctgaaggcccgagagcatgtccgcatggtcatcattaaccagctccaaccctttgcagaaatctgcaatgatgccaaggtgccagccaaagacagcagcattcccaagcgcaagagaaagcgggtctcggaaggaaattccgtctcctcttcctcctcgtcttcctcttcctcgtcctctaacccggattcagtggcatcggccaaccagatctcactcgtgcaatggccaatgtacatggtggactatgccggcctgaacgtgcagctcccgggacctcttaattactagacctcagtactgaatcaggacctcactcagaaagactaaaggaaatgtaatttatgtacaaaatgtatattcggatatgtatcgatgccttttagtttttccaatgatttttacactatattcctgccaccaaggcctttttaaataagtaaaaaaagaaaaa

SEQ ID NO: 420345 - DNA, 4620 bp, Homo sapiens
taaatggcagccaatggagggtggtgttgcgcggggctgggattagggccggggcgaatggctggcaatcttactgggattacagaacaaagagcctccccgcgctcccgctctccgctcctctccccgcgccgccccgccctccgccgcagcccgcgccgggggtgggggccgccgagcgccagccccccggccggccgattccccccccgcgccccctccccgcgcctccctccccgccctcgccgcgccgccgtcctcgcctccctctgcctctccttcccccattctcccggattaattaaggaggcagcggcaggaggctgagtcctggccgcgggccggggccggggcgccgctggcaggagcgcttggggatcctccaaggcgaccatggccttgctgggtaagcgctgtgacgtccccaccaacggctgcggacccgaccgctggaactccgcgttcacccgcaaagacgagatcatcaccagcctcgtgtctgccttagactccatgtgctcagcgctgtccaaactgaacgccgaggtggcctgtgtcgccgtgcacgatgagagcgcctttgtggtgggcacagagaaggggagaatgttcctgaatgcccggaaggagctacagtcagacttcctcaggttctgccgagggcccccgtggaaggatccggaggcagagcaccccaagaaggtgcagcggggcgagggtggaggccgtagcctccctcggtcctccctggaacatggctcagatgtgtaccttctgcggaagatggtagaggaggtgtttgatgttctttatagcgaggccctgggaagggccagtgtggtgccactgccctatgagaggctgctcagggagccagggctgctggccgtgcaggggctgcccgaaggcctggccttccgaaggccagccgagtatgaccccaaggccctcatggccatcctggaacacagccaccgcatccgcttcaagctcaagaggccacttgaggatggcgggcgggactcgaaggccctggtggagctgaacggtgtctccctgattcccaaggggtcacgggactgtggcctgcatggccaggcccccaaggtgccaccccaggacctgcccccaaccgccacctcctcctccatggccagcttcctgtacagcacggcgctccccaaccacgccatccgagagctcaagcaggaagcaccttcctgcccccttgcccccagcgacctgggcctgagtcggcccatgccagagcccaaggccaccggtgcccaagacttctccgactgttgtggacagaagcccactgggcctggtgggcctctcatccagaacgtccatgcctccaagcgcattctcttctccatcgtccatgacaagtcagagaagtgggacgccttcataaaggaaaccgaggacatcaacacgctccgggagtgtgtgcagatcctgtttaacagcagatatgcggaagccctgggcctggaccacatggtccccgtgccctaccggaagattgcctgtgacccggaggctgtggagatcgtgggcatcccggacaagatccccttcaagcgcccctgcacttatggagtccccaagctgaagcggatcctggaggagcgccatagtatccacttcatcattaagaggatgtttgatgagcgaattttcacagggaacaagtttaccaaagacaccacgaagctggagccagccagcccgccagaggacacctctgcagaggtctctagggccaccgtccttgaccttgctgggaatgctcggtcagacaagggcagcatgtctgaagactgtgggccaggaacctccggggagctgggcgggctgaggccgatcaaaattgagccagaggatctggacatcattcaggtcaccgtcccagacccctcgccaacctctgaggaaatgacagactcgatgcctgggcacctgccatcggaggattctggttatgggatggagatgctgacagacaaaggtctgagtgaggacgcgcggcccgaggagaggcccgtggaggacagccacggtgacgtgatccggcccctgcggaagcaggtggagctgctcttcaacacacgatacgccaaggccattggcatctcggagcccgtcaaggtgccgtactccaagtttctgatgcacccggaggagctgtttgtggtgggactgcctgaaggcatctccctccgcaggcccaactgcttcgggatcgccaagctccggaagattctggaggccagcaacagcatccagtttgtcatcaagaggcccgagctgctcactgagggagtcaaagagcccatcatggatagtcaaggaactgcctcctcacttggcttctctccccctgccctgcccccagagagggattccggggaccctctggtggacgagagcctgaagagacagggctttcaagaaaattatgacgcgaggctctcacggatcgacatcgccaacacactaagggagcaggtccaggaccttttcaataagaaatacggggaagccttgggcatcaagtacccggtccaggtcccctacaagcggatcaagagtaaccccggctccgtgatcatcgaggggctgcccccaggaatcccgttccgaaagccctgtaccttcggctcccagaacctggagaggattcttgctgtggctgacaagatcaagttcacagtcaccaggcctttccaaggactcatcccaaagcctgatgaagatgacgccaacagactcggggagaaggtgatcctgcgggagcaggtgaaggaactcttcaacgagaaatacggtgaggccctgggcctgaaccggccggtgctggtcccttataaactaatccgggacagcccagacgccgtggaggtcacgggtctgcctgatgacatccccttccggaaccccaacacgtacgacatccaccggctggagaagatcctgaaggcccgagagcatgtccgcatggtcatcattaaccagctccaaccctttgcagaaatctgcaatgatgccaaggtgccagccaaagacagcagcattcccaagcgcaagagaaagcgggtctcggaaggaaattccgtctcctcttcctcctcgtcttcctcttcctcgtcctctaacccggattcagtggcatcggccaaccagatctcactcgtggtaaagttgcaccgatttggactccggcactcatctctgtggccctcacccctctgtctggcagggccgtctactctgggatgtgggcccaggggacggggaggcactgggctttgagtggggaccttccggcctcgggggttatagatgcatccacctgtctcacccaagaggtagcccatccttctcgtggggtactcacaggcactcaggcaggaattcacatcctcgctgggcagatgggccggctgaggtccacctgcccacacccttcagccgcaccagagctggagacatgaaaagacatggctggcgggtgcagtggctcacgcctgtaatcccagcactttggcaggtcaagtcgggtggatcacctgaggtcaggagtttgagaccaggctgaccaacacggggaaaccccatctctactaaaaatacaaaattagccgggcaaagtggggcatagtggctcatgcctgtaatcccagctacttggaaggctgagataggagaatcgcttgaacctgggaggcagaggttgcaatgagccgaggtcgcgccattgcactgcagcctgggcaacaagagtgaaacactgtctcagaaaaaaaaattagccaggcatggtggcacgtgcctgtggtcgcagctacttgggaggctggggcaggaggatcatttgagcccaaggggattgaggctgcagtgagccaagatcgtcccattgcactccagcctgggcaagagaacgagactccatctcaaaaataaataaataggctgggtgtggtggctcacgcctgtaatcctagcactttgggaggccgaggcaggcggatcacttgaggctcaggagttcaagaccagcctggccaacatggcaaaaccccgtctctactaaaaatagaaaaattagccgggcatggtggcgggcgcctataatcccagctactcgggaggctgaggcaggagactcgcttgaacccgcggggccaaggttgcagtgagccgagattgcatcactgcactccagcctgggcagaagagtgaaactccatctcaaaaaaataaaaaatataaataaatagcctctgagaaagctcttccaaaagcagaactaagcattttgggtttgttccgcatcacctggagtcctaatccagtccctttgtccctctctctagcaatggccaatgtacatggtggactatgccggcctgaacgtgcagctcccgggacctcttaattactagacctcagtactgaatcaggacctcactcagaaagactaaaggaaatgtaatttatgtacaaaatgtatattcggatatgtatcgatgccttttagtttttccaatgatttttacactatattcctgccaccaaggcctttttaaataagtaaaaaaagaaaaa

SEQ ID NO: 420346 - DNA, 1637 bp, Homo sapiens
cagagcacttttccagggagctcaggaggctgagacagaaaagcctcagcttccagtgtcaacagccttttcccctccttccagccaaagacagcagcattcccaagcgcaagagaaagcgggtctcggaaggaaattccgtctcctcttcctcctcgtcttcctcttcctcgtcctctaacccggattcagtggcatcggccaaccagatctcactcgtggtaaagttgcaccgatttggactccggcactcatctctgtggccctcacccctctgtctggcagggccgtctactctgggatgtgggcccaggggacggggaggcactgggctttgagtggggaccttccggcctcgggggttatagatgcatccacctgtctcacccaagaggtagcccatccttctcgtggggtactcacaggcactcaggcaggaattcacatcctcgctgggcagatgggccggctgaggtccacctgcccacacccttcagccgcaccagagctggagacatgaaaagacatggctggcgggtgcagtggctcacgcctgtaatcccagcactttggcaggtcaagtcgggtggatcacctgaggtcaggagtttgagaccaggctgaccaacacggggaaaccccatctctactaaaaatacaaaattagccgggcaaagtggggcatagtggctcatgcctgtaatcccagctacttggaaggctgagataggagaatcgcttgaacctgggaggcagaggttgcaatgagccgaggtcgcgccattgcactgcagcctgggcaacaagagtgaaacactgtctcagaaaaaaaaattagccaggcatggtggcacgtgcctgtggtcgcagctacttgggaggctggggcaggaggatcatttgagcccaaggggattgaggctgcagtgagccaagatcgtcccattgcactccagcctgggcaagagaacgagactccatctcaaaaataaataaataggctgggtgtggtggctcacgcctgtaatcctagcactttgggaggccgaggcaggcggatcacttgaggctcaggagttcaagaccagcctggccaacatggcaaaaccccgtctctactaaaaatagaaaaattagccgggcatggtggcgggcgcctataatcccagctactcgggaggctgaggcaggagactcgcttgaacccgcggggccaaggttgcagtgagccgagattgcatcactgcactccagcctgggcagaagagtgaaactccatctcaaaaaaataaaaaatataaataaatagcctctgagaaagctcttccaaaagcagaactaagcattttgggtttgttccgcatcacctggagtcctaatccagtccctttgtccctctctctagcaatggccaatgtacatggtggactatgccggcctgaacgtgcagctcccgggacctcttaattactagacctcagtactgaatcaggacctcactcagaaagactaaaggaaatgtaatttatgtacaaaatgtatattcggatatgtatcgatgccttttagtttttccaatgatttttacactatattcctgccaccaaggcctttttaaataagtaaaaaaagaaaaa

SEQ ID NO: 420347 - DNA, 1836 bp, Homo sapiens
cacacctgtcccacttctgggaccaatggcatgacctgatttggggaaaacagcagtcaccattcagaaagttggagatgaaagtggtatcctcgggaaagatccgtgtttcagtaaaacaagaaggtgaagggaacattcaaagaagaagggagggaggggattttgctccttctggaaggagttccagaggccacagtgggaaagtttcagaaactggaagggaatgggagatgggatagaaaaggatattatgtacagaaccgtacgggaatcagcatggatggcctaagcttgtattgacaggaatgaagataaagtgagtgtgtgatgagattagtgctaatggtggcaaggctgtgtgggtaggatggaatggtgggaatgttgctggaaagtcacagaaattgtctgtgagtgtaggtacacatagatacccacatatacatgtgcacacagttttactttgttttatacatatatgaattttataacttactgtgaaggtactacatgttcattccagaaattttgataactgcagaaatatataaaggaagaaaattaaaattgccagtaattctaccatcaagagataattatcactaacatatgatggttgggtgccgtttcttccaatcaggttctggtgtgtgttttatttacttacatttactacatttcctagttatacaagtaatacatgttctttaaagacattttgaaaaatacagaaacaaaaacaaaggtgacacacgtgtttgggaaatcagcactgaccaacatcaggcttacttcttttttaaattttggctaatttcataggcaaaaaaaaactctctgtattatttcagtgtgcatttatttcatcacaagtgaagtttggtgcttgtaaagactgtgttttcagtggacttgtacaatgtttaaattcctctcctgcaggctcctgagtcctataagaatgtgacagatgtggtaaatacctgccatgatgctggaatcagcaagaaagccattaaactgagaccaattgctgtgatcaaaggatagaaccttggacagcagggctgcctgacaccaccaaccctctctgaagtggaagtggactgacatgctcttctgacatcagactcaaggcgggacaagttgcaaagtgtgcagctgtaactgctcacgccaaaatggctgatggggaggctgctgctttcaggggcccgtgcttgtaaaataaccttccaggaagaggcacattgcccacctttggaaagggaggaatatgccttctccttggttgttccacagagttttaggaaaatctgttagggatgggtagatgtcaaactgccttacgcagtcatactgatctttagccatcagattgatcttcttcacaccaagctctgtttacattccgagaggtgtcatgaagaaagttctgttcaataaggttttggaatgtttcctttctttcgtctgttgctttgtcagtttgtccattcatccacccatttaggcatcacccctgcactcagcaaaaccctaaatacccctcttacttggagagcacccagggagttgtaatcaggctgttagatgaatggatagtggaacacattgaagagggagtatggggaggtttaaggaatagcggcccaaaagacaaagtcttcatagctttactacctttcttattctaaatacacggcagagtttttgtatccatggggccgggtgaacaaaatggaggtaggtggtggtgctggtgatggagggcacagcagaaccagaggcctggcctccctcctacacatgccttgcagggctttttttttt

SEQ ID NO: 420348 - DNA, 2415 bp, Homo sapiens
  misc_feature (9)..(9): n is a, c, g, or t
  misc_feature (15)..(15): n is a, c, g, or t
tggctagtncgagcnggtggtgaatcggcacgaggctgagctctgagaagccggactacgcggcagcggctcttcaaagcggagccgggagtttttgctacagttttcgccaccatgagtcgcagctataatgatgagctgcagttcttggagaagatcaataaaaactgctggaggatcaagaagggcttcgtgcccaacatgcaggttgaaggtgttttctatgtgaatgatgctctggagaaattgatgtttgaggaattaaggaatgcctgtcgaggtggtggtgttggtggcttcctgccagccatgaaacagattggcaatgtggcagccctgcctggaattgttcatcgatctattgggcttcctgatgtccattcaggatatgggtttgctattgggaacatggcagcctttgatatgaatgaccctgaagcagtagtatccccaggtggtgtcgggtttgacatcaactgtggtgtccgcttgctaagaaccaatttagatgaaagtgatgtccagcctgtgaaggagcaacttgcccaagctatgtttgaccacattcctgttggggtggggtcaaaaggtgtcatcccaatgaatgccaaagacttggaggaggccttggagatgggggtggactggtccttaagagaagggtatgcctgggctgaagacaaggagcactgcgaggagtacggaaggatgctgcaggctgaccccaataaagtttctgcaagggcgaagaaaagaggccttcctcagttggggaccctgggagcaggcaaccattatgcagaaatccaggttgtggatgagattttcaatgagtatgctgctaaaaaaatgggcatcgaccataagggacaggtgtgtgtgatgatccacagtggaagcagaggcttgggccaccaagtagccacagatgcgctggtagctatggagaaggccatgaagagagacaagattatagtcaatgatcggcagttggcttgtgctcgaatcgcttccccagagggtcaagactatctgaagggaatggcagctgctgggaactatgcctgggtcaaccgctcttccatgaccttcttaacccgtcaggctttcgccaaggtcttcaacacaacccctgatgacttggacctacatgtgatctatgatgtttctcacaacattgccaaagtggagcagcatgtggtggacggaaaggaacggacactgttagtacacaggaagggatccacccgcgctttccctcctcaccatcccctcattgctgttgattaccaactcactggacagccagtgctcattggtggcaccatgggaacctgtagttatgttcttactggcactgaacagggcatgactgagacctttggaacaacctgtcatggagcgggccgtgcattgtcccgagcaaaatctcgacgtaatttagatttccaggatgtcttagacaaattggcagatatgggaattgcgatccgtgttgcctcacccaaactggttatggaagaggctcctgagtcctataagaatgtgacagatgtggtaaatacctgccatgatgctggaatcagcaagaaagccattaaactgagaccaattgctgtgatcaaaggatagaaccttggacagcagggctgcctgacaccaccaaccctctctgaagtggaagtggactgacatgctcttctgacatcagactcaaggcgggacaagttgcaaagtgtgcagctgtaactgctcacgccaaaatggctgatggggaggctgctgctttcaggggcccgtgcttgtaaaataaccttccaggaagaggcacattgcccacctttggaaagggaggaatatgccttctccttggttgttccacagagttttaggaaaatctgttagggatgggtagatgtcaaactgccttacgcagtcatactgatctttagccatcagattgatcttcttcacaccaagctctgtttacattccgagaggtgtcatgaagaaagttctgttcaataaggttttggaatgtttcctttctttcgtctgttgctttgtcagtttgtccattcatccacccatttaggcatcacccctgcactcagcaaaaccctaaatacccctcttacttggagagcacccagggagttgtaatcaggctgttagatgaatggatagtggaacacattgaagagggagtatggggaggtttaaggaatagcggcccaaaagacaaagtcttcatagctttactacctttcttattctaaatacacggcagagtttttgtatccatggggccgggtgaacaaaatggaggtaggtggtggtgctggtgatggagggcacagcagaaccagaggcctggcctccctcctacacatgccttgcagggctttttttttt

SEQ ID NO: 420349 - DNA, 2401 bp, Homo sapiens
tgcgctttggttcttggaaggcggtgctctgagaagccggactacgcggcagcggctcttcaaagcggagccgggagtttttgctacagttttcgccaccatgagtcgcagctataatgatgagctgcagttcttggagaagatcaataaaaactgctggaggatcaagaagggcttcgtgcccaacatgcaggttgaaggtgttttctatgtgaatgatgctctggagaaattgatgtttgaggaattaaggaatgcctgtcgaggtggtggtgttggtggcttcctgccagccatgaaacagattggcaatgtggcagccctgcctggaattgttcatcgatctattgggcttcctgatgtccattcaggatatgggtttgctattgggaacatggcagcctttgatatgaatgaccctgaagcagtagtatccccaggtggtgtcgggtttgacatcaactgtggtgtccgcttgctaagaaccaatttagatgaaagtgatgtccagcctgtgaaggagcaacttgcccaagctatgtttgaccacattcctgttggggtggggtcaaaaggtgtcatcccaatgaatgccaaagacttggaggaggccttggagatgggggtggactggtccttaagagaagggtatgcctgggctgaagacaaggagcactgcgaggagtacggaaggatgctgcaggctgaccccaataaagtttctgcaagggcgaagaaaagaggccttcctcagttggggaccctgggagcaggcaaccattatgcagaaatccaggttgtggatgagattttcaatgagtatgctgctaaaaaaatgggcatcgaccataagggacaggtgtgtgtgatgatccacagtggaagcagaggcttgggccaccaagtagccacagatgcgctggtagctatggagaaggccatgaagagagacaagattatagtcaatgatcggcagttggcttgtgctcgaatcgcttccccagagggtcaagactatctgaagggaatggcagctgctgggaactatgcctgggtcaaccgctcttccatgaccttcttaacccgtcaggctttcgccaaggtcttcaacacaacccctgatgacttggacctacatgtgatctatgatgtttctcacaacattgccaaagtggagcagcatgtggtggacggaaaggaacggacactgttagtacacaggaagggatccacccgcgctttccctcctcaccatcccctcattgctgttgattaccaactcactggacagccagtgctcattggtggcaccatgggaacctgtagttatgttcttactggcactgaacagggcatgactgagacctttggaacaacctgtcatggagcgggccgtgcattgtcccgagcaaaatctcgacgtaatttagatttccaggatgtcttagacaaattggcagatatgggaattgcgatccgtgttgcctcacccaaactggttatggaagaggctcctgagtcctataagaatgtgacagatgtggtaaatacctgccatgatgctggaatcagcaagaaagccattaaactgagaccaattgctgtgatcaaaggatagaaccttggacagcagggctgcctgacaccaccaaccctctctgaagtggaagtggactgacatgctcttctgacatcagactcaaggcgggacaagttgcaaagtgtgcagctgtaactgctcacgccaaaatggctgatggggaggctgctgctttcaggggcccgtgcttgtaaaataaccttccaggaagaggcacattgcccacctttggaaagggaggaatatgccttctccttggttgttccacagagttttaggaaaatctgttagggatgggtagatgtcaaactgccttacgcagtcatactgatctttagccatcagattgatcttcttcacaccaagctctgtttacattccgagaggtgtcatgaagaaagttctgttcaataaggttttggaatgtttcctttctttcgtctgttgctttgtcagtttgtccattcatccacccatttaggcatcacccctgcactcagcaaaaccctaaatacccctcttacttggagagcacccagggagttgtaatcaggctgttagatgaatggatagtggaacacattgaagagggagtatggggaggtttaaggaatagcggcccaaaagacaaagtcttcatagctttactacctttcttattctaaatacacggcagagtttttgtatccatggggccgggtgaacaaaatggaggtaggtggtggtgctggtgatggagggcacagcagaaccagaggcctggcctccctcctacacatgccttgcagggctttttttttt

SEQ ID NO: 420350 - DNA, 1569 bp, Homo sapiens
cccaagcgcgagcgaagagccccccgaggtgaatcggacgaggcacagcggaagcataggcttgggccacaagtagccacagatgcgctggtagctatggagaaggccatgaagagagacaagattatagtcaatgatcggcagttggcttgtgctcgaatcgcttccccagagggtcaagactatctgaagggaatggcagctgctgggaactatgcctgggtcaaccgctcttccatgaccttcttaacccgtcaggctttcgccaaggtcttcaacacaacccctgatgacttggacctacatgtgatctatgatgtttctcacaacattgccaaagtggagcagcatgtggtggacggaaaggaacggacactgttagtacacaggaagggatccacccgcgctttccctcctcaccatcccctcattgctgttgattaccaactcactggacagccagtgctcattggtggcaccatgggaacctgtagttatgttcttactggcactgaacagggcatgactgagacctttggaacaacctgtcatggagcgggccgtgcattgtcccgagcaaaatctcgacgtaatttagatttccaggatgtcttagacaaattggcagatatgggaattgcgatccgtgttgcctcacccaaactggttatggaagaggctcctgagtcctataagaatgtgacagatgtggtaaatacctgccatgatgctggaatcagcaagaaagccattaaactgagaccaattgctgtgatcaaaggatagaaccttggacagcagggctgcctgacaccaccaaccctctctgaagtggaagtggactgacatgctcttctgacatcagactcaaggcgggacaagttgcaaagtgtgcagctgtaactgctcacgccaaaatggctgatggggaggctgctgctttcaggggcccgtgcttgtaaaataaccttccaggaagaggcacattgcccacctttggaaagggaggaatatgccttctccttggttgttccacagagttttaggaaaatctgttagggatgggtagatgtcaaactgccttacgcagtcatactgatctttagccatcagattgatcttcttcacaccaagctctgtttacattccgagaggtgtcatgaagaaagttctgttcaataaggttttggaatgtttcctttctttcgtctgttgctttgtcagtttgtccattcatccacccatttaggcatcacccctgcactcagcaaaaccctaaatacccctcttacttggagagcacccagggagttgtaatcaggctgttagatgaatggatagtggaacacattgaagagggagtatggggaggtttaaggaatagcggcccaaaagacaaagtcttcatagctttactacctttcttattctaaatacacggcagagtttttgtatccatggggccgggtgaacaaaatggaggtaggtggtggtgctggtgatggagggcacagcagaaccagaggcctggcctccctcctacacatgccttgcagggctttttttttt

SEQ ID NO: 420351 - DNA, 1884 bp, Homo sapiens
  misc_feature (9)..(9): n is a, c, g, or t
  misc_feature (15)..(15): n is a, c, g, or t
tggctagtncgagcnggtggtgaatcggcacgaggctgagctctgagaagccggactacgcggcagcggctcttcaaagcggagccgggagtttttgctacagttttcgccaccatgagtcgcagctataatgatgagctgcagttcttggagaagatcaataaaaactgctggaggatcaagaagggcttcgtgcccaacatgcaggttgaaggtgttttctatgtgaatgatgctctggagaaattgatgtttgaggaattaaggaatgcctgtcgaggtggtggtgttggtggcttcctgccagccatgaaacagattggcaatgtggcagccctgcctggaattgttcatcgatctattgggcttcctgatgtccattcaggatatgggtttgctattgggaacatggcagcctttgatatgaatgaccctgaagcagtagtatccccaggtggtgtcgggtttgacatcaactgtggtgtccgcttgctaagaaccaatttagatgaaagtgatgtccagcctgtgaaggagcaacttgcccaagctatgtttgaccacattcctgttggggtggggtcaaaaggtgtcatcccaatgaatgccaaagacttggaggaggccttggagatgggggtggactggtccttaagagaagggtatgcctgggctgaagacaaggagcactgcgaggagtacggaaggatgctgcaggctgaccccaataaagtttctgcaagggcgaagaaaagaggccttcctcagttggggaccctgggagcaggcaaccattatgcagaaatccaggttgtggatgagattttcaatgagtatgctgctaaaaaaatgggcatcgaccataagggacaggtgtgtgtgatgatccacagtggaagcagaggcttgggccaccaagtagccacagatgcgctggtagctatggagaaggccatgaagagagacaagattatagtcaatgatcggcagttggcttgtgctcgaatcgcttccccagagggtcaagactatctgaagggaatggcagctgctgggaactatgcctgggtcaaccgctcttccatgaccttcttaacccgtcagcttggacagcagggctgcctgacaccaccaaccctctctgaagtggaagtggactgacatgctcttctgacatcagactcaaggcgggacaagttgcaaagtgtgcagctgtaactgctcacgccaaaatggctgatggggaggctgctgctttcaggggcccgtgcttgtaaaataaccttccaggaagaggcacattgcccacctttggaaagggaggaatatgccttctccttggttgttccacagagttttaggaaaatctgttagggatgggtagatgtcaaactgccttacgcagtcatactgatctttagccatcagattgatcttcttcacaccaagctctgtttacattccgagaggtgtcatgaagaaagttctgttcaataaggttttggaatgtttcctttctttcgtctgttgctttgtcagtttgtccattcatccacccatttaggcatcacccctgcactcagcaaaaccctaaatacccctcttacttggagagcacccagggagttgtaatcaggctgttagatgaatggatagtggaacacattgaagagggagtatggggaggtttaaggaatagcggcccaaaagacaaagtcttcatagctttactacctttcttattctaaatacacggcagagtttttgtatccatggggccgggtgaacaaaatggaggtaggtggtggtgctggtgatggagggcacagcagaaccagaggcctggcctccctcctacacatgccttgcagggctttttttttt

SEQ ID NO: 420352 - DNA, 1169 bp, Homo sapiens
  misc_feature (9)..(9): n is a, c, g, or t
  misc_feature (15)..(15): n is a, c, g, or t
tggctagtncgagcnggtggtgaatcggcacgaggctgagctctgagaagccggactacgcggcagcggctcttcaaagcggagccgggagtttttgctacagttttcgccaccatgagtcgcagctataatgatgagctgcagttcttggagaagatcaataaaaactgctggaggatcaagaagggcttcgtgcccaacatgcaggttgaaggtgttttctatgtgaatgatgctctggagaaattgatgtttgaggaattaaggaatgcctgtcgaggtggtggtgttggtggcttcctgccagccatgaaacagattggcaatgtggcagccctgcctggaattgttcatcgatctattgggcttcctgatgtccattcaggatatgggtttgctattgggaacatggcagcctttgatatgaatgaccctgaagcagtagtatccccaggtggtgtcgggtttgacatcaactgtggtgtccgcttgctaagaaccaatttagatgaaagtgatgtccagcctgtgaaggagcaacttgcccaagctatgtttgaccacattcctgttggggtggggtcaaaaggtgtcatcccaatgaatgccaaagacttggaggaggccttggagatgggggtggactggtccttaagagaagggtatgcctgggctgaagacaaggagcactgcgaggagtacggaaggatgctgcaggctgaccccaataaagtttctgcaagggcgaagaaaagaggccttcctcagttggggaccctgggagcaggcaaccattatgcagaaatccaggttgtggatgagattttcaatgagtatgctgctaaaaaaatgggcatcgaccataagggacaggtgtgtgtgatgatccacagtggaagcagaggcttgggccaccaagtagccacagatgcgctggtagctatggagaaggccatgaagagagacaagattatagtcaatgatcggcagttggcttgtgctcgaatcgcttccccagagggtcaagactatctgaagggaatggcagctgctgggaactatgcctgggtcaaccgctcttccatgaccttcttaacccgtcagcttggagatgggggtggactggtccttaagagaagggtatgcctggcctgaagacaaggagcact

SEQ ID NO: 420353 - DNA, 2148 bp, Homo sapiens
gaaatgggctgtcatctggggtagtggggagagaacattgaaaagtgtagtttttcctggcagtgttttagaagagagctggaccttggatgaagattaaagcttgtaccctctaagggtttaatgtacgtgtacctcagcttcaaaatggaggtgccgtaagccactcagaacttctgtgaagatgggaaaacagcttaaaatttaacctgtgttgcctgaggaattctagataccttcatttatttgaccgtaattcataaatgattaaggtgtgtacctggttgaattagtcgttagagagtgatagctgattaaggttacagagttgttgttgttgttttttgttttgttttgtttttgtctgtttaatcactacctcatggaattcaggatcagagaggcaaaactgaatataaaaaagatttgaaaattaacaaggagcagtataaatgtcaagtagaactataatgatgtctaatagggcatttatcattttatattggaattatttatatgactgcattcctcaaaaaaccagttactgagagcttaaactttgtatctgactcaaggcttggaacacaggagatagtaaatgtcgagtttttctctgccctttaaggatgtggtcatccttaggttttgatctgcctttgctgtgagatgactagcaccttttatacttatccaaagacttgggcgggacggccttgggagatggggggtggactgggtccttaagaagaaggcgtatgtcctggctggaagaccagcgaggcctgtggaggagtacggaaggatgctgcaggctgaccccaataaagtttctgcaagggcgaagaaaagaggccttcctcagttggggaccctgggagcagcatactcattgaaaatctcatccacaacattgccaaagtggagcagcatgtggtggacggaaaggaacggacactgttagtacacaggaagggatccacccgcgctttccctcctcaccatcccctcattgctgttgattaccaactcactggacagccagtgctcattggtggcaccatgggaacctgtagttatgttcttactggcactgaacagggcatgactgagacctttggaacaacctgtcatggagcgggccgtgcattgtcccgagcaaaatctcgacgtaatttagatttccaggatgtcttagacaaattggcagatatgggaattgcgatccgtgttgcctcacccaaactggttatggaagaggctcctgagtcctataagaatgtgacagatgtggtaaatacctgccatgatgctggaatcagcaagaaagccattaaactgagaccaattgctgtgatcaaaggatagaaccttggacagcagggctgcctgacaccaccaaccctctctgaagtggaagtggactgacatgctcttctgacatcagactcaaggcgggacaagttgcaaagtgtgcagctgtaactgctcacgccaaaatggctgatggggaggctgctgctttcaggggcccgtgcttgtaaaataaccttccaggaagaggcacattgcccacctttggaaagggaggaatatgccttctccttggttgttccacagagttttaggaaaatctgttagggatgggtagatgtcaaactgccttacgcagtcatactgatctttagccatcagattgatcttcttcacaccaagctctgtttacattccgagaggtgtcatgaagaaagttctgttcaataaggttttggaatgtttcctttctttcgtctgttgctttgtcagtttgtccattcatccacccatttaggcatcacccctgcactcagcaaaaccctaaatacccctcttacttggagagcacccagggagttgtaatcaggctgttagatgaatggatagtggaacacattgaagagggagtatggggaggtttaaggaatagcggcccaaaagacaaagtcttcatagctttactacctttcttattctaaatacacggcagagtttttgtatccatggggccgggtgaacaaaatggaggtaggtggtggtgctggtgatggagggcacagcagaaccagaggcctggcctccctcctacacatgccttgcagggctttttttttt

SEQ ID NO: 420354 - DNA, 1066 bp, Homo sapiens
  misc_feature (9)..(9): n is a, c, g, or t
  misc_feature (15)..(15): n is a, c, g, or t
tggctagtncgagcnggtggtgaatcggcacgaggctgagctctgagaagccggactacgcggcagcggctcttcaaagcggagccgggagtttttgctacagttttcgccaccatgagtcgcagctataatgatgagctgcagttcttggagaagatcaataaaaactgctggaggatcaagaagggcttcgtgcccaacatgcaggttgaaggtgttttctatgtgaatgatgctctggagaaattgatgtttgaggaattaaggaatgcctgtcgaggtggtgcttggacagcagggctgcctgacaccaccaaccctctctgaagtggaagtggactgacatgctcttctgacatcagactcaaggcgggacaagttgcaaagtgtgcagctgtaactgctcacgccaaaatggctgatggggaggctgctgctttcaggggcccgtgcttgtaaaataaccttccaggaagaggcacattgcccacctttggaaagggaggaatatgccttctccttggttgttccacagagttttaggaaaatctgttagggatgggtagatgtcaaactgccttacgcagtcatactgatctttagccatcagattgatcttcttcacaccaagctctgtttacattccgagaggtgtcatgaagaaagttctgttcaataaggttttggaatgtttcctttctttcgtctgttgctttgtcagtttgtccattcatccacccatttaggcatcacccctgcactcagcaaaaccctaaatacccctcttacttggagagcacccagggagttgtaatcaggctgttagatgaatggatagtggaacacattgaagagggagtatggggaggtttaaggaatagcggcccaaaagacaaagtcttcatagctttactacctttcttattctaaatacacggcagagtttttgtatccatggggccgggtgaacaaaatggaggtaggtggtggtgctggtgatggagggcacagcagaaccagaggcctggcctccctcctacacatgccttgcagggctttttttttt

SEQ ID NO: 420355 - DNA, 1423 bp, Homo sapiens
  misc_feature (9)..(9): n is a, c, g, or t
  misc_feature (15)..(15): n is a, c, g, or t
tggctagtncgagcnggtggtgaatcggcacgaggctgagctctgagaagccggactacgcggcagcggctcttcaaagcggagccgggagtttttgctacagttttcgccaccatgagtcgcagctataatgatgagctgcagttcttggagaagatcaataaaaactgctggaggatcaagaagggcttcgtgcccaacatgcaggttgaaggtgttttctatgtgaatgatgctctggagaaattgatgtttgaggaattaaggaatgcctgtcgaggtggtggtgttggtggcttcctgccagccatgaaacagattggcaatgtggcagccctgcctggaattgttcatcgatctattgggcttcctgatgtccattcaggatatgggtttgctattgggaacatggcagcctttgatatgaatgaccctgaagcagtagtatccccaggtggtgtcgggtttgacatcaactgtggtgtccgcttgctaagaaccaatttagatgaaagtgatgtccagcctgtgaaggagcaacttgcccaagctatgtttgaccacattcctgttggggtggggtcaaaaggtgtcatcccaatgaatgccaagtaagagcacacgtttccagtacatggtatgggagggataataaccacatgaccttcagcttcctttccagtgcagtacacttgagagatgaggattgttcagttacttttcaggaagtagtaagaactgtttttttaagcatgaggtacagcccatttattggagacattagtcaaccgatgttataacagcctttgacatagagtagtatttataataacatcatatccaccaacgtttattgagcactttctatgtgtaaggtgctgagcatcatatcatttcatccagacaataaccctattatcttccctaacttacaagaaagaaaactgaggtttagagaggtaataagcttagtgccaggtgtggttgggtttacagaatcccaacactttgggaggccaaggcaggaggatcacttgagtccaggagtaaaagatgaacctaggcaacatagatctcgtctctaaaaaaaaaaaattaactaggcatgatggcttgtgactgtagtcccacctactcaggaggctgaagcagaaggatcccttgagagaccaggagttcaaggcggcagtgtgctgagatctcagtactgcaccccagcgtgggcaacagagtgaccctgtagacttggaggaggccttggagatgggggtggactggtccttaagagaagggtatgcctgggctgaagacaaggagcactgcgaggagtacggaaggatgctgcaggctgaccccaattagaacgcctataaggttttttttgtgttttgttggtgccggggagtgacgatgaaatactgtg

SEQ ID NO: 420356 - DNA, 1420 bp, Homo sapiens
  misc_feature (9)..(9): n is a, c, g, or t
  misc_feature (15)..(15): n is a, c, g, or t
tggctagtncgagcnggtggtgaatcggcacgaggctgagctctgagaagccggactacgcggcagcggctcttcaaagcggagccgggagtttttgctacagttttcgccaccatgagtcgcagctataatgatgagctgcagttcttggagaagatcaataaaaactgctggaggatcaagaagggcttcgtgcccaacatgcaggttgaaggtgttttctatgtgaatgatgctctggagaaattgatgtttgaggaattaaggaatgcctgtcgaggtggtggtgttggtggcttcctgccagccatgaaacagattggcaatgtggcagccctgcctggaattgttcatcgatctattgggcttcctgatgtccattcaggatatgggtttgctattgggaacatggcagcctttgatatgaatgaccctgaagcagtagtatccccaggtggtgtcgggtttgacatcaactgtggtgtccgcttgctaagaaccaatttagatgaaagtgatgtccagcctgtgaaggagcaacttgcccaagctatgtttgaccacattcctgttggggtggggtcaaaaggtgtcatcccaatgaatgccaagtaagagcacacgtttccagtacatggtatgggagggataataaccacatgaccttcagcttcctttccagtgcagtacacttgagagatgaggattgttcagttacttttcaggaagtagtaagaactgtttttttaagcatgaggtacagcccatttattggagacattagtcaaccgatgttataacagcctttgacatagagtagtatttataataacatcatatccaccaacgtttattgagcactttctatgtgtaaggtgctgagcatcatatcatttcatccagacaataaccctattatcttccctaacttacaagaaagaaaactgaggtttagagaggtaataagcttagtgccaggtgtggttgggtttacagaatcccaacactttgggaggccaaggcaggaggatcacttgagtccaggagtaaaagatgaacctaggcaacatagatctcgtctctaaaaaaaaaaaattaactaggcatgatggcttgtgactgtagtcccacctactcaggaggctgaagcagaaggatcccttgagagaccaggagttcaaggcggcagtgtgctgagatctcagtactgcaccccagcgtgggcaacagagtgaccctgtagacttggaggaggccttggagatgggggtggactggtccttaagagaagggtatgcctgggctgaagacaaggagcactgcgaggagtacggaaggatgctgcaggctgaccccaatagttatagattatattaattaagaagtagataagtacgggagtgtagatcataattattat

SEQ ID NO: 420357 - DNA, 553 bp, Homo sapiens
  misc_feature (9)..(9): n is a, c, g, or t
  misc_feature (15)..(15): n is a, c, g, or t
tggctagtncgagcnggtggtgaatcggcacgaggctgagctctgagaagccggactacgcggcagcggctcttcaaagcggagccgggagtttttgctacagttttcgccaccatgagtcgcagctataatgatgagctgcagttcttggagaagatcaataaaaactgctggaggatcaagaagggcttcgtgcccaacatgcaggttgaaggtgttttctatgtgaatgatgctctggagaaattgatgtttgaggaattaaggaatgcctgtcgaggtggtggtgttggtggcttcctgccagccatgaaacagattggcaatgtggcagccctgcctggaattgttcatcgatctattgggcttcctgatgtccattcaggatatgggtttgctattgggaacatggcagcctttgatatgaatgaccctgaagcagtagtatccccagcagccattttggcgtgagcagttacagctgcacactttgcaacttgtcccgccttgagtctgatgtcagaagagcatgtcagtccacttccacttcaga

SEQ ID NO: 420358 - DNA, 773 bp, Homo sapiens
ctctgagaagccggactacgcggcagcggctcttcaaagcggagccgggagtttttgctacagttttcgccaccatgagtcgcagctataatgatgagctgcagttcttggagaagatcaataaaaactgctggaggatcaagaagggcttcgtgcccaacatgcaggtaaggcaggagagcaaatggcggggccttccgtgctccgtccccggcccggccggcgtccactgcgccctctggacctcccctgaccactgggtccgccccggccccttgcagagtttccctcatcccgtccttctcccctcacggttctggggccgcccaacctgttccggcaccacctcccgccaggagaggtccccgaaccacgaggacaagctaagtgcggtggatatgggaatctaaataaatacgaaattggggtttccaaagcgttttcacagatcagtctcataaacgtatcgtgagctgttttacgttcacagaaacttcagtgatcttttccagggtggaacagccagccccaggttcatttgctgggactggaattcacctcctctgagtcatgctggttatttaaataacgtttacaaacctttgttcactaaaccaggttttcagcattcagtatcgcatgttggtttttaataaagcgatgtcatttcttgcagtagcgcagggcagggcctgtttgattttaatattcacttcacagaaggacctcgaggatctgtcggtgacatagcttcctctacccacctaggaaga

SEQ ID NO: 420359 - DNA, 3303 bp, Homo sapiens
gaaatgggctgtcatctggggtagtggggagagaacattgaaaagtgtagtttttcctggcagtgttttagaagagagctggaccttggatgaagattaaagcttgtaccctctaagggtttaatgtacgtgtacctcagcttcaaaatggaggtgccgtaagccactcagaacttctgtgaagatgggaaaacagcttaaaatttaacctgtgttgcctgaggaattctagataccttcatttatttgaccgtaattcataaatgattaaggtgtgtacctggttgaattagtcgttagagagtgatagctgattaaggttacagagttgttgttgttgttttttgttttgttttgtttttgtctgtttaatcactacctcatggaattcaggatcagagaggcaaaactgaatataaaaaagatttgaaaattaacaaggagcagtataaatgtcaagtagaactataatgatgtctaatagggcatttatcattttatattggaattatttatatgactgcattcctcaaaaaaccagttactgagagcttaaactttgtatctgactcaaggcttggaacacaggagatagtaaatgtcgagtttttctctgccctttaaggatgtggtcatccttaggttttgatctgcctttgctgtgagatgactagcaccttttatacttatccaaagacttgggcgggacggccttgggagatggggggtggactgggtccttaagaagaaggcgtatgtcctggctggaagaccagcgaggcctgtggaggagtacggaaggatgctgcaggctgaccccaataaagtttctgcaagggcgaagaaaagaggccttcctcagttggggaccctgggagcagcatactcattgaaaatctcatccacaacctggacctcgtgccgaattcggcacgaggccggactacgcggcagcggctcttcaaagcggagccgggagtttttgctacagttttcgccaccatgagtcgcagctataatgatgagctgcagttcttggagaagatcaataaaaactgctggaggatcaagaagggcttcgtgcccaacatgcaggttgaaggtgttttctatgtgaatgatgctctggagaaattgatgtttgaggaattaaggaatgcctgtcgaggtggtggtgttggtggcttcctgccagccatgaaacagattggcaatgtggcagccctgcctggaattgttcatcgatctattgggcttcctgatgtccattcaggatatgggtttgctattgggaacatggcagcctttgatatgaatgaccctgaagcagtagtatccccaggtggtgtcgggtttgacatcaactgtggtgtccgcttgctaagaaccaatttagatgaaagtgatgtccagcctgtgaaggagcaacttgcccaagctatgtttgaccacattcctgttggggtggggtcaaaaggtgtcatcccaatgaatgccaaagacttggaggaggccttggagatgggggtggactggtccttaagagaagggtatgcctgggctgaagacaaggagcactgcgaggagtacggaaggatgctgcaggctgaccccaataaagtttctgcaagggcgaagaaaagaggccttcctcagttggggaccctgggagcaggcaaccattatgcagaaatccaggttgtggatgagattttcaatgagtatgctgctaaaaaaatgggcatcgaccataagggacaggtgtgtgtgatgatccacagtggaagcagaggcttgggccaccaagtagccacagatgcgctggtagctatggagaaggccatgaagagagacaagattatagtcaatgatcggcagttggcttgtgctcgaatcgcttccccagagggtcaagactatctgaagggaatggcagctgctgggaactatgcctgggtcaaccgctcttccatgaccttcttaacccgtcaggctttcgccaaggtcttcaacacaacccctgatgacttggacctacatgtgatctatgatgtttctcacaacattgccaaagtggagcagcatgtggtggacggaaaggaacggacactgttagtacacaggaagggatccacccgcgctttccctcctcaccatcccctcattgctgttgattaccaactcactggacagccagtgctcattggtggcaccatgggaacctgtagttatgttcttactggcactgaacagggcatgactgagacctttggaacaacctgtcatggagcgggccgtgcattgtcccgagcaaaatctcgacgtaatttagatttccaggatgtcttagacaaattggcagatatgggaattgcgatccgtgttgcctcacccaaactggttatggaagaggctcctgagtcctataagaatgtgacagatgtggtaaatacctgccatgatgctggaatcagcaagaaagccattaaactgagaccaattgctgtgatcaaaggatagaaccttggacagcagggctgcctgacaccaccaaccctctctgaagtggaagtggactgacatgctcttctgacatcagactcaaggcgggacaagttgcaaagtgtgcagctgtaactgctcacgccaaaatggctgatggggaggctgctgctttcaggggcccgtgcttgtaaaataaccttccaggaagaggcacattgcccacctttggaaagggaggaatatgccttctccttggttgttccacagagttttaggaaaatctgttagggatgggtagatgtcaaactgccttacgcagtcatactgatctttagccatcagattgatcttcttcacaccaagctctgtttacattccgagaggtgtcatgaagaaagttctgttcaataaggttttggaatgtttcctttctttcgtctgttgctttgtcagtttgtccattcatccacccatttaggcatcacccctgcactcagcaaaaccctaaatacccctcttacttggagagcacccagggagttgtaatcaggctgttagatgaatggatagtggaacacattgaagagggagtatggggaggtttaaggaatagcggcccaaaagacaaagtcttcatagctttactacctttcttattctaaatacacggcagagtttttgtatccatggggccgggtgaacaaaatggaggtaggtggtggtgctggtgatggagggcacagcagaaccagaggcctggcctccctcctacacatgccttgcagggctttttttttt

SEQ ID NO: 420360 - DNA, 3045 bp, Homo sapiens
  misc_feature (9)..(9): n is a, c, g, or t
  misc_feature (15)..(15): n is a, c, g, or t
tggctagtncgagcnggtggtgaatcggcacgaggctgagctctgagaagccggactacgcggcagcggctcttcaaagcggagccgggagtttttgctacagttttcgccaccatgagtcgcagctataatgatgagctgcagttcttggagaagatcaataaaaactgctggaggatcaagaagggcttcgtgcccaacatgcaggttgaaggtgttttctatgtgaatgatgctctggagaaattgatgtttgaggaattaaggaatgcctgtcgaggtggtggtgttggtggcttcctgccagccatgaaacagattggcaatgtggcagccctgcctggaattgttcatcgatctattgggcttcctgatgtccattcaggatatgggtttgctattgggaacatggcagcctttgatatgaatgaccctgaagcagtagtatccccaggtggtgtcgggtttgacatcaactgtggtgtccgcttgctaagaaccaatttagatgaaagtgatgtccagcctgtgaaggagcaacttgcccaagctatgtttgaccacattcctgttggggtggggtcaaaaggtgtcatcccaatgaatgccaagtaagagcacacgtttccagtacatggtatgggagggataataaccacatgaccttcagcttcctttccagtgcagtacacttgagagatgaggattgttcagttacttttcaggaagtagtaagaactgtttttttaagcatgaggtacagcccatttattggagacattagtcaaccgatgttataacagcctttgacatagagtagtatttataataacatcatatccaccaacgtttattgagcactttctatgtgtaaggtgctgagcatcatatcatttcatccagacaataaccctattatcttccctaacttacaagaaagaaaactgaggtttagagaggtaataagcttagtgccaggtgtggttgggtttacagaatcccaacactttgggaggccaaggcaggaggatcacttgagtccaggagtaaaagatgaacctaggcaacatagatctcgtctctaaaaaaaaaaaattaactaggcatgatggcttgtgactgtagtcccacctactcaggaggctgaagcagaaggatcccttgagagaccaggagttcaaggcggcagtgtgctgagatctcagtactgcaccccagcgtgggcaacagagtgaccctgtagacttggaggaggccttggagatgggggtggactggtccttaagagaagggtatgcctgggctgaagacaaggagcactgcgaggagtacggaaggatgctgcaggctgaccccaataaagtttctgcaagggcgaagaaaagaggccttcctcagttggggaccctgggagcaggcaaccattatgcagaaatccaggttgtggatgagattttcaatgagtatgctgctaaaaaaatgggcatcgaccataagggacaggtgtgtgtgatgatccacagtggaagcagaggcttgggccaccaagtagccacagatgcgctggtagctatggagaaggccatgaagagagacaagattatagtcaatgatcggcagttggcttgtgctcgaatcgcttccccagagggtcaagactatctgaagggaatggcagctgctgggaactatgcctgggtcaaccgctcttccatgaccttcttaacccgtcaggctttcgccaaggtcttcaacacaacccctgatgacttggacctacatgtgatctatgatgtttctcacaacattgccaaagtggagcagcatgtggtggacggaaaggaacggacactgttagtacacaggaagggatccacccgcgctttccctcctcaccatcccctcattgctgttgattaccaactcactggacagccagtgctcattggtggcaccatgggaacctgtagttatgttcttactggcactgaacagggcatgactgagacctttggaacaacctgtcatggagcgggccgtgcattgtcccgagcaaaatctcgacgtaatttagatttccaggatgtcttagacaaattggcagatatgggaattgcgatccgtgttgcctcacccaaactggttatggaagaggctcctgagtcctataagaatgtgacagatgtggtaaatacctgccatgatgctggaatcagcaagaaagccattaaactgagaccaattgctgtgatcaaaggatagaaccttggacagcagggctgcctgacaccaccaaccctctctgaagtggaagtggactgacatgctcttctgacatcagactcaaggcgggacaagttgcaaagtgtgcagctgtaactgctcacgccaaaatggctgatggggaggctgctgctttcaggggcccgtgcttgtaaaataaccttccaggaagaggcacattgcccacctttggaaagggaggaatatgccttctccttggttgttccacagagttttaggaaaatctgttagggatgggtagatgtcaaactgccttacgcagtcatactgatctttagccatcagattgatcttcttcacaccaagctctgtttacattccgagaggtgtcatgaagaaagttctgttcaataaggttttggaatgtttcctttctttcgtctgttgctttgtcagtttgtccattcatccacccatttaggcatcacccctgcactcagcaaaaccctaaatacccctcttacttggagagcacccagggagttgtaatcaggctgttagatgaatggatagtggaacacattgaagagggagtatggggaggtttaaggaatagcggcccaaaagacaaagtcttcatagctttactacctttcttattctaaatacacggcagagtttttgtatccatggggccgggtgaacaaaatggaggtaggtggtggtgctggtgatggagggcacagcagaaccagaggcctggcctccctcctacacatgccttgcagggctttttttttt

SEQ ID NO: 420361 - DNA, 820 bp, Homo sapiens
  misc_feature (9)..(9): n is a, c, g, or t
  misc_feature (15)..(15): n is a, c, g, or t
  misc_feature (778)..(778): n is a, c, g, or t
  misc_feature (783)..(783): n is a, c, g, or t
  misc_feature (790)..(790): n is a, c, g, or t
tggctagtncgagcnggtggtgaatcggcacgaggctgagctctgagaagccggactacgcggcagcggctcttcaaagcggagccgggagtttttgctacagttttcgccaccatgagtcgcagctataatgatgagctgcagttcttggagaagatcaataaaaactgctggaggatcaagaagggcttcgtgcccaacatgcaggttgaaggtgttttctatgtgaatgatgctctggagaaattgatgtttgaggaattaaggaatgcctgtcgaggtggtggtgttggtggcttcctgccagccatgaaacagattggcaatgtggcagccctgcctggaattgttcatcgatctattgggcttcctgatgtccattcaggatatgggtttgctattgggaacatggcagcctttgatatgaatgaccctgaagcagtagtatccccaggtggtgtcgggtttgacatcaactgtggtgtccgcttgctaagaaccaatttagatgaaagtgatgtccagcctgtgaaggagcaacttgcccaagctatgtttgaccacattcctgttggggtggggtcaaaaggtgtcatcccaatgaatgccaaagacttggaggaggccttggagatgggggtggactggtccttaagagaagggtatgcctgggctgaagacaaggagcactgcgaggagtacggaaggatgctgcaggctgaccccaataaagtttctgcaagggcgaagaaaagaggccttcctcagtggggacccngggcngcacctngcgaaccgtgggggcgatcccagggtcggg

SEQ ID NO: 420362 - DNA, 1687 bp, Homo sapiens
  misc_feature (9)..(9): n is a, c, g, or t
  misc_feature (15)..(15): n is a, c, g, or t
tggctagtncgagcnggtggtgaatcggcacgaggctgagctctgagaagccggactacgcggcagcggctcttcaaagcggagccgggagtttttgctacagttttcgccaccatgagtcgcagctataatgatgagctgcagttcttggagaagatcaataaaaactgctggaggatcaagaagggcttcgtgcccaacatgcaggttgaaggtgttttctatgtgaatgatgctctggagaaattgatgtttgaggaattaaggaatgcctgtcgaggtggtggtgttggtggcttcctgccagccatgaaacagattggcaatgtggcagccctgcctggaattgttcatcgatctattgggcttcctgatgtccattcaggatatgggtttgctattgggaacatggcagcctttgatatgaatgaccctgaagcagtagtatccccaggtggtgtcgggtttgacatcaactgtggtgtccgcttgctaagaaccaatttagatgaaagtgatgtccagcctgtgaaggagcaacttgcccaagctatgtttgaccacattcctgttggggtggggtcaaaaggtgtcatcccaatgaatgccaagtaagagcacacgtttccagtacatggtatgggagggataataaccacatgaccttcagcttcctttccagtgcagtacacttgagagatgaggattgttcagttacttttcaggaagtagtaagaactgtttttttaagcatgaggtacagcccatttattggagacattagtcaaccgatgttataacagcctttgacatagagtagtatttataataacatcatatccaccaacgtttattgagcactttctatgtgtaaggtgctgagcatcatatcatttcatccagacaataaccctattatcttccctaacttacaagaaagaaaactgaggtttagagaggtaataagcttagtgccaggtgtggttgggtttacagaatcccaacactttgggaggccaaggcaggaggatcacttgagtccaggagtaaaagatgaacctaggcaacatagatctcgtctctaaaaaaaaaaaattaactaggcatgatggcttgtgactgtagtcccacctactcaggaggctgaagcagaaggatcccttgagagaccaggagttcaaggcggcagtgtgctgagatctcagtactgcaccccagcgtgggcaacagagtgaccctgtctcaattaaaaaaaaaaaaaaaaaaacttagtaggtgatatcaggattcaaaccaaagatcctttgacttcagaagctgtattctgaatcctactgccttttgtcattaagcctatttaaccccaaccttcctctttgaatgatagcactggatgtgttctttggtaagtagaggattaaatataatgctatagtgtatctctcagatggccatagattttaccgtgtcatagcttatgcaaagcagtgcaccctaaactttgcagagtacttcagtagcagaatagtgtgctagctatgtttctttaatattttgctttatccttcaaatttatgtgaactttgcattataattaatagaaaaaaatgtttttagctgttacttgtaatgttatttaactccccctaaccaaaaaaaatacctaagtaaaatcaatatacttgga

SEQ ID NO: 420363 - DNA, 652 bp, Homo sapiens
  misc_feature (9)..(9): n is a, c, g, or t
  misc_feature (15)..(15): n is a, c, g, or t
tggctagtncgagcnggtggtgaatcggcacgaggctgagctctgagaagccggactacgcggcagcggctcttcaaagcggagccgggagtttttgctacagttttcgccaccatgagtcgcagctataatgatgagctgcagttcttggagaagatcaataaaaactgctggaggatcaagaagggcttcgtgcccaacatgcaggttgaaggtgttttctatgtgaatgatgctctggagaaattgatgtttgaggaattaaggaatgcctgtcgaggtggtggtgttggtggcttcctgccagccatgaaacagattggcaatgtggcagccctgcctggaattgttcatgtgagtcagagttcagaactttaatcatttatatttcttaaagtccattgaatggatgaatggccatgcctgatagtggtgtcatttagacaatgacctttggacagccagacataaccatgaagccaggctcagtggctcatgccacccgcaacactttgagagaccaagatggaaggattgcatgagcccaggaattcaagactagtctgggcaacatggcaagaccctgtctataccaaaaaaattagtcaggtgtgatgtcacatgcttgttgtcccagctacttagaatgcta

SEQ ID NO: 420364 - DNA, 393 bp, Homo sapiens
ctgcccttaggggatgctcagccccctctgctctgtcttttccctggcagatgtccttctcctggagggtgtgaccttgacccaggattccaggcagctgaatgggtcggagcgggcggtgttggatgggctgctcaccccagccgagtgtggggtgctgctgcagctggctaaggctagcctggagctcaccaggcctggggagctgggacggggccccgctgccggacctgcagccctggacagatggggaacactgtgcctccctgaacggaaatggcaggggaggaggctgatgctttaaatgaagaggatggtggggttgggaggtataaccctgctcctctctcccagtctgtgcaataaaggtcgtgaagatctctcaaaaagggg

SEQ ID NO: 420365 - DNA, 2903 bp, Homo sapiens
acccagaagcgtgtgtgtggagggaacacagccccagtagttacccccagacctcaggggctgaagtcaccgctggggctgaagtcatccttcatggatgcccaggcctgctccagttcccgccttttgccctcctcctcccagtttctccctcttattccacactagaccagctttgtccactcagcactcttctctctccatctctccttcctccccctccctccccttcccccctttcctctccctccctctcggctcccgcattttcccctcggctgccggcggctccgacatcatgctccggctcctccggccgctgctgctactgctgctgctgcctcccccggggtcccctgagccccccggcctgacccagctgtccccgggggcgcccccgcaggcccccgacttgctctacgctgacgggctgcgcgcctacgcggccggggcttgggcgccggccgtggcgctgctgcgggaggcgctgcggagccaggcggcgctgggccgggtgcggctggattgcggggcgagctgcgcggccgatccgggcgccgcgctccccgccgtgcttctcggggccccggagcccgactccgggccgggacccacgcaggggtcctgggagcgacagcttctccgtgcagcgctccgccgcgcagactgcctgacccagtgcgcagcacggaggctgggccccgggggcgcggcgcggcttcgcgtggggagcgcgctccgggacgccttccgccgtcgggagccctacaactacctgcagagggcctattaccagttgaagaagctggatctggcagctgcggcagcacacaccttctttgtagcaaaccccatgcacctgcagatgcgggaggacatggctaagtacagacgaatgtcgggagttcggccccagagcttccgggacctggagacgcccccacactgggcagcctatgacactggcctggagctactggggcgccaggaggcaggactggcactgcccaggctagaggaggctcttcaggggagcctggcccagatggagagctgccgtgctgactgtgaggggcctgaggagcagcagggggctgaagaagaggaggatggggctgcgagccaggggggcctctatgaggccattgcaggacactggattcaggtcctgcagtgccggcaacgctgtgtgggggaaacagccacacgccctggtcgcagcttccctgtcccagacttccttcccaaccagctgaggcggctacatgaggcccatgctcaggtgggcaatctgtcccaggctatagaaaatgtcctgagtgtcctgctcttctacccggaggatgaggctgccaagagggctctgaaccagtaccaggcccagctgggagagccgagacctggcctcggacccagagaggacatccagcgcttcatcctccgatccctgggggagaagaggcagctctactatgccatggagcacctggggaccagcttcaaggatcctgacccctggacccctgcagctctcatccctgaggcacttagagaaaagctcagagaggatcaagagaagaggccttgggaccatgagcccgtgaagccaaagcccttgacctactggaaggatgtccttctcctggagggtgtgaccttgacccaggattccaggcagctgaatgggtcggagcgggcggtgttggatgggctgctcaccccagccgagtgtggggtgctgctgcagctggctaaggatgcagctggggctggagccaggtctggctatcgtggtcgccgctcccctcacaccccccatgaacgcttcgaggggctcacggtgcttaaggctgcgcagctggcccgggctgggacagtgggcagtcagggtgctaagctgcttctggaggtgagcgagcgggtgcggaccttgacccaggcctacttctccccggaacggcccctgcatctgtccttcacccacctggtgtgccgcagcgccatagaaggagagcaagagcagcgcatggacctgagtcacccagtgcacgcagacaactgcgtcctggaccctgacacgggagagtgctggcgggagcccccagcctacacctatcgggactacagcggactcctctacctcaacgatgacttccagggtggggacctgttcttcacggagcccaacgccctcactgtcacggctcgggtgcgtcctcgctgtgggcgccttgtggccttcagctccggtgtcgagaatccccatggggtgtgggccgtgactcggggacggcgctgtgccctggcactgtggcacacgtgggcacctgagcacagggagcaggagtggacagaagccaaagaactgctgcaggagtcacaggaggaggaggaagaggaagaggaagaaatgcccagcaaagacccttccccagagccccctagccgcaggcaccagagggtccaagacaagactggaagggcacctcgggttcgggaggagctgtgagtggctgagccagctccttgaggatgtggccacttgacttgtggaaggccatcttgatgccaggacgcacaggaagcccctgtgtgacatcaggagcagaacagcaagctctctgtccctgcacccccaccatcttggggacctacaagggcctggactcagaggacagtgcacaggctagcctggagctcaccaggcctggggagctgggacggggccccgctgccggacctgcagccctggacagatggggaacactgtgcctccctgaacggaaatggcaggggaggaggctgatgctttaaatgaagaggatggtggggttgggaggtataaccctgctcctctctcccagtctgtgcaataaaggtcgtgaagatctctcaaaaagggg

SEQ ID NO: 420366 - DNA, 2486 bp, Homo sapiens
acccagaagcgtgtgtgtggagggaacacagccccagtagttacccccagacctcaggggctgaagtcaccgctggggctgaagtcatccttcatggatgcccaggcctgctccagttcccgccttttgccctcctcctcccagtttctccctcttattccacactagaccagctttgtccactcagcactcttctctctccatctctccttcctccccctccctccccttcccccctttcctctccctccctctcggctcccgcattttcccctcggctgccggcggctccgacatcatgctccggctcctccggccgctgctgctactgctgctgctgcctcccccggggtcccctgagccccccggcctgacccagctgtccccgggggcgcccccgcaggcccccgacttgctctacaactacctgcagagggcctattaccagatgcgggaggacatggctaagtacagacgaatgtcgggagttcggccccagagcttccgggacctggagacgcccccacactgggcagcctatgacactggcctggagctactggggcgccaggaggcaggactggcactgcccaggctagaggaggctcttcaggggagcctggcccagatggagagctgccgtgctgactgtgaggggcctgaggagcagcagggggctgaagaagaggaggatggggctgcgagccaggggggcctctatgaggccattgcaggacactggattcaggtcctgcagtgccggcaacgctgtgtgggggaaacagccacacgccctggtcgcagcttccctgtcccagacttccttcccaaccagctgaggcggctacatgaggcccatgctcaggtgggcaatctgtcccaggctatagaaaatgtcctgagtgtcctgctcttctacccggaggatgaggctgccaagagggctctgaaccagtaccaggcccagctgggagagccgagacctggcctcggacccagagaggacatccagcgcttcatcctccgatccctgggggagaagaggcagctctactatgccatggagcacctggggaccagcttcaaggatcctgacccctggacccctgcagctctcatccctgaggcacttagagaaaagctcagagaggatcaagagaagaggccttgggaccatgagcccgtgaagccaaagcccttgacctactggaaggatgtccttctcctggagggtgtgaccttgacccaggattccaggcagctgaatgggtcggagcgggcggtgttggatgggctgctcaccccagccgagtgtggggtgctgctgcagctggctaaggatgcagctggggctggagccaggtctggctatcgtggtcgccgctcccctcacaccccccatgaacgcttcgaggggctcacggtgcttaaggctgcgcagctggcccgggctgggacagtgggcagtcagggtgctaagctgcttctggaggtgagcgagcgggtgcggaccttgacccaggcctacttctccccggaacggcccctgcatctgtccttcacccacctggtgtgccgcagcgccatagaaggagagcaagagcagcgcatggacctgagtcacccagtgcacgcagacaactgcgtcctggaccctgacacgggagagtgctggcgggagcccccagcctacacctatcgggactacagcggactcctctacctcaacgatgacttccagggtggggacctgttcttcacggagcccaacgccctcactgtcacggctcgggtgcgtcctcgctgtgggcgccttgtggccttcagctccggtgtcgagaatccccatggggtgtgggccgtgactcggggacggcgctgtgccctggcactgtggcacacgtgggcacctgagcacagggagcaggagtggacagaagccaaagaactgctgcaggagtcacaggaggaggaggaagaggaagaggaagaaatgcccagcaaagacccttccccagagccccctagccgcaggcaccagagggtccaagacaagactggaagggcacctcgggttcgggaggagctgtgagtggctgagccagctccttgaggatgtggccacttgacttgtggaaggccatcttgatgccaggacgcacaggaagcccctgtgtgacatcaggagcagaacagcaagctctctgtccctgcacccccaccatcttggggacctacaagggcctggactcagaggacagtgcacaggctagcctggagctcaccaggcctggggagctgggacggggccccgctgccggacctgcagccctggacagatggggaacactgtgcctccctgaacggaaatggcaggggaggaggctgatgctttaaatgaagaggatggtggggttgggaggtataaccctgctcctctctcccagtctgtgcaataaaggtcgtgaagatctctcaaaaagggg

SEQ ID NO: 420367 - DNA, 1665 bp, Homo sapiens
ctcatcatctcaccctcaggacatccagcgcttcatcctccgatccctgggggagaagaggcagctctactatgccatggagcacctggggaccagcttcaaggatccttttgatccactgcccagggctcctgacattgagtcccgggcttttcctacctccgtcttcctctctggaaacagaagaaccttaatgagatatttcagctctaatgtcagggattccaggggctgaccttggtgggtgatgatgcttttctggactgtcgcaggacccctggacccctgcagctctcatccctgaggcacttagagaaaagctcagagaggatcaagagaagaggccttgggaccatgagcccgtgaagccaaagcccttgacctactggaaggatgtccttctcctggagggtgtgaccttgacccaggattccaggcagctgaatgggtcggagcgggcggtgttggatgggctgctcaccccagccgagtgtggggtgctgctgcagctggctaaggatgcagctggggctggagccaggtctggctatcgtggtcgccgctcccctcacaccccccatgaacgcttcgaggggctcacggtgcttaaggctgcgcagctggcccgggctgggacagtgggcagtcagggtgctaagctgcttctggaggtgagcgagcgggtgcggaccttgacccaggcctacttctccccggaacggcccctgcatctgtccttcacccacctggtgtgccgcagcgccatagaaggagagcaagagcagcgcatggacctgagtcacccagtgcacgcagacaactgcgtcctggaccctgacacgggagagtgctggcgggagcccccagcctacacctatcgggactacagcggactcctctacctcaacgatgacttccagggtggggacctgttcttcacggagcccaacgccctcactgtcacggctcgggtgcgtcctcgctgtgggcgccttgtggccttcagctccggtgtcgagaatccccatggggtgtgggccgtgactcggggacggcgctgtgccctggcactgtggcacacgtgggcacctgagcacagggagcaggagtggacagaagccaaagaactgctgcaggagtcacaggaggaggaggaagaggaagaggaagaaatgcccagcaaagacccttccccagagccccctagccgcaggcaccagagggtccaagacaagactggaagggcacctcgggttcgggaggagctgtgagtggctgagccagctccttgaggatgtggccacttgacttgtggaaggccatcttgatgccaggacgcacaggaagcccctgtgtgacatcaggagcagaacagcaagctctctgtccctgcacccccaccatcttggggacctacaagggcctggactcagaggacagtgcacaggctagcctggagctcaccaggcctggggagctgggacggggccccgctgccggacctgcagccctggacagatggggaacactgtgcctccctgaacggaaatggcaggggaggaggctgatgctttaaatgaagaggatggtggggttgggaggtataaccctgctcctctctcccagtctgtgcaataaaggtcgtgaagatctctcaaaaagggg

SEQ ID NO: 420368 - DNA, 1420 bp, Homo sapiens
gtgggaggggcttggcccgagctgggaggctgggtctggactgtcctgggcacccactgagcgcatctctcacccctgagagaggatcaagagaagaggccttgggaccatgagcccgtgaagccaaagcccttgacctactggaaggatgtccttctcctggagggtgtgaccttgacccaggattccaggcagctgaatgggtcggagcgggcggtgttggatgggctgctcaccccagccgagtgtggggtgctgctgcagctggctaaggatgcagctggggctggagccaggtctggctatcgtggtcgccgctcccctcacaccccccatgaacgcttcgaggggctcacggtgcttaaggctgcgcagctggcccgggctgggacagtgggcagtcagggtgctaagctgcttctggaggtgagcgagcgggtgcggaccttgacccaggcctacttctccccggaacggcccctgcatctgtccttcacccacctggtgtgccgcagcgccatagaaggagagcaagagcagcgcatggacctgagtcacccagtgcacgcagacaactgcgtcctggaccctgacacgggagagtgctggcgggagcccccagcctacacctatcgggactacagcggactcctctacctcaacgatgacttccagggtggggacctgttcttcacggagcccaacgccctcactgtcacggctcgggtgcgtcctcgctgtgggcgccttgtggccttcagctccggtgtcgagaatccccatggggtgtgggccgtgactcggggacggcgctgtgccctggcactgtggcacacgtgggcacctgagcacagggagcaggagtggacagaagccaaagaactgctgcaggagtcacaggaggaggaggaagaggaagaggaagaaatgcccagcaaagacccttccccagagccccctagccgcaggcaccagagggtccaagacaagactggaagggcacctcgggttcgggaggagctgtgagtggctgagccagctccttgaggatgtggccacttgacttgtggaaggccatcttgatgccaggacgcacaggaagcccctgtgtgacatcaggagcagaacagcaagctctctgtccctgcacccccaccatcttggggacctacaagggcctggactcagaggacagtgcacaggctagcctggagctcaccaggcctggggagctgggacggggccccgctgccggacctgcagccctggacagatggggaacactgtgcctccctgaacggaaatggcaggggaggaggctgatgctttaaatgaagaggatggtggggttgggaggtataaccctgctcctctctcccagtctgtgcaataaaggtcgtgaagatctctcaaaaagggg

SEQ ID NO: 420369 - DNA, 1197 bp, Homo sapiens
acccagaagcgtgtgtgtggagggaacacagccccagtagttacccccagacctcaggggctgaagtcaccgctggggctgaagtcatccttcatggatgcccaggcctgctccagttcccgccttttgccctcctcctcccagtttctccctcttattccacactagaccagctttgtccactcagcactcttctctctccatctctccttcctccccctccctccccttcccccctttcctctccctccctctcggctcccgcattttcccctcggctgccggcggctccgacatcatgctccggctcctccggccgctgctgctactgctgctgctgcctcccccggggtcccctgagccccccggcctgacccagctgtccccgggggcgcccccgcaggcccccgacttgctctaccggactcctctacctcaacgatgacttccagggtggggacctgttcttcacggagcccaacgccctcactgtcacggctcgggtgcgtcctcgctgtgggcgccttgtggccttcagctccggtgtcgagaatccccatggggtgtgggccgtgactcggggacggcgctgtgccctggcactgtggcacacgtgggcacctgagcacagggagcaggagtggacagaagccaaagaactgctgcaggagtcacaggaggaggaggaagaggaagaggaagaaatgcccagcaaagacccttccccagagccccctagccgcaggcaccagagggtccaagacaagactggaagggcacctcgggttcgggaggagctgtgagtggctgagccagctccttgaggatgtggccacttgacttgtggaaggccatcttgatgccaggacgcacaggaagcccctgtgtgacatcaggagcagaacagcaagctctctgtccctgcacccccaccatcttggggacctacaagggcctggactcagaggacagtgcacaggctagcctggagctcaccaggcctggggagctgggacggggccccgctgccggacctgcagccctggacagatggggaacactgtgcctccctgaacggaaatggcaggggaggaggctgatgctttaaatgaagaggatggtggggttgggaggtataaccctgctcctctctcccagtctgtgcaataaaggtcgtgaagatctctcaaaaagggg

SEQ ID NO: 420370 - DNA, 1865 bp, Homo sapiens
acccagaagcgtgtgtgtggagggaacacagccccagtagttacccccagacctcaggggctgaagtcaccgctggggctgaagtcatccttcatggatgcccaggcctgctccagttcccgccttttgccctcctcctcccagtttctccctcttattccacactagaccagctttgtccactcagcactcttctctctccatctctccttcctccccctccctccccttcccccctttcctctccctccctctcggctcccgcattttcccctcggctgccggcggctccgacatcatgctccggctcctccggccgctgctgctactgctgctgctgcctcccccggggtcccctgagccccccggcctgacccagctgtccccgggggcgcccccgcaggcccccgacttgctctacgctgacgggctgcgcgcctacgcggccggggcttgggcgccggccgtggcgctgctgcgggaggcgctgcggagccaggcggcgctgggccgggtgcggctggattgcggggcgagctgcgcggccgatccgggcgccgcgctccccgccgtgcttctcggggccccggagcccgactccgggccgggacccacgcaggggtcctgggagcgacagcttctccgtgcagcgctccgccgcgcagactgcctgacccagtgcgcagcacggaggctgggccccgggggcgcggcgcggcttcgcgtggggagcgcgctccgggacgccttccgccgtcgggagccctacaactacctgcagagggcctattaccagttgaagaagctggatctggcagctgcggcagcacacaccttctttgtagcaaaccccatgcacctgcagatgcgggaggacatggctaagtacagacgaatgtcgggagttcggccccagagcttccgggacctggagacgcccccacactgggcagcctatgacactggcctggagctactggggcgccaggaggcaggactggcactgcccaggctagaggaggctcttcaggggagcctggcccagatggagagctgccgtgctgactgtgaggggcctgaggagcagcagggggctgaagaagaggaggatggggctgcgagccaggggggcctctatgaggccattgcaggacactggattcaggtcctgcagtgccggcaacgctgtgtgggggaaacagccacacgccctggtcgcagcttccctgtcccagacttccttcccaaccagctgaggcggctacatgaggcccatgctcaggtgggcaatctgtcccaggctatagaaaatgtcctgagtgtcctgctcttctacccggaggatgaggctgccaagagggctctgaaccagtaccaggcccagctgggagagccgagacctggcctcggacccagagaggacatccagcgcttcatcctccgatccctgggggagaagaggcagctctactatgccatggagcacctggggaccagcttcaaggatcctgacccctggacccctgcagctctcatccctgaggcacttagagaaaagctcagatgtccttctcctggagggtgtgaccttgacccaggattccaggcagctgaatgggtcggagcgggcggtgttggatgggctgctcaccccagccgagtgtggggtgctgctgcagctggctaaggatgcagctggggctggagccaggtctggctatcgtggtcgccgctcccctcacaccccctcccttccaacagctgcttatcgaacagcttgcaggatgcaggcagctccttcctgtgcaatgagcattgccttctgcaggggctgccctttgtggtctctggcggtaccttgtacg

SEQ ID NO: 420371 - DNA, 403 bp, Homo sapiens
caaaaaacaacaacaaaaaacaactaaccctgtcatttgtagctgtgtgatcttgagcatgttactttacttctctgtgtctcagggctctcaattacaaaatgagcactttaatattctgtttcatgagactgttgtgaactttaaaggataaattccatttccatgaataaagctcttagaatagcccctagcagatagtaagtgctatatgagttatagttgtacttgttgttacagtttgatccactgcccagggctcctgacattgagtcccgggcttttcctacctccgtcttcctctctggaaacagaagaaccttaatgagatatttcagctctaatgtcagggattccaggggctgaccttggtgggtgatgatgcttttctggactgtcgcag

SEQ ID NO: 420372 - DNA, 2138 bp, Homo sapiens
ctctgatgccctcctcccttcgcctcctcagttgaagaagctggatctggcagctgcggcagcacacaccttctttgtagcaaaccccatgcacctgcagatgcgggaggacatggctaagtacagacgaatgtcgggagttcggccccagagcttccgggacctggagacgcccccacactgggcagcctatgacactggcctggagctactggggcgccaggaggcaggactggcactgcccaggctagaggaggctcttcaggggagcctggcccagatggagagctgccgtgctgactgtgaggggcctgaggagcagcagggggctgaagaagaggaggatggggctgcgagccaggggggcctctatgaggccattgcaggacactggattcaggtcctgcagtgccggcaacgctgtgtgggggaaacagccacacgccctggtcgcagcttccctgtcccagacttccttcccaaccagctgaggcggctacatgaggcccatgctcaggtgggcaatctgtcccaggctatagaaaatgtcctgagtgtcctgctcttctacccggaggatgaggctgccaagagggctctgaaccagtaccaggcccagctgggagagccgagacctggcctcggacccagagaggacatccagcgcttcatcctccgatccctgggggagaagaggcagctctactatgccatggagcacctggggaccagcttcaaggatcctgacccctggacccctgcagctctcatccctgaggcacttagagaaaagctcagagaggatcaagagaagaggccttgggaccatgagcccgtgaagccaaagcccttgacctactggaaggatgtccttctcctggagggtgtgaccttgacccaggattccaggcagctgaatgggtcggagcgggcggtgttggatgggctgctcaccccagccgagtgtggggtgctgctgcagctggctaaggatgcagctggggctggagccaggtctggctatcgtggtcgccgctcccctcacaccccccatgaacgcttcgaggggctcacggtgcttaaggctgcgcagctggcccgggctgggacagtgggcagtcagggtgctaagctgcttctggaggtgagcgagcgggtgcggaccttgacccaggcctacttctccccggaacggcccctgcatctgtccttcacccacctggtgtgccgcagcgccatagaaggagagcaagagcagcgcatggacctgagtcacccagtgcacgcagacaactgcgtcctggaccctgacacgggagagtgctggcgggagcccccagcctacacctatcgggactacagcggactcctctacctcaacgatgacttccagggtggggacctgttcttcacggagcccaacgccctcactgtcacggctcgggtgcgtcctcgctgtgggcgccttgtggccttcagctccggtgtcgagaatccccatggggtgtgggccgtgactcggggacggcgctgtgccctggcactgtggcacacgtgggcacctgagcacagggagcaggagtggacagaagccaaagaactgctgcaggagtcacaggaggaggaggaagaggaagaggaagaaatgcccagcaaagacccttccccagagccccctagccgcaggcaccagagggtccaagacaagactggaagggcacctcgggttcgggaggagctgtgagtggctgagccagctccttgaggatgtggccacttgacttgtggaaggccatcttgatgccaggacgcacaggaagcccctgtgtgacatcaggagcagaacagcaagctctctgtccctgcacccccaccatcttggggacctacaagggcctggactcagaggacagtgcacaggctagcctggagctcaccaggcctggggagctgggacggggccccgctgccggacctgcagccctggacagatggggaacactgtgcctccctgaacggaaatggcaggggaggaggctgatgctttaaatgaagaggatggtggggttgggaggtataaccctgctcctctctcccagtctgtgcaataaaggtcgtgaagatctctcaaaaagggg

SEQ ID NO: 420373 - DNA, 2128 bp, Homo sapiens
cacacatcttcgttggttgggttgaagaagctggatctggcagctgcggcagcacacaccttctttgtagcaaaccccatgcacctgcagatgcgggaggacatggctaagtacagacgaatgtcgggagttcggccccagagcttccgggacctggagacgcccccacactgggcagcctatgacactggcctggagctactggggcgccaggaggcaggactggcactgcccaggctagaggaggctcttcaggggagcctggcccagatggagagctgccgtgctgactgtgaggggcctgaggagcagcagggggctgaagaagaggaggatggggctgcgagccaggggggcctctatgaggccattgcaggacactggattcaggtcctgcagtgccggcaacgctgtgtgggggaaacagccacacgccctggtcgcagcttccctgtcccagacttccttcccaaccagctgaggcggctacatgaggcccatgctcaggtgggcaatctgtcccaggctatagaaaatgtcctgagtgtcctgctcttctacccggaggatgaggctgccaagagggctctgaaccagtaccaggcccagctgggagagccgagacctggcctcggacccagagaggacatccagcgcttcatcctccgatccctgggggagaagaggcagctctactatgccatggagcacctggggaccagcttcaaggatcctgacccctggacccctgcagctctcatccctgaggcacttagagaaaagctcagagaggatcaagagaagaggccttgggaccatgagcccgtgaagccaaagcccttgacctactggaaggatgtccttctcctggagggtgtgaccttgacccaggattccaggcagctgaatgggtcggagcgggcggtgttggatgggctgctcaccccagccgagtgtggggtgctgctgcagctggctaaggatgcagctggggctggagccaggtctggctatcgtggtcgccgctcccctcacaccccccatgaacgcttcgaggggctcacggtgcttaaggctgcgcagctggcccgggctgggacagtgggcagtcagggtgctaagctgcttctggaggtgagcgagcgggtgcggaccttgacccaggcctacttctccccggaacggcccctgcatctgtccttcacccacctggtgtgccgcagcgccatagaaggagagcaagagcagcgcatggacctgagtcacccagtgcacgcagacaactgcgtcctggaccctgacacgggagagtgctggcgggagcccccagcctacacctatcgggactacagcggactcctctacctcaacgatgacttccagggtggggacctgttcttcacggagcccaacgccctcactgtcacggctcgggtgcgtcctcgctgtgggcgccttgtggccttcagctccggtgtcgagaatccccatggggtgtgggccgtgactcggggacggcgctgtgccctggcactgtggcacacgtgggcacctgagcacagggagcaggagtggacagaagccaaagaactgctgcaggagtcacaggaggaggaggaagaggaagaggaagaaatgcccagcaaagacccttccccagagccccctagccgcaggcaccagagggtccaagacaagactggaagggcacctcgggttcgggaggagctgtgagtggctgagccagctccttgaggatgtggccacttgacttgtggaaggccatcttgatgccaggacgcacaggaagcccctgtgtgacatcaggagcagaacagcaagctctctgtccctgcacccccaccatcttggggacctacaagggcctggactcagaggacagtgcacaggctagcctggagctcaccaggcctggggagctgggacggggccccgctgccggacctgcagccctggacagatggggaacactgtgcctccctgaacggaaatggcaggggaggaggctgatgctttaaatgaagaggatggtggggttgggaggtataaccctgctcctctctcccagtctgtgcaataaaggtcgtgaagatctctcaaaaagggg

SEQ ID NO: 420374 - DNA, 2835 bp, Homo sapiens
acccagaagcgtgtgtgtggagggaacacagccccagtagttacccccagacctcaggggctgaagtcaccgctggggctgaagtcatccttcatggatgcccaggcctgctccagttcccgccttttgccctcctcctcccagtttctccctcttattccacactagaccagctttgtccactcagcactcttctctctccatctctccttcctccccctccctccccttcccccctttcctctccctccctctcggctcccgcattttcccctcggctgccggcggctccgacatcatgctccggctcctccggccgctgctgctactgctgctgctgcctcccccggggtcccctgagccccccggcctgacccagctgtccccgggggcgcccccgcaggcccccgacttgctctacgctgacgggctgcgcgcctacgcggccggggcttgggcgccggccgtggcgctgctgcgggaggcgctgcggagccaggcggcgctgggccgggtgcggctggattgcggggcgagctgcgcggccgatccgggcgccgcgctccccgccgtgcttctcggggccccggagcccgactccgggccgggacccacgcaggggtcctgggagcgacagcttctccgtgcagcgctccgccgcgcagactgcctgacccagtgcgcagcacggaggctgggccccgggggcgcggcgcggcttcgcgtggggagcgcgctccgggacgccttccgccgtcgggagccctacaactacctgcagagggcctattaccagttgaagaagctggatctggcagctgcggcagcacacaccttctttgtagcaaaccccatgcacctgcagatgcgggaggacatggctaagtacagacgaatgtcgggagttcggccccagagcttccgggacctggagacgcccccacactgggcagcctatgacactggcctggagctactggggcgccaggaggcaggactggcactgcccaggctagaggaggctcttcaggggagcctggcccagatggagagctgccgtgctgactgtgaggggcctgaggagcagcagggggctgaagaagaggaggatggggctgcgagccaggggggcctctatgaggccattgcaggacactggattcaggtcctgcagtgccggcaacgctgtgtgggggaaacagccacacgccctggtcgcagcttccctgtcccagacttccttcccaaccagctgaggcggctacatgaggcccatgctcaggtgggcaatctgtcccaggctatagaaaatgtcctgagtgtcctgctcttctacccggaggatgaggctgccaagagggctctgaaccagtaccaggcccagctgggagagccgagacctggcctcggacccagagaggacatccagcgcttcatcctccgatccctgggggagaagaggcagctctactatgccatggagcacctggggaccagcttcaaggatcctgacccctggacccctgcagctctcatccctgaggcacttagagaaaagctcagatgtccttctcctggagggtgtgaccttgacccaggattccaggcagctgaatgggtcggagcgggcggtgttggatgggctgctcaccccagccgagtgtggggtgctgctgcagctggctaaggatgcagctggggctggagccaggtctggctatcgtggtcgccgctcccctcacaccccccatgaacgcttcgaggggctcacggtgcttaaggctgcgcagctggcccgggctgggacagtgggcagtcagggtgctaagctgcttctggaggtgagcgagcgggtgcggaccttgacccaggcctacttctccccggaacggcccctgcatctgtccttcacccacctggtgtgccgcagcgccatagaaggagagcaagagcagcgcatggacctgagtcacccagtgcacgcagacaactgcgtcctggaccctgacacgggagagtgctggcgggagcccccagcctacacctatcgggactacagcggactcctctacctcaacgatgacttccagggtggggacctgttcttcacggagcccaacgccctcactgtcacggctcgggtgcgtcctcgctgtgggcgccttgtggccttcagctccggtgtcgagaatccccatggggtgtgggccgtgactcggggacggcgctgtgccctggcactgtggcacacgtgggcacctgagcacagggagcaggagtggacagaagccaaagaactgctgcaggagtcacaggaggaggaggaagaggaagaggaagaaatgcccagcaaagacccttccccagagccccctagccgcaggcaccagagggtccaagacaagactggaagggcacctcgggttcgggaggagctgtgagtggctgagccagctccttgaggatgtggccacttgacttgtggaaggccatcttgatgccaggacgcacaggaagcccctgtgtgacatcaggagcagaacagcaagctctctgtccctgcacccccaccatcttggggacctacaagggcctggactcagaggacagtgcacaggctagcctggagctcaccaggcctggggagctgggacggggccccgctgccggacctgcagccctggacagatggggaacactgtgcctccctgaacggaaatggcaggggaggaggctgatgctttaaatgaagaggatggtggggttgggaggtataaccctgctcctctctcccagtctgtgcaataaaggtcgtgaagatctctcaaaaagggg

SEQ ID NO: 420375 - DNA, 2858 bp, Homo sapiens
acccagaagcgtgtgtgtggagggaacacagccccagtagttacccccagacctcaggggctgaagtcaccgctggggctgaagtcatccttcatggatgcccaggcctgctccagttcccgccttttgccctcctcctcccagtttctccctcttattccacactagaccagctttgtccactcagcactcttctctctccatctctccttcctccccctccctccccttcccccctttcctctccctccctctcggctcccgcattttcccctcggctgccggcggctccgacatcatgctccggctcctccggccgctgctgctactgctgctgctgcctcccccggggtcccctgagccccccggcctgacccagctgtccccgggggcgcccccgcaggcccccgacttgctctacgctgacgggctgcgcgcctacgcggccggggcttgggcgccggccgtggcgctgctgcgggaggcgctgcggagccaggcggcgctgggccgggtgcggctggattgcggggcgagctgcgcggccgatccgggcgccgcgctccccgccgtgcttctcggggccccggagcccgactccgggccgggacccacgcaggggtcctgggagcgacagcttctccgtgcagcgctccgccgcgcagactgcctgacccagtgcgcagcacggaggctgggccccgggggcgcggcgcggcttcgcgtggggagcgcgctccgggacgccttccgccgtcgggagccctacaactacctgcagagggcctattaccagttgaagaagctggatctggcagctgcggcagcacacaccttctttgtagcaaaccccatgcacctgcagatgcgggaggacatggctaagtacagacgaatgtcgggagttcggccccagagcttccgggacctggagacgcccccacactgggcagcctatgacactggcctggagctactggggcgccaggaggcaggactggcactgcccaggctagaggaggctcttcaggggagcctggcccagatggagagctgccgtgctgactgtgaggggcctgaggagcagcagggggctgaagaagaggaggatggggctgcgagccaggggggcctctatgaggccattgcaggacactggattcaggtcctgcagtgccggcaacgctgtgtgggggaaacagccacacgccctggtcgcagcttccctgtcccagacttccttcccaaccagctgaggcggctacatgaggcccatgctcaggtgggcaatctgtcccaggctatagaaaatgtcctgagtgtcctgctcttctacccggaggatgaggctgccaagagggctctgaaccagtaccaggcccagctgggagagccgagacctggcctcggacccagagaggacatccagcgcttcatcctccgatccctgggggagaagaggcagctctactatgccatggagcacctggggaccagcttcaaggatcctgacccctggacccctgcagctctcatccctgaggcacttagagaaaagctcagagaggatcaagagaagaggccttgggaccatgagcccgtgaagccaaagcccttgacctactggaaggatgtccttctcctggagggtgtgaccttgacccaggattccaggcagctgaatgggtcggagcgggcggtgttggatgggctgctcaccccagccgagtgtggggtgctgctgcagctggctaaggatgcagctggggctggagccaggtctggctatcgtggtcgccgctcccctcacaccccccatgaacgcttcgaggggctcacggtgcttaaggctgcgcagctggcccgggctgggacagtgggcagtcagggtgctaagctgcttctggaggtgagcgagcgggtgcggaccttgacccacctggtgtgccgcagcgccatagaaggagagcaagagcagcgcatggacctgagtcacccagtgcacgcagacaactgcgtcctggaccctgacacgggagagtgctggcgggagcccccagcctacacctatcgggactacagcggactcctctacctcaacgatgacttccagggtggggacctgttcttcacggagcccaacgccctcactgtcacggctcgggtgcgtcctcgctgtgggcgccttgtggccttcagctccggtgtcgagaatccccatggggtgtgggccgtgactcggggacggcgctgtgccctggcactgtggcacacgtgggcacctgagcacagggagcaggagtggacagaagccaaagaactgctgcaggagtcacaggaggaggaggaagaggaagaggaagaaatgcccagcaaagacccttccccagagccccctagccgcaggcaccagagggtccaagacaagactggaagggcacctcgggttcgggaggagctgtgagtggctgagccagctccttgaggatgtggccacttgacttgtggaaggccatcttgatgccaggacgcacaggaagcccctgtgtgacatcaggagcagaacagcaagctctctgtccctgcacccccaccatcttggggacctacaagggcctggactcagaggacagtgcacaggctagcctggagctcaccaggcctggggagctgggacggggccccgctgccggacctgcagccctggacagatggggaacactgtgcctccctgaacggaaatggcaggggaggaggctgatgctttaaatgaagaggatggtggggttgggaggtataaccctgctcctctctcccagtctgtgcaataaaggtcgtgaagatctctcaaaaagggg

SEQ ID NO: 420376 - DNA, 1113 bp, Homo sapiens
gccgactactactactactactactactaaattcgcggccggtcgaccacggtgcttaaggctgcgcactggcccgggctgggacagtgggcagtcagggtgctaagctgcttctggaggtgagcgagcgggtgcggaccttgacccaggcctacttctccccggaacggcccctgcatctgtccttcacccacctggtgtgccgcagcgccatagaaggagagcaagagcagcgcatggacctgagtcacccagtgcacgcagacaactgcgtcctggaccctgacacgggagagtgctggcgggagcccccagcctacacctatcgggactacagcggactcctctacctcaacgatgacttccagggtggggacctgttcttcacggagcccaacgccctcactgtcacggctcgggtgcgtcctcgctgtgggcgccttgtggccttcagctccggtgtcgagaatccccatggggtgtgggccgtgactcggggacggcgctgtgccctggcactgtggcacacgtgggcacctgagcacagggagcaggagtggacagaagccaaagaactgctgcaggagtcacaggaggaggaggaagaggaagaggaagaaatgcccagcaaagacccttccccagagccccctagccgcaggcaccagagggtccaagacaagactggaagggcacctcgggttcgggaggagctgtgagtggctgagccagctccttgaggatgtggccacttgacttgtggaaggccatcttgatgccaggacgcacaggaagcccctgtgtgacatcaggagcagaacagcaagctctctgtccctgcacccccaccatcttggggacctacaagggcctggactcagaggacagtgcacaggctagcctggagctcaccaggcctggggagctgggacggggccccgctgccggacctgcagccctggacagatggggaacactgtgcctccctgaacggaaatggcaggggaggaggctgatgctttaaatgaagaggatggtggggttgggaggtataaccctgctcctctctcccagtctgtgcaataaaggtcgtgaagatctctcaaaaagggg

SEQ ID NO: 420377 - DNA, 2130 bp, Homo sapiens
acccagaagcgtgtgtgtggagggaacacagccccagtagttacccccagacctcaggggctgaagtcaccgctggggctgaagtcatccttcatggatgcccaggcctgctccagttcccgccttttgccctcctcctcccagtttctccctcttattccacactagaccagctttgtccactcagcactcttctctctccatctctccttcctccccctccctccccttcccccctttcctctccctccctctcggctcccgcattttcccctcggctgccggcggctccgacatcatgctccggctcctccggccgctgctgctactgctgctgctgcctcccccggggtcccctgagccccccggcctgacccagctgtccccgggggcgcccccgcaggcccccgacttgctctacgctgacgggctgcgcgcctacgcggccggggcttgggcgccggccgtggcgctgctgcgggaggcgctgcggagccaggcggcgctgggccgggtgcggctggattgcggggcgagctgcgcggccgatccgggcgccgcgctccccgccgtgcttctcggggccccggagcccgactccgggccgggacccacgcaggggtcctgggagcgacagcttctccgtgcagcgctccgccgcgcagactgcctgacccagtgcgcagcacggaggctgggccccgggggcgcggcgcggcttcgcgtggggagcgcgctccgggacgccttccgccgtcgggagccctacaactacctgcagagggcctattaccagttgaagaagctggatctggcagctgcggcagcacacaccttctttgtagcaaaccccatgcacctgcagatgcgggaggacatggctaagtacagacgaatgtcgggagttcggccccagagcttccgggacctggagacgcccccacactgggcagcctatgacactggcctggagctactggggcgccaggaggcaggactggcactgcccaggctagaggaggctcttcaggggagcctggcccagatggagagctgccgtgctgactgtgaggggcctgaggagcagcagggggctgaagaagaggaggatggggctgcgagccaggggggcctctatgaggccattgcaggacactggattcaggtcctgcagtgccggcaacgctgtgtgggggaaacagccacacgccctggtcgcagcttccctgtcccagacttccttcccaaccagctgaggcggctacatgaggcccatgctcaggtgggcaatctgtcccaggctatagaaaatgtcctgagtgtcctgctcttctacccggaggatgaggctgccaagagggctctgaaccagtaccaggcccagctgggagagccgagacctggcctcggacccagagaggacatccagcgcttcatcctccgatccctgggggagaagaggcagctctactatgccatggagcacctggggaccagcttcaaggatcctgacccctggacccctgcagctctcatccctgaggcacttagagaaaagctcagagaggatcaagagaagaggccttgggaccatgagcccgtgaagccaaagcccttgacctactggaaggatgtccttctcctggagggtgtgaccttgacccaggattccaggcagctgaatgggtcggagcgggcggtgttggatgggctgctcaccccagccgagtgtggggtgctgctgcagctggctaaggatgcagctggggctggagccaggtctggctatcgtggtcgccgctcccctcacaccccccatgaacgcttcgaggggctcacggtgcttaaggctgcgcaggtgagcacaggaggcacccgggcccgtctgatgcccagacctggaggagaggctgtgcaggaagccgggccccagggcctgggcttttgtgaaggagctttcttgggaccgagactacctgataggacccagcgtggagaaaagggatgttctgagagctggggccggggttgttgtcatggagagagaaggagcagtttgggctgatggacagagctggatgctgacagactccaaacccatgggtggagagcggcagagttgggcagggg

SEQ ID NO: 420378 - DNA, 652 bp, Homo sapiens
gagggtgtgaccttgacccaggattccaggcagctgaatgggtcggagcgggcggtgttggatgggctgctcaccccagccgagtgtggggtgctgctgcagctggctaaggtaggaagacctgcaagctcatcagctcgttcaagactcttggatacaatcacctgttcccttgctcttggcctgcccccttcattctgcctgtcctgattatccaaccgggactgtgcttaccactgcctctcagctgtggataagttccgtctcgtcttaatttagctgacataggtggatgttctttacaaatgaattttgctagaaattgataggaagaacaaaacaaaaaacatgaaggcataaaaatggatgagtgtgcaggtaaggattgcttggttagccaagagtttagttactggcttggctgatggctcagcagacacgcaggcctttctttccctcctagtttaggttgaatgactcatactcaccaggttgaggctaccattttatgaagcttcaacccttatcttaggttagtgctcattcagtaatatactcactgagtagctgctatacactagaaactgctaggttctagggagaggaagatgattatagactctgccctttgggagctcaagtgtagaggtgg

SEQ ID NO: 420379 - DNA, 2004 bp, Homo sapiens
  misc_feature (20)..(20): n is a, c, g, or t
ggacggtcgcgaatgcgtanatggcggcggcggtgccggagcgcgagcagagcggagacccccaggtcctgcgggcgcggaatatcctggaaccttcttttgtttgtcagcagccaaggtgtttccaggaagttcagagagaacagaatttaagaagtgcaacatggccaggggctgcctctgctgcttgaagtacatgatgttcctcttcaatttgatattctggctctgtggctgtgggctgctgggagtgggcatctggctctccgtgtcccaaggcaactttgccaccttctcccccagcttcccttcgttgtctgcagccaacctggtcattgccataggcaccattgtcatggtgacgggcttcctcggctgcctgggggccatcaaggaaaacaagtgcctcctcctcagctttttcatcgtcctgttggtcatcctcctagcagagctgatcttactcatcctcttctttgtctacatggacaaggtgaacgagaacgccaagaaggacctgaaggaaggcctgctgctgtaccacaccgagaacaacgtggggctgaagaacgcctggaacatcatccaggctgagatgcgatgctgtggtgtcactgactacacagactggtacccagtgctgggggagaacacggttcccgaccgctgctgcatggagaactcccagggctgcgggcgcaacgccaccacgcctttgtggagaacgggctgctatgaaaaggtgaagatgtggttcgatgacaataagcacgtgctgggcacggtggggatgtgcatcctcatcatgcagatcctgggcatggccttctccatgaccctcttccagcacatccaccggactggtaagaagtacgacgcatgagcgggctggccgggagtgcccaccccgccctgctgccctgtggagggaagaggattgagctttgtgtcacctgcctgcgctctccagatatgacccctgcacccaccccccacagcctgccctaccccacctaccctgcctcagcctcggacttctcagtgggtggagtgccagggaggaggaggcacacggagacctggggctcggggcccctggattcctgcatctgcatatgcgtatttgccaaagacgacagggtgggctggggtgcgctccggaggaacccccggcactgatgggcttctgcccctgcccttcctcacactgacactttgtccccacatggggtggggagcagagtgcccgccccgtggagataccgccccagcgggggctgcgacatccatggccaccatggggcacctggcggggcgggggtctgccggcctctgggcaaggcccctggagcatctcgcccaggctttttataccttacaatgtaacttttttattttattttactctatgattattcaggaatattatctctcagataagtttagggttagatttctgatttgtaactttttactgtgttgatttctttaatggtttgactttttttccctgagggtgagggatgggtgggaagagaggacatctgtcccctcctctccagcccctgcccacccactggtggaggtgctaactagcagggacgtggcataggatgggagctgggcgtgaggtgcttggggtccattctttgtccctcagcttctcagagtccggccagcccttgtgttcccgtgccccacactttcctcctccccactgcagtgagtcaatagtccagggtggggcctggcctccctgccctgattggggactcaggaggtgaggcctggggggcttcctgccccctccttgcccacctgcctgcccccgggcagcacgggagggagagcagggtgagcacgcttgttggtttcagatgcactttctgcttgcattgccgtatctgtgcgttccttcatcctggtcctggctttatggaacaccatgtttttagcatgtttttaaataaaaacggataaagtgtcaaaagccaaaaaaaaaag

SEQ ID NO: 420380 - DNA, 2930 bp, Homo sapiens
  misc_feature (20)..(20): n is a, c, g, or t
ggacggtcgcgaatgcgtanatggcggcggcggtgccggagcgcgagcagagcggagacccccaggtcctgcgggcgcggaatatcctggaaccttcttttgtttgtcagcagccaaggtgtttccaggaagttcagagagaacagaatttaagaagtgcaacatggccaggggctgcctctgctgcttgaagtacatgatgttcctcttcaatttgatattctggctctgtggctgtgggctgctgggagtgggcatctggctctccgtgtcccaaggcaactttgccaccttctcccccagcttcccttcgttgtctgcagccaacctggtcattgccataggcaccattgtcatggtgacgggcttcctcggctgcctgggggccatcaaggaaaacaagtgcctcctcctcagctttttcatcgtcctgttggtcatcctcctagcagagctgatcttactcatcctcttctttgtctacatggacaaggtgaacgagaacgccaagaaggacctgaaggaaggcctgctgctgtaccacaccgagaacaacgtggggctgaagaacgcctggaacatcatccaggctgagatgcgatgctgtggtgtcactgactacacagactggtacccagtgctgggggagaacacggttcccgaccgctgctgcatggagaactcccagggctgcgggcgcaacgccaccacgcctttgtggagaacgggctgctatgaaaaggtgaagatgtggttcgatgacaataagcacgtgctgggcacggtggggatgtgcatcctcatcatgcagatcctgggcatggccttctccatgaccctcttccagcacatccaccggactggtaagaagtacgacgcatgagcgggctggccgggagtgcccaccccgccctgctgccctgtggagggaagaggattgagctttgtgtcacctgcctgcgctctccagatatgacccctgcacccaccccccacagcctgccctaccccacctaccctgcctcagcctcggacttctcagtgggtggagtgccagggaggaggaggcacacggagacctggggctcggggcccctggattcctgcatctgcatatgcgtatttgccaaagacgacagggtgggctggggtgcgctccggaggaacccccggcactgatgggcttctgcccctgcccttcctcacactgacactttgtccccacatggggtggggagcagagtgcccgccccgtggagataccgccccagcgggggctgcgacatccatggccaccatggggcacctggcggggcgggggtctgccggcctctgggcaaggcccctggagcatctcgcccaggctttttataccttacaatgtaacttttttattttattttactctatgattattcaggaatattatctctcagataagtttagggttagatttctgatttgtaactttttactgtgttgatttctttaatggtttgactttttttccctgagggtgagggatgggtgggaagagaggacatctgtccagtctcaatcaggacagaccaccgtgcgacacccaggaggctctcggatggggcgcgcctgcgccctcagaacgtgtgggtggggtgggtgggttggtttatgcctatcaatgcaatttttaatttttgttaatatcaacagcaaaagcctagtgcattgggagatgtgcaacctccctgaaaatcttttctgtttctggagtacttcaggggtggcctctggccccagagcctttgccacagtgctcccaccagcccccacctcatccgtctgtttgcagagcctcatctacaggtccccacgctgccttctttactcactctgcgcttggccgttttgttatttggcttagtctacattgggcggaagtctgtgtgcacagagtgggtgttccttcgagccccttccactcagagggccacacccagcgatgccagtgaaggtggcacagcctctcttcagtttctcctgactgtgatctcactggggtagaattcccctgagagaattccctcactcacggctccctttgccagagtcagttcaatcaggtctgatgtgagcaatttacacacttgtctcagaaagtccctcagggtttgtagaggactgcaggggggcatccgctgcagactcagcctttctctgcagccatcctgcagtgggggtgagcgggcacaggctgagaactgctcttgggtggtggaagcaggtgtcacggtgcaagtctccccctgcacccctcccccagcttgagccgtgtcacccccctctccctccagcatgggcctgtgtctcaggctctctggaaggtggccctgcccggaccctcttgcaggtgtcctggtttgacttggaactagatggccatcttttcaggctttggtggcccaagagcagtctgggtggatggaagtggctgtcccctcctctccagcccctgcccacccactggtggaggtgctaactagcagggacgtggcataggatgggagctgggcgtgaggtgcttggggtccattctttgtccctcagcttctcagagtccggccagcccttgtgttcccgtgccccacactttcctcctccccactgcagtgagtcaatagtccagggtggggcctggcctccctgccctgattggggactcaggaggtgaggcctggggggcttcctgccccctccttgcccacctgcctgcccccgggcagcacgggagggagagcagggtgagcacgcttgttggtttcagatgcactttctgcttgcattgccgtatctgtgcgttccttcatcctggtcctggctttatggaacaccatgtttttagcatgtttttaaataaaaacggataaagtgtcaaaagccaaaaaaaaaag

SEQ ID NO: 420381 - DNA, 2534 bp, Homo sapiens
ggggatattagctaactacaagacttaacaaatgaggtgaggctggagtgtgggctcactgtatggccatagcctgactgggcctcagtttacctgctgcgcgtattgtggatgggcccctggtgacaaagaagatcctgatacagcctgatgacttgaggcttttctctgtgctgggggcctgcaccctttccctcctccggagtcagggcacggcccagaccagatcgccctgtgggatttgaaggcgttgccagccctgctctaggctctgcggatttaaccacaaaaacaacagacccaaatcctggccctcaaggaggccattggcaaatctctgtggctgtgggctgctgggagtgggcatctggctctccgtgtcccaaggcaactttgccaccttctcccccagcttcccttcgttgtctgcagccaacctggtcattgccataggcaccattgtcatggtgacgggcttcctcggctgcctgggggccatcaaggaaaacaagtgcctcctcctcagctttttcatcgtcctgttggtcatcctcctagcagagctgatcttactcatcctcttctttgtctacatggacaaggtgaacgagaacgccaagaaggacctgaaggaaggcctgctgctgtaccacaccgagaacaacgtggggctgaagaacgcctggaacatcatccaggctgagatgcgatgctgtggtgtcactgactacacagactggtacccagggctggggtgcgctccggaggaacccccggcactgatgggcttctgcccctgcccttcctcacactgacactttgtccccacatggggtggggagcagagtgcccgccccgtggagataccgccccagcgggggctgcgacatccatggccaccatggggcacctggcggggcgggggtctgccggcctctgggcaaggcccctggagcatctcgcccaggctttttataccttacaatgtaacttttttattttattttactctatgattattcaggaatattatctctcagataagtttagggttagatttctgatttgtaactttttactgtgttgatttctttaatggtttgactttttttccctgagggtgagggatgggtgggaagagaggacatctgtccagtctcaatcaggacagaccaccgtgcgacacccaggaggctctcggatggggcgcgcctgcgccctcagaacgtgtgggtggggtgggtgggttggtttatgcctatcaatgcaatttttaatttttgttaatatcaacagcaaaagcctagtgcattgggagatgtgcaacctccctgaaaatcttttctgtttctggagtacttcaggggtggcctctggccccagagcctttgccacagtgctcccaccagcccccacctcatccgtctgtttgcagagcctcatctacaggtccccacgctgccttctttactcactctgcgcttggccgttttgttatttggcttagtctacattgggcggaagtctgtgtgcacagagtgggtgttccttcgagccccttccactcagagggccacacccagcgatgccagtgaaggtggcacagcctctcttcagtttctcctgactgtgatctcactggggtagaattcccctgagagaattccctcactcacggctccctttgccagagtcagttcaatcaggtctgatgtgagcaatttacacacttgtctcagaaagtccctcagggtttgtagaggactgcaggggggcatccgctgcagactcagcctttctctgcagccatcctgcagtgggggtgagcgggcacaggctgagaactgctcttgggtggtggaagcaggtgtcacggtgcaagtctccccctgcacccctcccccagcttgagccgtgtcacccccctctccctccagcatgggcctgtgtctcaggctctctggaaggtggccctgcccggaccctcttgcaggtgtcctggtttgacttggaactagatggccatcttttcaggctttggtggcccaagagcagtctgggtggatggaagtggctgtcccctcctctccagcccctgcccacccactggtggaggtgctaactagcagggacgtggcataggatgggagctgggcgtgaggtgcttggggtccattctttgtccctcagcttctcagagtccggccagcccttgtgttcccgtgccccacactttcctcctccccactgcagtgagtcaatagtccagggtggggcctggcctccctgccctgattggggactcaggaggtgaggcctggggggcttcctgccccctccttgcccacctgcctgcccccgggcagcacgggagggagagcagggtgagcacgcttgttggtttcagatgcactttctgcttgcattgccgtatctgtgcgttccttcatcctggtcctggctttatggaacaccatgtttttagcatgtttttaaataaaaacggataaagtgtcaaaagccaaaaaaaaaag

SEQ ID NO: 420382 - DNA, 2214 bp, Homo sapiens
  misc_feature (20)..(20): n is a, c, g, or t
  misc_feature (2187)..(2187): n is a, c, g, or t
  misc_feature (2192)..(2192): n is a, c, g, or t
ggacggtcgcgaatgcgtanatggcggcggcggtgccggagcgcgagcagagcggagacccccaggtcctgcgggcgcggaatatcctggaaccttcttttgtttgtcagcagccaaggtgtttccaggaagttcagagagaacagaatttaagaagtgcaacatggccaggggctgcctctgctgcttgaagtacatgatgttcctcttcaatttgatattctggctctgtggctgtgggctgctgggagtgggcatctggctctccgtgtcccaaggcaactttgccaccttctcccccagcttcccttcgttgtctgcagccaacctggtcattgccataggcaccattgtcatggtgacgggcttcctcggctgcctgggggccatcaaggaaaacaagtgcctcctcctcagctttttcatcgtcctgttggtcatcctcctagcagagctgatcttactcatcctcttctttgtctacatggacaaggtgaacgagaacgccaagaaggacctgaaggaaggcctgctgctgtaccacaccgagaacaacgtggggctgaagaacgcctggaacatcatccaggctgagatgcgatgctgtggtgtcactgactacacagactggtacccagtgctgggggagaacacggttcccgaccgctgctgcatggagaactcccagggctgcgggcgcaacgccaccacgcctttgtggagaacgggctgctatgaaaaggtgaagatgtggttcgatgacaataagcacgtgctgggcacggtggggatgtgcatcctcatcatgcagatcctgggcatggccttctccatgaccctcttccagcacatccaccggactggtaagaagtacgacgcatgagcgggctggccgggagtgcccaccccgccctgctgccctgtggagggaagaggattgagctttgtgtcacctgcctgcgctctccagatatgacccctgcacccaccccccacagcctgccctaccccacctaccctgcctcagcctcggacttctcagtgggtggagtgccagggaggaggaggcacacggagacctggggctcggggcccctggattcctgcatctgcatatgcgtatttgccaaagacgacagggtgggctggggtgcgctccggaggaacccccggcactgatgggcttctgcccctgcccttcctcacactgacactttgtccccacatggggtggggagcagagtgcccgccccgtggagataccgccccagcgggggctgcgacatccatggccaccatggggcacctggcggggcgggggtctgccggcctctgggcaaggcccctggagcatctcgcccaggctttttataccttacaatgtaacttttttattttattttactctatgattattcaggaatattatctctcagataagtttagggttagatttctgatttgtaactttttactgtgttgatttctttaatggtttgactttttttccctgagggtgagggatgggtgggaagagaggacatctgtccagtctcaatcaggacagaccaccgtgcgacacccaggaggctctcggatggggcgcgcctgcgccctcagaacgtgtgggtggggtgggtgggttggtttatgcctatcaatgcaatttttaatttttgttaatatcaacagcaaaagcctagtgcattgggagatgtgcaacctccctgaaaatcttttctgtttctggagtacttcaggggtggcctctggccccagagcctttgccacagtgctcccaccagcccccacctcatccgtctgtttgcagagcctcatctacaggtccccacgctgccttctttactcactctgcgcttggccgttttgttatttggcttagtctacattgggcggaagtctgtgtgcacagagtgggtgttccttcgagccccttccactcagagggccacacccagcgatgccagtgaaggtggcacagcctctcttcagtttctcctgactgtgatctcactggggtagaattcccctgagagaattccctcactcacggctccctttgccagagtcagttcaatcaggtctgatgtgagcaatttacacacttgtctcagaaagtcctaggtttgagagatgaggggcatcgtgcaactagctcttgagcanctgangggtgacgccagctgactgttt

SEQ ID NO: 420383 - DNA, 1152 bp, Homo sapiens
  misc_feature (20)..(20): n is a, c, g, or t
ggacggtcgcgaatgcgtanatggcggcggcggtgccggagcgcgagcagagcggagacccccaggtcctgcgggcgcggaatatcctggaaccttcttttgtttgtcagcagccaaggtgtttccaggaagttcagagagaacagaatttaagaagtgcaacatggccaggggctgcctctgctgcttgaagtacatgatgttcctcttcaatttgatattctggctctgtggctgtgggctgctgggagtgggcatctggctctccgtgtcccaaggcaactttgccaccttctcccccagcttcccttcgttgtctgcagccaacctggtcattgccataggcaccattgtcatggtgacgggcttcctcggctgcctgggggccatcaaggaaaacaagtgcctcctcctcagctttttcatcgtcctgttggtcatcctcctagcagagctgatcttactcatcctcttctttgtctacatggacaaggtgaacgagaacgccaagaaggacctgaaggaaggcctgctgctgtaccacaccgagaacaacgtggggctgaagaacgcctggaacatcatccaggctgagatgcgatgctgtggtgtcactgactacacagactggtacccagtgctgggggagaacacggttcccgaccgctgctgcatggagaactcccagggctgcgggcgcaacgccaccacgcctttgtggagaacgggctgctatgaaaaggtgaagatgtggttcgatgacaataagcacgtgctgggcacggtggggatgtgcatcctcatcatgcagatcctgggcatggccttctccatgaccctcttccagcacatccaccggactggtaagaagtacgacgcatgagcggggtggggcctggcctccctgccctgattggggactcaggaggtgaggcctggggggcttcctgccccctccttgcccacctgcctgcccccgggcagcacgggagggagagcagggtgagcacgcttgttggtttcagatgcactttctgcttgcattgccgtatctgtgcgttccttcatcctggtcctggctttatggaacaccatgtttttagcatgtttttaaataaaaacggataaagtgtcaaaagccaaaaaaaaaag

SEQ ID NO: 420384 - DNA, 870 bp, Homo sapiens
ggggatattagctaactacaagacttaacaaatgaggtgaggctggagtgtgggctcactgtatggccatagcctgactgggcctcagtttacctgctgcgcgtattgtggatgggcccctggtgacaaagaagatcctgatacagcctgatgacttgaggcttttctctgtgctgggggcctgcaccctttccctcctccggagtcagggcacggcccagaccagatcgccctgtgggatttgaaggcgttgccagccctgctctaggctctgcggatttaaccacaaaaacaacagacccaaatcctggccctcaaggaggccattggcaaatctctgtggctgtgggctgctgggagtgggcatctggctctccgtgtcccaaggcaactttgccaccttctcccccagcttcccttcgttgtctgcagccaacctggtcattgccataggcaccattgtcatggtgacgggcttcctcggctgcctgggggccatcaaggaaaacaagtgcctcctcctcagctttttcatcgtcctgttggtcatcctcctagcagagctgatcttactcatcctcttctttgtctacatggacaaggtgaacgagaacgccaagaaggacctgaaggaaggcctgctgctgtaccacaccgagaacaacgtggggctgaagaacgcctggaacatcatccaggctgagatgcgatgctgtggtgtcactgactacacagactggtacccagtgctgggggagaacacggttcccgaccgctgctgcatggagaactcccagggctgcgggcgcaacgccaccacgcctttgtggagaacggtgaggctggggatggaccgcttgggtccaagag

SEQ ID NO: 420385 - DNA, 2492 bp, Homo sapiens
gttgttggttttttctttctcccttcctcccgctctctgctggcacgcgaggcttccccttccaccccatgtgggtattcccacaacaggttctgcacaccccagttatttcacagacattcctgctagaaactgtcagacaaatacctctctagttcggatgctgctcactttcccccttgcttctggaaggggaagcagtccttaggttttgctgtgctgggacagtggcaggggacccacaggggtgaggacccacggtcctccccgccagccttgctcagctgtgggttgccctgctgggaaggagggaatcacgtccacctgggtcccaagatcttcgcctccttccctggggccacggacatcagcagtgggttgggtggcgattatatcatctgtgatcccaaggagaagaaatacagaaaacccaagagaggtcagactggctcttgttaccggagccacgggaagaaagcagccggagtcacgcacgtgcagagctgggcatgggagagaaacgggctggggagtgaggccaggagtgggattcagctgcagcagggcgccccctccaaactgcagctggtctggcttactgttttgccgttcaaaaaggtcgcgaatccgtgggactgagcacggggacctcacccgctagccagcgtctgctgcacttgatcaggtggggccttggtgggcggctgcctttcctatacagtttgtcttgtcaccctggtttcccactggggccaggtctcttctccagcctccacctgcctgtctgatccaagagctgagacacggccacccagcaccagtcactcctctgttcaccttaagtaacacacaaatcgggaacaggaggacagaaccgttggcattatcaggattcgtgttttgtgggggtgggagtggagagtagggtggtcttgtgagttgtgcagggtgaagaccgcttccctgagacaggggcagtggtgctgatggaatgtgggggaggcccacatttgagcaaagctgccctgcccttgtcccctggcctggcttcctggtaaggagtttcagccgcctccgcaggaacccccaaagtgcagattccggagcagacacatccgggcggagagactcagcagacaagtgctgcagttgcacggtgggacccggggcctcgtgcgttttttgctgtgggtggggtgggtgggttggtttatgcctatcaatgcaatttttaatttttgttaatatcaacagcaaaagcctagtgcattgggagatgtgcaacctccctgaaaatcttttctgtttctggagtacttcaggggtggcctctggccccagagcctttgccacagtgctcccaccagcccccacctcatccgtctgtttgcagagcctcatctacaggtccccacgctgccttctttactcactctgcgcttggccgttttgttatttggcttagtctacattgggcggaagtctgtgtgcacagagtgggtgttccttcgagccccttccactcagagggccacacccagcgatgccagtgaaggtggcacagcctctcttcagtttctcctgactgtgatctcactggggtagaattcccctgagagaattccctcactcacggctccctttgccagagtcagttcaatcaggtctgatgtgagcaatttacacacttgtctcagaaagtccctcagggtttgtagaggactgcaggggggcatccgctgcagactcagcctttctctgcagccatcctgcagtgggggtgagcgggcacaggctgagaactgctcttgggtggtggaagcaggtgtcacggtgcaagtctccccctgcacccctcccccagcttgagccgtgtcacccccctctccctccagcatgggcctgtgtctcaggctctctggaaggtggccctgcccggaccctcttgcaggtgtcctggtttgacttggaactagatggccatcttttcaggctttggtggcccaagagcagtctgggtggatggaagtggctgtcccctcctctccagcccctgcccacccactggtggaggtgctaactagcagggacgtggcataggatgggagctgggcgtgaggtgcttggggtccattctttgtccctcagcttctcagagtccggccagcccttgtgttcccgtgccccacactttcctcctccccactgcagtgagtcaatagtccagggtggggcctggcctccctgccctgattggggactcaggaggtgaggcctggggggcttcctgccccctccttgcccacctgcctgcccccgggcagcacgggagggagagcagggtgagcacgcttgttggtttcagatgcactttctgcttgcattgccgtatctgtgcgttccttcatcctggtcctggctttatggaacaccatgtttttagcatgtttttaaataaaaacggataaagtgtcaaaagccaaaaaaaaaag

SEQ ID NO: 420386 - DNA, 3039 bp, Homo sapiens
ggggatattagctaactacaagacttaacaaatgaggtgaggctggagtgtgggctcactgtatggccatagcctgactgggcctcagtttacctgctgcgcgtattgtggatgggcccctggtgacaaagaagatcctgatacagcctgatgacttgaggcttttctctgtgctgggggcctgcaccctttccctcctccggagtcagggcacggcccagaccagatcgccctgtgggatttgaaggcgttgccagccctgctctaggctctgcggatttaaccacaaaaacaacagacccaaatcctggccctcaaggaggccattggcaaatctctgtggctgtgggctgctgggagtgggcatctggctctccgtgtcccaaggcaactttgccaccttctcccccagcttcccttcgttgtctgcagccaacctggtcattgccataggcaccattgtcatggtgacgggcttcctcggctgcctgggggccatcaaggaaaacaagtgcctcctcctcagctttttcatcgtcctgttggtcatcctcctagcagagctgatcttactcatcctcttctttgtctacatggacaaggtgaacgagaacgccaagaaggacctgaaggaaggcctgctgctgtaccacaccgagaacaacgtggggctgaagaacgcctggaacatcatccaggctgagatgcgatgctgtggtgtcactgactacacagactggtacccagtgctgggggagaacacggttcccgaccgctgctgcatggagaactcccagggctgcgggcgcaacgccaccacgcctttgtggagaacgggctgctatgaaaaggtgaagatgtggttcgatgacaataagcacgtgctgggcacggtggggatgtgcatcctcatcatgcagatcctgggcatggccttctccatgaccctcttccagcacatccaccggactggtaagaagtacgacgcatgagcgggctggccgggagtgcccaccccgccctgctgccctgtggagggaagaggattgagctttgtgtcacctgcctgcgctctccagatatgacccctgcacccaccccccacagcctgccctaccccacctaccctgcctcagcctcggacttctcagtgggtggagtgccagggaggaggaggcacacggagacctggggctcggggcccctggattcctgcatctgcatatgcgtatttgccaaagacgacagggtgggctggggtgcgctccggaggaacccccggcactgatgggcttctgcccctgcccttcctcacactgacactttgtccccacatggggtggggagcagagtgcccgccccgtggagataccgccccagcgggggctgcgacatccatggccaccatggggcacctggcggggcgggggtctgccggcctctgggcaaggcccctggagcatctcgcccaggctttttataccttacaatgtaacttttttattttattttactctatgattattcaggaatattatctctcagataagtttagggttagatttctgatttgtaactttttactgtgttgatttctttaatggtttgactttttttccctgagggtgagggatgggtgggaagagaggacatctgtccagtctcaatcaggacagaccaccgtgcgacacccaggaggctctcggatggggcgcgcctgcgccctcagaacgtgtgggtggggtgggtgggttggtttatgcctatcaatgcaatttttaatttttgttaatatcaacagcaaaagcctagtgcattgggagatgtgcaacctccctgaaaatcttttctgtttctggagtacttcaggggtggcctctggccccagagcctttgccacagtgctcccaccagcccccacctcatccgtctgtttgcagagcctcatctacaggtccccacgctgccttctttactcactctgcgcttggccgttttgttatttggcttagtctacattgggcggaagtctgtgtgcacagagtgggtgttccttcgagccccttccactcagagggccacacccagcgatgccagtgaaggtggcacagcctctcttcagtttctcctgactgtgatctcactggggtagaattcccctgagagaattccctcactcacggctccctttgccagagtcagttcaatcaggtctgatgtgagcaatttacacacttgtctcagaaagtccctcagggtttgtagaggactgcaggggggcatccgctgcagactcagcctttctctgcagccatcctgcagtgggggtgagcgggcacaggctgagaactgctcttgggtggtggaagcaggtgtcacggtgcaagtctccccctgcacccctcccccagcttgagccgtgtcacccccctctccctccagcatgggcctgtgtctcaggctctctggaaggtggccctgcccggaccctcttgcaggtgtcctggtttgacttggaactagatggccatcttttcaggctttggtggcccaagagcagtctgggtggatggaagtggctgtcccctcctctccagcccctgcccacccactggtggaggtgctaactagcagggacgtggcataggatgggagctgggcgtgaggtgcttggggtccattctttgtccctcagcttctcagagtccggccagcccttgtgttcccgtgccccacactttcctcctccccactgcagtgagtcaatagtccagggtggggcctggcctccctgccctgattggggactcaggaggtgaggcctggggggcttcctgccccctccttgcccacctgcctgcccccgggcagcacgggagggagagcagggtgagcacgcttgttggtttcagatgcactttctgcttgcattgccgtatctgtgcgttccttcatcctggtcctggctttatggaacaccatgtttttagcatgtttttaaataaaaacggataaagtgtcaaaagccaaaaaaaaaag

SEQ ID NO: 420387 - DNA, 2481 bp, Homo sapiens
  misc_feature (20)..(20): n is a, c, g, or t
ggacggtcgcgaatgcgtanatggcggcggcggtgccggagcgcgagcagagcggagacccccaggtcctgcgggcgcggaatatcctggaaccttcttttgtttgtcagcagccaaggtgtttccaggaagttcagagagaacagaatttaagaagtgcaacatggccaggggctgcctctgctgcttgaagtacatgatgttcctcttcaatttgatattctggctctgtggctgtgggctgctgggagtgggcatctggctctccgtgtcccaaggcaactttgccaccttctcccccagcttcccttcgttgtctgcagccaacctggtcattgccataggcaccattgtcatggtgacgggcttcctcggctgcctgggggccatcaaggaaaacaagtgcctcctcctcagctttttcatcgtcctgttggtcatcctcctagcagagctgatcttactcatcctcttctttgtctacatggacaaggtgaacgagaacgccaagaaggacctgaaggaaggcctgctgctgtaccacaccgagaacaacgtggggctgaagaacgcctggaacatcatccaggctgagatgcgatgctgtggtgtcactgactacacagactggtacccagtgctgggggagaacacggttcccgaccgctgctgcatggagaactcccagggctgcgggcgcaacgccaccacgcctttgtggagaacgggctgctatgaaaaggtgaagatgtggttcgatgacaataagcacgtgctgggcacggtggggatgtgcatcctcatcatgcagatcctgggcatggccttctccatgaccctcttccagcacatccaccggactggtaagaagtacgacgcatgagcgggctggccgggagtgcccaccccgccctgctgccctgtggagggaagaggattgagctttgtgtcacctgcctgcgctctccagatatgacccctgcacccaccccccacagcctgccctaccccacctaccctgcctcagcctcggacttctcagtgggtggagtgccagggaggaggaggcacacggagacctggggctcggggcccctggattcctgcatctgcatatgcgtatttgccaaagacgacagggtgggctggggtgcgctccggaggaacccccggcactgatgggcttctgcccctgcccttcctcacactgacactttgtccccacatggggtggggagcagagtgcccgccccgtggagataccgccccagcgggggctgcgacatccatggccaccatggggcacctggcggggcgggggtctgccggcctctgggcaaggcccctggagcatctcgcccaggctttttataccttacaatgtaacttttttattttattttactctatgattattcaggaatattatctctcagataagtttagggttagatttctgatttgtaactttttactgtgttgatttctttaatggtttgactttttttccctgagggtgagggatgggtgggaagagaggacatctgtccagtctcaatcaggacagaccaccgtgcgacacccaggaggctctcggatggggcgcgcctgcgccctcagaacgtgtgggtggggtgggtgggttggtttatgcctatcaatgcaatttttaatttttgttaatatcaacagcaaaagcctagtgcattgggagatgtgcaacctccctgaaaatcttttctgtttctggagtacttcaggggtggcctctggccccagagcctttgccacagtgctcccaccagcccccacctcatccgtctgtttgcagagcctcatctacaggtccccacgctgccttctttactcactctgcgcttggccgttttgttatttggcttagtctacattgggcggaagtctgtgtgcacagagtgggtgttccttcgagccccttccactcagagggccacacccagcgatgccagtgaaggtggcacagcctctcttcagtttctcctgactgtgatctcactggggtagaattcccctgagagaattccctcactcacggctccctttgccagagtcagttcaatcaggtctgatgtgacgggcacaggctgagaactgctcttgggtggtggaagcaggtgtcacggtgcaagtctccccctgcacccctcccccagcttgagccgtgtcacccccctctccgtggggcctggcctccctgccctgattggggactcaggaggtgaggcctggggggcttcctgccccctccttgcccacctgcctgcccccgggcagcacgggagggagagcagggtgagcacgcttgttggtttcagatgcactttctgcttgcattgccgtatctgtgcgttccttcatcctggtcctggctttatggaacaccatgtttttagcatgtttttaaataaaaacggataaagtgtcaaaagccaaaaaaaaaag

SEQ ID NO: 420388 - DNA, 2208 bp, Homo sapiens
  misc_feature (20)..(20): n is a, c, g, or t
ggacggtcgcgaatgcgtanatggcggcggcggtgccggagcgcgagcagagcggagacccccaggtcctgcgggcgcggaatatcctggaaccttcttttgtttgtcagcagccaaggtgtttccaggaagttcagagagaacagaatttaagaagtgcaacatggccaggggctgcctctgctgcttgaagtacatgatgttcctcttcaatttgatattctggctctgtggctgtgggctgctgggagtgggcatctggctctccgtgtcccaaggcaactttgccaccttctcccccagcttcccttcgttgtctgcagccaacctggtcattgccataggcaccattgtcatggtgacgggcttcctcggctgcctgggggccatcaaggaaaacaagtgcctcctcctcagctttttcatcgtcctgttggtcatcctcctagcagagctgatcttactcatcctcttctttgtctacatggacaaggtgaacgagaacgccaagaaggacctgaaggaaggcctgctgctgtaccacaccgagaacaacgtggggctgaagaacgcctggaacatcatccaggctgagatgcgatgctgtggtgtcactgactacacagactggtacccagtgctgggggagaacacggttcccgaccgctgctgcatggagaactcccagggctgcgggcgcaacgccaccacgcctttgtggagaacgggctgctatgaaaaggtgaagatgtggttcgatgacaataagcacgtgctgggcacggtggggatgtgcatcctcatcatgcagatcctgggcatggccttctccatgaccctcttccagcacatccaccggactggtaagaagtacgacgcatgagcgggctggccgggagtgcccaccccgccctgctgccctgtggagggaagaggattgagctttgtgtcacctgcctgcgctctccagatatgacccctgcacccaccccccacagcctgccctaccccacctaccctgcctcagcctcggacttctcagtgggtggagtgccagggaggaggaggcacacggagacctggggctcggggcccctggattcctgcatctgcatatgcgtatttgccaaagacgacagggtgggctggggtgcgctccggaggaacccccggcactgatgggcttctgcccctgcccttcctcacactgacactttgtccccacatggggtggggagcagagtgcccgccccgtggagataccgccccagcgggggctgcgacatccatggccaccatggggcacctggcggggcgggggtctgccggcctctgggcaaggcccctggagcatctcgcccaggctttttataccttacaatgtaacttttttattttattttactctatgattattcaggaatattatctctcagataagtttagggttagatttctgatttgtaactttttactgtgttgatttctttaatggtttgactttttttccctgagggtgagggatgggtgggaagagaggacatctgtccagtctcaatcaggacagaccaccgtgcgacacccaggaggctctcggatggggcgcgcctgcgccctcagaacgtgtgggtggggtgggtgggttggtttatgcctatcaatgcaatttttaatttttgttaatatcaacagcaaaagcctagtgcattgggagatgtgcaacctccctgaaaatcttttctgtttctggagtacttcaggggtggcctctggccccagagcctttgccacagtgctcccaccagcccccacctcatccgtctgtttgcagagcctcatctacaggtccccacgctgccttctttactcactctgcgcttggccgttttgttatttggcttagtctacattgggcggaagtctgtgtgcacagagtgggtgttccttcgagccccttccactcagagggccacacccagcgatgccagtgaaggtggcacagcctctcttcagtttgcccacctgcctgcccccgggcagcacgggagggagagcagggtgagcacgcttgttggtttcagatgcactttctgcttgcattgccgtatctgtgcgttccttcatcctggtcctggctttatggaacaccatgtttttagcatgtttttaaataaaaacggataaagtgtcaaaagccaaaaaaaaaag

SEQ ID NO: 420389 - DNA, 738 bp, Homo sapiens
  misc_feature (20)..(20): n is a, c, g, or t
ggacggtcgcgaatgcgtanatggcggcggcggtgccggagcgcgagcagagcggagacccccaggtcctgcgggcgcggaatatcctggaaccttcttttgtttgtcagcagccaaggtgtttccaggaagttcagagagaacagaatttaagaagtgcaacatggccaggggctgcctctgctgcttgaagtacatgatgttcctcttcaatttgatattctggctctgtggctgtgggctgctgggagtgggcatctggctctccgtgtcccaaggcaactttgccaccttctcccccagcttcccttcgttgtctgcagccaacctggtcattgccataggcaccattgtcatggtgacgggcttcctcggctgcctgggggccatcaaggaaaacaagtgcctcctcctcagctttttcatcgtcctgttggtcatcctcctagcagagctgatcttactcatcctcttctttgtctacatggacaaggtgaacgagaacgccaagaaggacctgaaggaaggcctgctgctgtaccacacgcccacctgcctgcccccgggcagcacgggagggagagcagggtgagcacgcttgttggtttcagatgcactttctgcttgcattgccgtatctgtgcgttccttcatcctggtcctggctttatggaacaccatgtttttagcatgtttttaaataaaaacggataaagtgtcaaaagccaaaaaaaaaag

SEQ ID NO: 420390 - DNA, 887 bp, Homo sapiens
accatgttgtccaggctggtctcgaactcctgagctcaagcatctgtccgactcagcctaccacagtgttgggattacaggcgtgagccaccgcacccagcccctacttgaatttttatgtcattattgactcttcaccactctctccttgagactcacttatccctttgctctctatttttcctgcttttgttattcttcatttttcttctcttgctctgaatcccttaaatgctgaggctgctcaagtttcatccctagtcctattttctcattctatatgcacactcatttttcatttaacagacttcactggcttcaggcaccatttgttttattattcatattttcaacccccatatctctctagtgctgtagacctttatttctacttactagttatattcacctaacatcccatagatatgccaatgtcaatgtgcctaaaacaaaattgtctctacctcccgctccttcaaatctattctgtcttctctaatcctataattactctccctcaagtcatcatcatcacttttctgggttactgtaatagccttcaggctaatttgctcactgtcaatcttgctgtctctcatttcagaatatgttctgcttgcaggtgacagtaaactagttaaacaaatatttaatattagcttaagcaaaaaaaaaaaaaaaagggggggccgcccttttttgtaattttgttttaatgttatttgtggttgattagtttattattgttagtactttcaatatataagagggggggggggcgggatgagagatggggaagattaactgtgttgtattccgcgaaactgtgggtgggggaaaatggaaaacgccccgttttattttgatttttttttccaccccatttg

SEQ ID NO: 420391 - DNA, 4016 bp, Homo sapiens
accatgttgtccaggctggtctcgaactcctgagctcaagcatctgtccgactcagcctaccacagtgttgggattacaggcgtgagccaccgcacccagcccctacttgaatttttatgtcattattgactcttcaccactctctccttgagactcacttatccctttgctctctatttttcctgcttttgttattcttcatttttcttctcttgctctgaatcccttaaatgctgaggctgctcaagtttcatccctagtcctattttctcattctatatgcacactcatttttcatttaacagacttcactggcttcaggcaccatttgttttattattcatattttcaacccccatatctctctagtgctgtagacctttatttctacttactagttatattcacctaacatcccatagatatgccaatgtcaatgtgcctaaaacaaaattgtctctacctcccgctccttcaaatctattctgtcttctctaatcctataattactctccctcaagtcatcatcatcacttttctgggttactgtaatagccttcaggctaatttgctcactgtcaatcttgctgtctctcatttcagaatatgttctgcttgcaggtgacagtaaactagttaaacaaatatttaatattagcttaagcaaaaaaaaaaaaaaaggcctatcctatttatagcctagaattaggcagtatagggttgggacagtggctcattggtgctatcaaggacgtagactttttctctttccactctgtcctctacagcatgctggtttgtcacctcatggtcacaagatgtctgctgtacctccagggagcagatacacattcaaagtaggaaatagcagataaaaatgtacacaagatgcgtctgactcccttttaccagaaaagtaaatgctttcttagaatctcctcagaagacctctgtgtatatctcaaccagtacttgtcatatagccacacacttagctcaaggaagatagggaatagggaaatcatgtttcttttcccctgtggtgaggaaggcaaggggtaaggggttgggaacaggtgctgaattaaagctaacatacagtatctactaccctattcttctaacccatttgtctattatgatatagttgtcttgacaactataatgaatagctgtctttctgaaatctttagtggctcatcattgcctgcagaatcaaaactccttagtctgatatacaaggcccttcatatctgattccagcttaccttctaatcctatcttccctctccttacccaccctactgctaatgtgtattatattgtctttatgacataccatttgtttcttgaacatgctttgctcattattgcctctttctctgcctgtgctagtgtgtcctcttagaatgttcttccatcttatcctgctctacattctaacttctacccatcctacaagtccaattccagtgtcatgttccctttctcaatcctccagggtagaatttagatgttctgtcttttagagataggtattgctatgttgcccaggctggtctcaaactcatggcctcaagcgatcctcccacctcagccaaccagacatgagtgactgtgctcagccttttttaaaaaaatgaaggtatttggtatggccgggtatggtggctcacacctataatcccagcactttgggaggccaaggtgggtgaatcgcctgaggtcaggagtttgagaccagcctgaccaacatagtgaaaccctgtctctactaaaaacacgcaaaaagtgcaaaattagctaggcgtggtggctcatgcctgtaattccagctacttgggaggctgaggcaggagaatcacttgaatccgggaggtggaggctgcagtgagccgagatcgtgccattgcacttcagcctgggcacaggaacaaaactcagtctcaaaaaataaataataaaaaataaaggtatatggtgtgtcttggatttgatgaaatatgagtgtgtttgagatctgatccaaggttttgaaaaattcatttcaaatcctggagataaattctgaggagcttacttatgaaaaactagcaagtgatagctggtatttacagatatggtactttacacaatttatgtaattaatattttctcacagacaaggttccttgtggatatcactgaataatttttgtgtagtttctatgcccatgaagtgcctggtaggtagtaggaactcacacgttctgctatgctggttgcagcacaggacacaaaagttagaattatttcaaaggacttatactctactaggaaagagagaaacatagaaatatagtgttgtatgtggtatcttccctaagataagtacaaccaaagagctatggatgttcagagatagaatgtagtactgggatgatgtcaaggaggcagtggtacttaagctgctcaaggtagggaagcagtttacttgctggtttttcatagggtaagctcttcagagtttgtctccagtatttgaaatgaatttttttaaacctcagatctgaatatattcaaacacccatatttcatcaaatctaaggcatatcatatacctttaatttaaaaaaaaaggctgagcagagttgcttatgtctgggaggctgaagtgggaggattgcttgaggccaaaagtttgagaccagcctgagcaacatagcaagatcctgcctctaaaaacaaacaaacaaaaaatgctgccagttgatcattacatttatcccgacatcagatatgtcaaattgtgaaaagcaccttaattttgatgaaatatgataggtaaaaaatagcgcaaagctaagtataagtgacttttaaattatctgctcttttggattatcactactgctactagccgttagaatattggtttggataatggaaagttgactagagctacaaaatctgtttcaaaataaaagatctgctcaaacaagaatgtgatgatcacttgctgtattgtacaacaaagtcaaactgctgttagactcaggtgacagtcaaatgttggaggctgtgttgggatgagttgttacaaagcctctttcattcttcccatgccatgtccaggagttcttctctgttaaacctgaagagatgccagccctcctcagaggaaaggtctaaagcccctcgactagtatagtagttgatagaagcctggttccaaatgacgacaagaaagtgcatgcagttacattgagttgtgatggctatctgtttaaaaacaaacaagcaaatattactttcatttgaaagtataatcttcgttaacacatatattttattgaaggtctactctatgcaagacactatgtgtgaataatacttccaaatatagtagttaccttttgaacttttctatagctgtaaaaagaaaaaagtctcactgttctgagctttaaagccctctttaaaatctcaaaactgatttgcaaagcctttatcatacagaaaaggtgtacctaaaagaacacatgttctcatatgtttccaaaatacaagaagatcttgcttttatagtcttgtaatattcatactgtgagcctgtgtttttgaataaaaatgctttctaatctccctccttcttactttcccttgatagcaaaaagggtgtatagtgtggttgtggattatatataaatcaattttaattgactataattcatatactgtatatgatcatctgatttgaaaatccagtttaatttgggtagaaatttgaagtatatgttggggttatgttcaaatggtgagattaatgatttaatttatgccctgtgaatatttattaagaaaaggttaatgtatagaatatcaatactaattgtaatacatacctgacttagcctcttcagcatttcagctccaatacctaggccttttaaatagacaatgcaaagtgaaaactgcaaatttcacttaacttgttatttgctttagtttaaaataaataatatctaaaactctg

SEQ ID NO: 420392 - DNA, 2893 bp, Homo sapiens
accatgttgtccaggctggtctcgaactcctgagctcaagcatctgtccgactcagcctaccacagtgttgggattacaggcgtgagccaccgcacccagcccctacttgaatttttatgtcattattgactcttcaccactctctccttgagactcacttatccctttgctctctatttttcctgcttttgttattcttcatttttcttctcttgctctgaatcccttaaatgctgaggctgctcaagtttcatccctagtcctattttctcattctatatgcacactcatttttcatttaacagacttcactggcttcaggcaccatttgttttattattcatattttcaacccccatatctctctagtgctgtagacctttatttctacttactagttatattcacctaacatcccatagatatgccaatgtcaatgtgcctaaaacaaaattgtctctacctcccgctccttcaaatctattctgtcttctctaatcctataattactctccctcaagtcatcatcatcacttttctgggttactgtaatagccttcaggctaatttgctcactgtcaatcttgctgtctctcatttcagaatatgttctgcttgcaggtgacagtaaactagttaaacaaatatttaatattagcttaagcaaaaaaaaaaaaaaaggcctatcctatttatagcctagaattaggcagtatagggttgggacagtggctcattggtgctatcaaggacgtagactttttctctttccactctgtcctctacagcatgctggtttgtcacctcatggtcacaagatgtctgctgtacctccagggagcagatacacattcaaagtaggaaatagcagataaaaatgtacacaagatgcgtctgactcccttttaccagaaaagtaaatgctttcttagaatctcctcagaagacctctgtgtatatctcaaccagtacttgtcatatagccacacacttagctcaaggaagatagggaatagggaaatcatgtttcttttcccctgtggtgaggaaggcaaggggtaaggggttgggaacaggtgctgaattaaagctaacatacagtatctactaccctattcttctaacccatttgtctattatgatatagttgtcttgacaactataatgaatagctgtctttctgaaatctttagtggctcatcattgcctgcagaatcaaaactccttagtctgatatacaaggcccttcatatctgattccagcttaccttctaatcctatcttccctctccttacccaccctactgctaatgtgtattatattgtctttatgacataccatttgtttcttgaacatgctttgctcattattgcctctttctctgcctgtgctagtgtgtcctcttagaatgttcttccatcttatcctgctctacattctaacttctacccatcctacaagtccaattccagtgtcatgttccctttctcaatcctccagggtagaatttagatgttctgtcttttagagataggtattgctatgttgcccagggtttgagaccagcctgagcaacatagcaagatcctgcctctaaaaacaaacaaacaaaaaatgctgccagttgatcattacatttatcccgacatcagatatgtcaaattgtgaaaagcaccttaattttgatgaaatatgataggtaaaaaatagcgcaaagctaagtataagtgacttttaaattatctgctcttttggattatcactactgctactagccgttagaatattggtttggataatggaaagttgactagagctacaaaatctgtttcaaaataaaagatctgctcaaacaagaatgtgatgatcacttgctgtattgtacaacaaagtcaaactgctgttagactcaggtgacagtcaaatgttggaggctgtgttgggatgagttgttacaaagcctctttcattcttcccatgccatgtccaggagttcttctctgttaaacctgaagagatgccagccctcctcagaggaaaggtctaaagcccctcgactagtatagtagttgatagaagcctggttccaaatgacgacaagaaagtgcatgcagttacattgagttgtgatggctatctgtttaaaaacaaacaagcaaatattactttcatttgaaagtataatcttcgttaacacatatattttattgaaggtctactctatgcaagacactatgtgtgaataatacttccaaatatagtagttaccttttgaacttttctatagctgtaaaaagaaaaaagtctcactgttctgagctttaaagccctctttaaaatctcaaaactgatttgcaaagcctttatcatacagaaaaggtgtacctaaaagaacacatgttctcatatgtttccaaaatacaagaagatcttgcttttatagtcttgtaatattcatactgtgagcctgtgtttttgaataaaaatgctttctaatctccctccttcttactttcccttgatagcaaaaagggtgtatagtgtggttgtggattatatataaatcaattttaattgactataattcatatactgtatatgatcatctgatttgaaaatccagtttaatttgggtagaaatttgaagtatatgttggggttatgttcaaatggtgagattaatgatttaatttatgccctgtgaatatttattaagaaaaggttaatgtatagaatatcaatactaattgtaatacatacctgacttagcctcttcagcatttcagctccaatacctaggccttttaaatagacaatgcaaagtgaaaactgcaaatttcacttaacttgttatttgctttagtttaaaataaataatatctaaaactctg

SEQ ID NO: 420393 - DNA, 1625 bp, Homo sapiens
cacaccacctgagtcctgtctgtgagaaaatattaattacataaattgtgtaaagtaccatatctgtaaataccagctatcacttgctggtttttcatagggtaagctcttcagagtttgtctccagtatttgaaatgaatttttttaaacctcagatctgaatatattcaaacacccatatttcatcaaatctaaggcatatcatatacctttaatttaaaaaaaaaggctgagcagagttgcttatgtctgggaggctgaagtgggaggattgcttgaggccaaaagtttgagaccagcctgagcaacatagcaagatcctgcctctaaaaacaaacaaacaaaaaatgctgccagttgatcattacatttatcccgacatcagatatgtcaaattgtgaaaagcaccttaattttgatgaaatatgataggtaaaaaatagcgcaaagctaagtataagtgacttttaaattatctgctcttttggattatcactactgctactagccgttagaatattggtttggataatggaaagttgactagagctacaaaatctgtttcaaaataaaagatctgctcaaacaagaatgtgatgatcacttgctgtattgtacaacaaagtcaaactgctgttagactcaggtgacagtcaaatgttggaggctgtgttgggatgagttgttacaaagcctctttcattcttcccatgccatgtccaggagttcttctctgttaaacctgaagagatgccagccctcctcagaggaaaggtctaaagcccctcgactagtatagtagttgatagaagcctggttccaaatgacgacaagaaagtgcatgcagttacattgagttgtgatggctatctgtttaaaaacaaacaagcaaatattactttcatttgaaagtataatcttcgttaacacatatattttattgaaggtctactctatgcaagacactatgtgtgaataatacttccaaatatagtagttaccttttgaacttttctatagctgtaaaaagaaaaaagtctcactgttctgagctttaaagccctctttaaaatctcaaaactgatttgcaaagcctttatcatacagaaaaggtgtacctaaaagaacacatgttctcatatgtttccaaaatacaagaagatcttgcttttatagtcttgtaatattcatactgtgagcctgtgtttttgaataaaaatgctttctaatctccctccttcttactttcccttgatagcaaaaagggtgtatagtgtggttgtggattatatataaatcaattttaattgactataattcatatactgtatatgatcatctgatttgaaaatccagtttaatttgggtagaaatttgaagtatatgttggggttatgttcaaatggtgagattaatgatttaatttatgccctgtgaatatttattaagaaaaggttaatgtatagaatatcaatactaattgtaatacatacctgacttagcctcttcagcatttcagctccaatacctaggccttttaaatagacaatgcaaagtgaaaactgcaaatttcacttaacttgttatttgctttagtttaaaataaataatatctaaaactctg

SEQ ID NO: 420394 - DNA, 3962 bp, Homo sapiens
accatgttgtccaggctggtctcgaactcctgagctcaagcatctgtccgactcagcctaccacagtgttgggattacaggcgtgagccaccgcacccagcccctacttgaatttttatgtcattattgactcttcaccactctctccttgagactcacttatccctttgctctctatttttcctgcttttgttattcttcatttttcttctcttgctctgaatcccttaaatgctgaggctgctcaagtttcatccctagtcctattttctcattctatatgcacactcatttttcatttaacagacttcactggcttcaggcaccatttgttttattattcatattttcaacccccatatctctctagtgctgtagacctttatttctacttactagttatattcacctaacatcccatagatatgccaatgtcaatgtgcctaaaacaaaattgtctctacctcccgctccttcaaatctattctgtcttctctaatcctataattactctccctcaagtcatcatcatcacttttctgggttactgtaatagccttcaggctaatttgctcactgtcaatcttgctgtctctcatttcagaatatgttctgcttgcaggtgacagtaaactagttaaacaaatatttaatattagcttaagcaaaaaaaaaaaaaaaggcctatcctatttatagcctagaattaggcagtatagggttgggacagtggctcattggtgctatcaaggacgtagactttttctctttccactctgtcctctacagcatgctggtttgtcacctcatggtcacaagatgtctgctgtacctccagggagcagatacacattcaaagtaggaaatagcagataaaaatgtacacaagatgcgtctgactcccttttaccagaaaagtaaatgctttcttagaatctcctcagaagacctctgtgtatatctcaaccagtacttgtcatatagccacacacttagctcaaggaagatagggaatagggaaatcatgtttcttttcccctgtggtgaggaaggcaaggggtaaggggttgggaacaggtgctgaattaaagctaacatacagtatctactaccctattcttctaacccatttgtctattatgatatagttgtcttgacaactataatgaatagctgtctttctgaaatctttagtggctcatcattgcctgcagaatcaaaactccttagtctgatatacaaggcccttcatatctgattccagcttaccttctaatcctatcttccctctccttacccaccctactgctaatgtgtattatattgtctttatgacataccatttgtttcttgaacatgctttgctcattattgcctctttctctgcctgtgctagtgtgtcctcttagaatgttcttccatcttatcctgctctacattctaacttctacccatcctacaagtccaattccagtgtcatgttccctttctcaatcctccagggtagaatttagatgttctgtcttttagagataggtattgctatgttgcccaggctggtctcaaactcatggcctcaagcgatcctcccacctcagccaaccagacatgagtgactgtgctcagccttttttaaaaaaatgaaggtatttggtatggccgggtatggtggctcacacctataatcccagcactttgggaggccaaggtgggtgaatcgcctgaggtcaggagtttgagaccagcctgaccaacatagtgaaaccctgtctctactaaaaacacgcaaaaagtgcaaaattagctaggcgtggtggctcatgcctgtaattccagctacttgggaggctgaggcaggagaatcacttgaatccgggaggtggaggctgcagtgagccgagatcgtgccattgcacttcagcctgggcacaggaacaaaactcagtctcaaaaaataaataataaaaaataaaggtatatggtgtgtcttggatttgatgaaatatgagtgtgtttgagatctgatccaaggttttgaaaaattcatttcaaatcctggagataaattctgaggagcttacttatgaaaaactagcaagtgatagctggtatttacagatatggtactttacacaatttatgtaattaatattttctcacagacaaggttccttgtggatatcactgaataatttttgtgtagtttctatgcccatgaagtgcctggtaggtagtaggaactcacacgttctgctatgctggttgcagcacaggacacaaaagttagaattatttcaaaggacttatactctactaggaaagagagaaacatagaaatatagtgttgtatgtggtatcttccctaagataagtacaaccaaagagctatggatgttcagagatagaatgtagtactgggatgatgtcaaggaggcagtggtacttaagctgctcaaggtagggaagcagtttacttgctggtttttcatagggtaagctcttcagagtttgtctccagtatttgaaatgaatttttttaaacctcagatctgaatatattcaaacacccatatttcatcaaatctaaggcatatcatatacctttaatttaaaaaaaaaggctgagcagagttgcttatgtctgggaggctgaagtgggaggattgcttgaggccaaaagtttgagaccagcctgagcaacatagcaagatcctgcctctaaaaacaaacaaacaaaaaatgctgccagttgatcattacatttatcccgacatcagatatgtcaaattgtgaaaagcaccttaattttgatgaaatatgataggtaaaaaatagcgcaaagctaagtataagtgacttttaaattatctgctcttttggattatcactactgctactagccgttagaatattggtttggataatggaaagttgactagagctacaaaatctgtttcaaaatatcaaactgctgttagactcaggtgacagtcaaatgttggaggctgtgttgggatgagttgttacaaagcctctttcattcttcccatgccatgtccaggagttcttctctgttaaacctgaagagatgccagccctcctcagaggaaaggtctaaagcccctcgactagtatagtagttgatagaagcctggttccaaatgacgacaagaaagtgcatgcagttacattgagttgtgatggctatctgtttaaaaacaaacaagcaaatattactttcatttgaaagtataatcttcgttaacacatatattttattgaaggtctactctatgcaagacactatgtgtgaataatacttccaaatatagtagttaccttttgaacttttctatagctgtaaaaagaaaaaagtctcactgttctgagctttaaagccctctttaaaatctcaaaactgatttgcaaagcctttatcatacagaaaaggtgtacctaaaagaacacatgttctcatatgtttccaaaatacaagaagatcttgcttttatagtcttgtaatattcatactgtgagcctgtgtttttgaataaaaatgctttctaatctccctccttcttactttcccttgatagcaaaaagggtgtatagtgtggttgtggattatatataaatcaattttaattgactataattcatatactgtatatgatcatctgatttgaaaatccagtttaatttgggtagaaatttgaagtatatgttggggttatgttcaaatggtgagattaatgatttaatttatgccctgtgaatatttattaagaaaaggttaatgtatagaatatcaatactaattgtaatacatacctgacttagcctcttcagcatttcagctccaatacctaggccttttaaatagacaatgcaaagtgaaaactgcaaatttcacttaacttgttatttgctttagtttaaaataaataatatctaaaactctg

SEQ ID NO: 420395 - DNA, 4052 bp, Homo sapiens
accatgttgtccaggctggtctcgaactcctgagctcaagcatctgtccgactcagcctaccacagtgttgggattacaggcgtgagccaccgcacccagcccctacttgaatttttatgtcattattgactcttcaccactctctccttgagactcacttatccctttgctctctatttttcctgcttttgttattcttcatttttcttctcttgctctgaatcccttaaatgctgaggctgctcaagtttcatccctagtcctattttctcattctatatgcacactcatttttcatttaacagacttcactggcttcaggcaccatttgttttattattcatattttcaacccccatatctctctagtgctgtagacctttatttctacttactagttatattcacctaacatcccatagatatgccaatgtcaatgtgcctaaaacaaaattgtctctacctcccgctccttcaaatctattctgtcttctctaatcctataattactctccctcaagtcatcatcatcacttttctgggttactgtaatagccttcaggctaatttgctcactgtcaatcttgctgtctctcatttcagaatatgttctgcttgcaggtgacagtaaactagttaaacaaatatttaatattagcttaagcaaaaaaaaaaaaaaaggcctatcctatttatagcctagaattaggcagtatagggttgggacagtggctcattggtgctatcaaggacgtagactttttctctttccactctgtcctctacagcatgctggtttgtcacctcatggtcacaagatgtctgctgtacctccagggagcagatacacattcaaagtaggaaatagcagataaaaatgtacacaagatgcgtctgactcccttttaccagaaaagtaaatgctttcttagaatctcctcagaagacctctgtgtatatctcaaccagtacttgtcatatagccacacacttagctcaaggaagatagggaatagggaaatcatgtttcttttcccctgtggtgaggaaggcaaggggtaaggggttgggaacaggtgctgaattaaagctaacatacagtatctactaccctattcttctaacccatttgtctattatgatatagttgtcttgacaactataatgaatagctgtctttctgaaatctttagtggctcatcattgcctgcagaatcaaaactccttagtctgatatacaaggcccttcatatctgattccagcttaccttctaatcctatcttccctctccttacccaccctactgctaatgtgtattatattgtctttatgacataccatttgtttcttgaacatgctttgctcattattgcctctttctctgcctgtgctagtgtgtcctcttagaatgttcttccatcttatcctgctctacattctaacttctacccatcctacaagtccaattccagtgtcatgttccctttctcaatcctccagggtagaatttagatgttctgtcttttagagataggtattgctatgttgcccaggctggtctcaaactcatggcctcaagcgatcctcccacctcagccaaccagacatgagtgactgtgctcagccttttttaaaaaaatgaaggtatttggtatggccgggtatggtggctcacacctataatcccagcactttgggaggccaaggtgggtgaatcgcctgaggtcaggagtttgagaccagcctgaccaacatagtgaaaccctgtctctactaaaaacacgcaaaaagtgcaaaattagctaggcgtggtggctcatgcctgtaattccagctacttgggaggctgaggcaggagaatcacttgaatccgggaggtggaggctgcagtgagccgagatcgtgccattgcacttcagcctgggcacaggaacaaaactcagtctcaaaaaataaataataaaaaataaaggtatatggtgtgtcttggatttgatgaaatatgagtgtgtttgagatctgatccaaggttttgaaaaattcatttcaaatcctggagataaattctgaggagcttacttatgaaaaactagcaagtgatagctggtatttacagatatggtactttacacaatttatgtaattaatattttctcacagacaaggttccttgtggatatcactgaataatttttgtgtagtttctatgcccatgaagtgcctggtaggtagtaggaactcacacgttctgctatgctggttgcagcacaggacacaaaagttagaattatttcaaaggacttatactctactaggaaagagagaaacatagaaatatagtgttgtatgtggtatcttccctaagataagtacaaccaaagagctatggatgttcagagatagaatgtagtactgggatgatgtcaaggaggcagtggtacttaagctgctcaaggtagggaagcagtttacttgctggtttttcatagggtaagctcttcagagtttgtctccagtatttgaaatgaatttttttaaacctcagatctgaatatattcaaacacccatatttcatcaaatctaaggcatatcatatacctttaatttaaaaaaaaaggctgagcagagttgcttatgtctgggaggctgaagtgggaggattgcttgaggccaaaagtttgagaccagcctgagcaacatagcaagatcctgcctctaaaaacaaacaaacaaaaaatgctgccagttgatcattacatttatcccgacatcagatatgtcaaattgtgaaaagcaccttaattttgatgaaatatgataggtaaaaaatagcgcaaagctaagtataagtgacttttaaattatctgctcttttggattatcactactgctactagccgttagaatattggtttggataatggaaagttgactagagctacaaaatctgtttcaaaataaaagatctgctcaaacaagaatgtgatgatcacttgctgtattgtacaacaaagtcaaactgctgttagactcaggtgacagtcaaatgttggaggctgtgttgggatgagttgttacaaagcctctttcattcttcccatgccatgtccaggagttcttctctgttaaacctgaagagatgccagccctcctcagaggaaaggtctaaagcccctcgactagtatagtagttgatagaagcctggttccaaatgacgacaagaaagtgcatgcagttacattgagttgtgatggctatctgtttaaaaacaaacaagcaaatattactttcatttgaaagtataatcttcgttaacacatatattttattgaaggtctactctatgcaagacactatgtgtgaataatacttccaaatatagtagttaccttttgaacttttctatagctgtaaaaagaaaaaagtctcactgttctgagctttaaagccctctttaaaatctcaaaactgatttgcaaagcctttatcatacagaaaaggtgtacctaaaagaacacatgttctcatatgtttccaaaatacaagaagatcttgcttttatagtcttgtaatattcatactgtgagcctgtgtttttgaataaaaatgctttctaatctccctccttcttactttcccttgatagcaaaaagggtgtatagtgtggttgtggattatatataaatcaattttaattgactataattcatatactgtatatgatcatctgatttgaaaatccagtttaatttgggtagaaatttgaagtatatgttggggttatgttcaaatggtgagattaatgatttaatttatgccctgtgaatatttattaagaaaaggttaatgtatagaatatcaatactaattgtaatacatacctgacttagcctcttcagcatttcagctccaatacctaggccttttaaatagacaatgcaaagtgaaaactgcaaatttcacttaacttgttatttgctttagttttagatattatttatgttaaactgtctgagcggccgcgaatttagtagtagtaggcgtcagc

SEQ ID NO: 420396 - DNA, 1085 bp, Homo sapiens
aagagatgccagccctcctcagaggaaaggtctaaagcccctcgactagtatagtagttgatcacttgctgtattgtacaacaaagtcaaactgctgttagactcaggtgacagtcaaatgttggaggctgtgttgggatgagttgttacaaagcctctttcattcttcccatgccatgtccaggagttcttctctgttaaacctgaagagatgccagccctcctcagaggaaaggtctaaagcccctcgactagtatagtagttgatagaagcctggttccaaatgacgacaagaaagtgcatgcagttacattgagttgtgatggctatctgtttaaaaacaaacaagcaaatattactttcatttgaaagtataatcttcgttaacacatatattttattgaaggtctactctatgcaagacactatgtgtgaataatacttccaaatatagtagttaccttttgaacttttctatagctgtaaaaagaaaaaagtctcactgttctgagctttaaagccctctttaaaatctcaaaactgatttgcaaagcctttatcatacagaaaaggtgtacctaaaagaacacatgttctcatatgtttccaaaatacaagaagatcttgcttttatagtcttgtaatattcatactgtgagcctgtgtttttgaataaaaatgctttctaatctccctccttcttactttcccttgatagcaaaaagggtgtatagtgtggttgtggattatatataaatcaattttaattgactataattcatatactgtatatgatcatctgatttgaaaatccagtttaatttgggtagaaatttgaagtatatgttggggttatgttcaaatggtgagattaatgatttaatttatgccctgtgaatatttattaagaaaaggttaatgtatagaatatcaatactaattgtaatacatacctgacttagcctcttcagcatttcagctccaatacctaggccttttaaatagacaatgcaaagtgaaaactgcaaatttcacttaacttgttatttgctttagtttaaaataaataatatctaaaactctg

SEQ ID NO: 420397 - DNA, 3413 bp, Homo sapiens
accatgttgtccaggctggtctcgaactcctgagctcaagcatctgtccgactcagcctaccacagtgttgggattacaggcgtgagccaccgcacccagcccctacttgaatttttatgtcattattgactcttcaccactctctccttgagactcacttatccctttgctctctatttttcctgcttttgttattcttcatttttcttctcttgctctgaatcccttaaatgctgaggctgctcaagtttcatccctagtcctattttctcattctatatgcacactcatttttcatttaacagacttcactggcttcaggcaccatttgttttattattcatattttcaacccccatatctctctagtgctgtagacctttatttctacttactagttatattcacctaacatcccatagatatgccaatgtcaatgtgcctaaaacaaaattgtctctacctcccgctccttcaaatctattctgtcttctctaatcctataattactctccctcaagtcatcatcatcacttttctgggttactgtaatagccttcaggctaatttgctcactgtcaatcttgctgtctctcatttcagaatatgttctgcttgcaggtgacagtaaactagttaaacaaatatttaatattagcttaagcaaaaaaaaaaaaaaaggcctatcctatttatagcctagaattaggcagtatagggttgggacagtggctcattggtgctatcaaggacgtagactttttctctttccactctgtcctctacagcatgctggtttgtcacctcatggtcacaagatgtctgctgtacctccagggagcagatacacattcaaagtaggaaatagcagataaaaatgtacacaagatgcgtctgactcccttttaccagaaaagtaaatgctttcttagaatctcctcagaagacctctgtgtatatctcaaccagtacttgtcatatagccacacacttagctcaaggaagatagggaatagggaaatcatgtttcttttcccctgtggtgaggaaggcaaggggtaaggggttgggaacaggtgctgaattaaagctaacatacagtatctactaccctattcttctaacccatttgtctattatgatatagttgtcttgacaactataatgaatagctgtctttctgaaatctttagtggctcatcattgcctgcagaatcaaaactccttagtctgatatacaaggcccttcatatctgattccagcttaccttctaatcctatcttccctctccttacccaccctactgctaatgtgtattatattgtctttatgacataccatttgtttcttgaacatgctttgctcattattgcctctttctctgcctgtgctagtgtgtcctcttagaatgttcttccatcttatcctgctctacattctaacttctacccatcctacaagtccaattccagtgtcatgttccctttctcaatcctccagggtagaatttagatgttctgtcttttagagataggtattgctatgttgcccaggctggtctcaaactcatggcctcaagcgatcctcccacctcagccaaccagacatgagtgactgtgctcagccttttttaaaaaaatgaaggtatttggtatggccgggtatggtggctcacacctataatcccagcactttgggaggccaaggtgggtgaatcgcctgaggtcaggagtttgagaccagcctgaccaacatagtgaaaccctgtctctactaaaaacacgcaaaaagtgcaaaattagctaggcgtggtggctcatgcctgtaattccagctacttgggaggctgaggcaggagaatcacttgaatccgggaggtggaggctgcagtgagccgagatcgtgccattgcacttcagcctgggcacaggaacaaaactcagtctcaaaaaataaataataaaaaataaaggtatatggtgtgtcttggatttgatgaaatatgagtgtgtttgagatctgatccaaggttttgaaaaattcatttcaaatcctggagataaattctgaggagcttacttatgaaaaactagcaagtgatagctggtatttacagatatggtactttacacaatttatgtaattaatattttctcacagacaaggttccttgtggatatcactgaataatttttgtgtagtttctatgcccatgaagtgcctggtaggtagtaggaactcacacgttctgctatgctggttgcagcacaggacacaaaagttagaattatttcaaaggacttatactctactaggaaagagagaaacatagaaatatagtgttgtatgtggtatcttccctaagataagtacaaccaaagagctatggatgttcagagatagaatgtagtactgggatgatgtcaaggaggcagtggtacttaagctgctcaaggtagggaagcagtttacttgctggtttttcatagggtaagctcttcagagtttgtctccagtatttgaaatgaatttttttaaacctcagatctgaatatattcaaacacccatatttcatcaaatctaaggcatatcatatacctttaatttaaaaaaaaaggctgagcagagttgcttatgtctgggaggctgaagtgggaggattgcttgaggccaaaagtttgagaccagcctgagcaacatagcaagatcctgcctctaaaaacaaacaaacaaaaaatgctgccagttgatcattacatttatcccgacatcagatatgtcaaattgtgaaaagcaccttaattttgatgaaatatgataggtaaaaaatagcgcaaagctaagtataagtgacttttaaattatctgctcttttggattatcactactgctactagccgttagaatattggtttggataatggaaagttgactagagctacaaaatctgtttcaaaataaaagatctgctcaaacaagaatgtgatgatcacttgctgtattgtacaacaaagtcaaactgctgttagactcaggtgacagtcaaatgttggaggctgtgttgggatgagttgttacaaagcctctttcattcttcccatgccatgtccaggagttcttctctgttaaacctgaagagatgccagccctcctcagaggaaaggtctaaagcccctcgactagtatagtagttgatagaagcctggttccaaatgacgacaagaaagtgcatgcagttacattgagttgtgatggctatctgtttacaccgcccccaccccagttccccaacccactcccttccatcaacaaccagctccaactgactctggtcttgggaggtaaggcttcccaaccgcggaagactactttaaatgaaaaaaagaaattgaataataaaatcaggagtc

SEQ ID NO: 420398 - DNA, 3275 bp, Homo sapiens
gcggttttggggagaaggatcacgaggaatgtagggaagccggagggatgggtgctgctgcgacgacccccccgtccctcggccccagccctcctgccctccccgtcaatctcatccaccaaatctgaaggccttaaaattgtgtgttgggaggatgtgaattgggaggacggtgtcactagactgtggattagggatggtaaagtagggaggatgctattttgcaactatagtaacgacttagtgttttggaaaggaaaagaagttaaacttgaaatacgtgactagaacagttgtcatgtttataatgtgaaaagggtgaaatcatttgggggaggggccgtctgtaagaaatcattatgcactatggcttcctcctctggtctgggaagaagcggggactggctggccctcaggggatctgtaaatcccagaaaacagtatttttaacagcaagatgtcattcaacattggtggggaaggaagagaaaaaaatcaaactattccatagaactagctggccccctcactcccatgcccttcccactcagcctgggcccctccccgctccattcataaaagctgagagggttgagctaatcttcacaaattgtaatatttttgtagtatctgttagttccttcgtcagttctgcagaaccttgccctttccttttgtaatgtgaataggaagacaaaagacaaaaaaaaatccaccaccaccaaaatatccctttgtacatgtatgtgcgtgtgcgcgtgtgctttgtgtgtgtggttgtgtgttaaatcatgcagtattgtcgtaatctggtgttgcagcaatggatggtactaaatcagcacctggatgccccacccaaccccgtgggccctgcagaccccagtagggaggtatggggagagctcaggggagtgtggtttctgagggctactgtctggggacacctctgaacttactgtaccttcctctccccatgaagacacctgaatagagtctaacatgcctcttctccaacttcctacctacaacaacagaacagttctaatgttgcacggcctagtggccagggggcaagctaagaggctgtctggaggctttatatgtgtctggagttaaggggagaggaggagggtagacaggggtctctccccaggtgggatctgaatatctgtcctcccctcttcttcatgccacctgactccttcggccccctggctgcctttagctgtggtactgctgacaaccctgcttgctactgccttatccagcacagtgaaaaacttctccagcctggcaaggccacgttggttaatagtccctttcccatgtccagctcctacaaatatgtcccttaatgcatttggtgacatttacacctcactcatgtgctctttccctattcactccttcactcattcaaagcattaaaatcctatgtatatataggatagacaaatatatagatatatagatatatatatatatagcaagagattgatataaaatagtaaatatcattgctgctttgggctgctttggaggaggaggccatgaatatggggaaggcagatctggggtgcaggggtaggtagggaggctgggggacccagtgattcagtacaatccaagggatgcaacgcgggcttgtttaatctttgtgcctgaacagtttttccatgttgagaaaaaaaagaaaaaaaaactgctgcaatttttcacaagtgtatggtacctttctggatgctattggtacaattgctgtggatggaagagggccattgagcttacctccctataggggagagagcagaggtggggcagcctttcgactctgtccatgacggctggcagggtcagggtagtttctgggcctgcttcccggcaagccgagctagggtgaaaactgggggcgcaccaggatgtgagacagaaaagcagaagatgagactctgttcattcacttttcctaggcccatcctgtggtcatctttccccctcccatcatacctcctccttcctggagcctctgccggcttggctgtaatggtggcacttacctggatatttcagtgggaggatgaaaggcgagactcaccctacgcggtgggacagatggggagaggaaaaaggcagagatggccaggagaggggtgcaggacaaaccagagaggttgggtcaggggaaaagggtggggagaaagaggggtgcaggccctgcaggccggttagccagcagctgcggcctccccgggcccttggcatccaacttcgcagacagggtaccagcctcctggtgtgtatcataggatttgttcacatagtgttatgcatgatcttcgtaaggttaagaagccgtggtggtgcaccatgacatccaacccgtatatataaagataaatatatatatatatgtatgtaaattatagcactgagggccctgctgccctgctggaccaagcaaaactaagccttttggtttgggtattatgtttcgttttgttatttgtttgtttttgtggcttgtcttatgtcgtgatagcacaagtgccagtcggattgctctgtattacagaatagtgtttttaattcatcaatgttctagttaatgtctacctcagcacctcctcttagcctaattttaggaggttgcccaattttgtttcttcaattttactggttacttttttgtacaaatcaatctctttctctctttctctcctccccacctctcacccttgccctctccatctccctctcccgccctcccctcctccctctggctccccgtctcatttctgtccactccattctctctccctctctcctgcctcctgctgccccctccccagcccacttccccgagttgtgcttgccgctccttatctgttctagttccgaagcagtttcactcgaagttgtgcagtcctggttgcagctttccgcatctgccttcgtttcgtgtagattgacgcgtttctttgtaatttcagtgtttctgacaagatttaaaaaaaaaaaaaaggaaaaaaaaagaaaaaatgaatttactgctgcaggtttttttctctctccatgtgtcactaagtgaagtttgtgccttctatagcaaagagaatattttttacatcctactaacagtagatttttttgtagtgaacattttttgtatttttatttataagtctcataagaaaaatagcaatgttcagttgtataccttgaatctgcagttagaagagaataaagttaattcagttgtctctcgaaaaaaa

SEQ ID NO: 420399 - DNA, 2921 bp, Homo sapiens
ttttatttgtcatagtccttccttcatctcactccaactcttctttcctggctggccctcaggggatctgtaaatcccagaaaacagtatttttaacagcaagatgtcattcaacattggtggggaaggaagagaaaaaaatcaaactattccatagaactagctggccccctcactcccatgcccttcccactcagcctgggcccctccccgctccattcataaaagctgagagggttgagctaatcttcacaaattgtaatatttttgtagtatctgttagttccttcgtcagttctgcagaaccttgccctttccttttgtaatgtgaataggaagacaaaagacaaaaaaaaatccaccaccaccaaaatatccctttgtacatgtatgtgcgtgtgcgcgtgtgctttgtgtgtgtggttgtgtgttaaatcatgcagtattgtcgtaatctggtgttgcagcaatggatggtactaaatcagcacctggatgccccacccaaccccgtgggccctgcagaccccagtagggaggtatggggagagctcaggggagtgtggtttctgagggctactgtctggggacacctctgaacttactgtaccttcctctccccatgaagacacctgaatagagtctaacatgcctcttctccaacttcctacctacaacaacagaacagttctaatgttgcacggcctagtggccagggggcaagctaagaggctgtctggaggctttatatgtgtctggagttaaggggagaggaggagggtagacaggggtctctccccaggtgggatctgaatatctgtcctcccctcttcttcatgccacctgactccttcggccccctggctgcctttagctgtggtactgctgacaaccctgcttgctactgccttatccagcacagtgaaaaacttctccagcctggcaaggccacgttggttaatagtccctttcccatgtccagctcctacaaatatgtcccttaatgcatttggtgacatttacacctcactcatgtgctctttccctattcactccttcactcattcaaagcattaaaatcctatgtatatataggatagacaaatatatagatatatagatatatatatatatagcaagagattgatataaaatagtaaatatcattgctgctttgggctgctttggaggaggaggccatgaatatggggaaggcagatctggggtgcaggggtaggtagggaggctgggggacccagtgattcagtacaatccaagggatgcaacgcgggcttgtttaatctttgtgcctgaacagtttttccatgttgagaaaaaaaagaaaaaaaaactgctgcaatttttcacaagtgtatggtacctttctggatgctattggtacaattgctgtggatggaagagggccattgagcttacctccctataggggagagagcagaggtggggcagcctttcgactctgtccatgacggctggcagggtcagggtagtttctgggcctgcttcccggcaagccgagctagggtgaaaactgggggcgcaccaggatgtgagacagaaaagcagaagatgagactctgttcattcacttttcctaggcccatcctgtggtcatctttccccctcccatcatacctcctccttcctggagcctctgccggcttggctgtaatggtggcacttacctggatatttcagtgggaggatgaaaggcgagactcaccctacgcggtgggacagatggggagaggaaaaaggcagagatggccaggagaggggtgcaggacaaaccagagaggttgggtcaggggaaaagggtggggagaaagaggggtgcaggccctgcaggccggttagccagcagctgcggcctccccgggcccttggcatccaacttcgcagacagggtaccagcctcctggtgtgtatcataggatttgttcacatagtgttatgcatgatcttcgtaaggttaagaagccgtggtggtgcaccatgacatccaacccgtatatataaagataaatatatatatatatgtatgtaaattatagcactgagggccctgctgccctgctggaccaagcaaaactaagccttttggtttgggtattatgtttcgttttgttatttgtttgtttttgtggcttgtcttatgtcgtgatagcacaagtgccagtcggattgctctgtattacagaatagtgtttttaattcatcaatgttctagttaatgtctacctcagcacctcctcttagcctaattttaggaggttgcccaattttgtttcttcaattttactggttacttttttgtacaaatcaatctctttctctctttctctcctccccacctctcacccttgccctctccatctccctctcccgccctcccctcctccctctggctccccgtctcatttctgtccactccattctctctccctctctcctgcctcctgctgccccctccccagcccacttccccgagttgtgcttgccgctccttatctgttctagttccgaagcagtttcactcgaagttgtgcagtcctggttgcagctttccgcatctgccttcgtttcgtgtagattgacgcgtttctttgtaatttcagtgtttctgacaagatttaaaaaaaaaaaaaaggaaaaaaaaagaaaaaatgaatttactgctgcaggtttttttctctctccatgtgtcactaagtgaagtttgtgccttctatagcaaagagaatattttttacatcctactaacagtagatttttttgtagtgaacattttttgtatttttatttataagtctcataagaaaaatagcaatgttcagttgtataccttgaatctgcagttagaagagaataaagttaattcagttgtctctcgaaaaaaa

SEQ ID NO: 420400 - DNA, 2294 bp, Homo sapiens
ggcgcgcacggaggcaccgcgcgagcttggctgcttctggggcctgtgtggccctgtgtgtcggaaagatggagcaagaagccgagcccgaggggcggccgcgacccctctgaccgagatcctgctgctttcgcagccaggagcaccgtccctccccggattagtgcgtacgagcgcccagtgccctggcccggagagtggaatgatccccgaggcccagggcgtcgtgcttccgcgcgccccgtgaaggaaactggggagtcttgagggacccccgactccaagcgcgaaaaccccggatggtgaggagcaggcaaatgtgcaataccaacatgtctgtacctactgatggtgctgtaaccacctcacagattccagcttcggaacaagagaccctggttagaccaaagccattgcttttgaagttattaaagtctgttggtgcacaaaaagacacttatactatgaaagaggatcttgatgctggtgtaagtgaacattcaggtgattggttggatcaggattcagtttcagatcagtttagtgtagaatttgaagttgaatctctcgactcagaagattatagccttagtgaagaaggacaagaactctcagatgaagatgatgaggtatatcaagttactgtgtatcaggcaggggagagtgatacagattcatttgaagaagatcctgaaatttccttagctgactattggaaatgcacttcatgcaatgaaatgaatcccccccttccatcacattgcaacagatgttgggcccttcgtgagaattggcttcctgaagataaagggaaagataaaggggaaatctctgagaaagccaaactggaaaactcaacacaagctgaagagggctttgatgttcctgattgtaaaaaaactatagtgaatgattccagagagtcatgtgttgaggaaaatgatgataaaattacacaagcttcacaatcacaagaaagtgaagactattctcagccatcaacttctagtagcattatttatagcagccaagaagatgtgaaagagtttgaaagggaagaaacccaagacaaagaagagagtgtggaatctagtttgccccttaatgccattgaaccttgtgtgatttgtcaaggtcgacctaaaaatggttgcattgtccatggcaaaacaggacatcttatggcctgctttacatgtgcaaagaagctaaagaaaaggaataagccctgcccagtatgtagacaaccaattcaaatgattgtgctaacttatttcccctagttgacctgtctataagagaattatatatttctaactatataaccctaggaatttagacaacctgaaatttattcacatatatcaaagtgagaaaatgcctcaattcacatagatttcttctctttagtataattgacctactttggtagtggaatagtgaatacttactataatttgacttgaatatgtagctcatcctttacaccaactcctaattttaaataatttctactctgtcttaaatgagaagtacttggttttttttttcttaaatatgtatatgacatttaaatgtaacttattattttttttgagaccgagtcttgctctgttacccaggctggagtgcagtgggtgatcttggctcactgcaagctctgccctccccgggttcgcaccattctcctgcctcagcctcccaattagcttggcctacagtcatctgccaccacacctggctaattttttgtacttttagtagagacagggtttcaccgtgttagccaggatggtctcgatctcctgacctcgtgatccgcccacctcggcctcccaaagtgctgggattacaggcatgagccaccgcgtccggcctaaatgtcacttagtacctttgatataaagagaaaatgtgtgaaagatttagttttttgtttttttgtttgtttgtttgtttgtttgttttgagatgagtctctctgtcgcccaggctggagtgcagtgtcatgatctagcagtctccgcttcccgggttcaagccattctcctggctcagcctctggagcagctgggattacaggcatgcaccaccatgcccagctaatttttgtatttttagtagagatagggtttcaccatgttggccaggctggtcacgaactcctgacctcaagtgaggtcacccgcctcggcctcccgaagtgctgggattgcagatgtgagccaccatgtccagccaagaattagtatttaaattttagatactcttttttttttttttttttttttttt

SEQ ID NO: 420401 - DNA, 2219 bp, Homo sapiens
ggcgcgcacggaggcaccgcgcgagcttggctgcttctggggcctgtgtggccctgtgtgtcggaaagatggagcaagaagccgagcccgaggggcggccgcgacccctctgaccgagatcctgctgctttcgcagccaggagcaccgtccctccccggattagtgcgtacgagcgcccagtgccctggcccggagagtggaatgatccccgaggcccagggcgtcgtgcttccgcgcgccccgtgaaggaaactggggagtcttgagggacccccgactccaagcgcgaaaaccccggatggtgaggagcaggcaaatgtgcaataccaacatgtctgtacctactgatggtgctgtaaccacctcacagattccagcttcggaacaagagaccctggatcttgatgctggtgtaagtgaacattcaggtgattggttggatcaggattcagtttcagatcagtttagtgtagaatttgaagttgaatctctcgactcagaagattatagccttagtgaagaaggacaagaactctcagatgaagatgatgaggtatatcaagttactgtgtatcaggcaggggagagtgatacagattcatttgaagaagatcctgaaatttccttagctgactattggaaatgcacttcatgcaatgaaatgaatcccccccttccatcacattgcaacagatgttgggcccttcgtgagaattggcttcctgaagataaagggaaagataaaggggaaatctctgagaaagccaaactggaaaactcaacacaagctgaagagggctttgatgttcctgattgtaaaaaaactatagtgaatgattccagagagtcatgtgttgaggaaaatgatgataaaattacacaagcttcacaatcacaagaaagtgaagactattctcagccatcaacttctagtagcattatttatagcagccaagaagatgtgaaagagtttgaaagggaagaaacccaagacaaagaagagagtgtggaatctagtttgccccttaatgccattgaaccttgtgtgatttgtcaaggtcgacctaaaaatggttgcattgtccatggcaaaacaggacatcttatggcctgctttacatgtgcaaagaagctaaagaaaaggaataagccctgcccagtatgtagacaaccaattcaaatgattgtgctaacttatttcccctagttgacctgtctataagagaattatatatttctaactatataaccctaggaatttagacaacctgaaatttattcacatatatcaaagtgagaaaatgcctcaattcacatagatttcttctctttagtataattgacctactttggtagtggaatagtgaatacttactataatttgacttgaatatgtagctcatcctttacaccaactcctaattttaaataatttctactctgtcttaaatgagaagtacttggttttttttttcttaaatatgtatatgacatttaaatgtaacttattattttttttgagaccgagtcttgctctgttacccaggctggagtgcagtgggtgatcttggctcactgcaagctctgccctccccgggttcgcaccattctcctgcctcagcctcccaattagcttggcctacagtcatctgccaccacacctggctaattttttgtacttttagtagagacagggtttcaccgtgttagccaggatggtctcgatctcctgacctcgtgatccgcccacctcggcctcccaaagtgctgggattacaggcatgagccaccgcgtccggcctaaatgtcacttagtacctttgatataaagagaaaatgtgtgaaagatttagttttttgtttttttgtttgtttgtttgtttgtttgttttgagatgagtctctctgtcgcccaggctggagtgcagtgtcatgatctagcagtctccgcttcccgggttcaagccattctcctggctcagcctctggagcagctgggattacaggcatgcaccaccatgcccagctaatttttgtatttttagtagagatagggtttcaccatgttggccaggctggtcacgaactcctgacctcaagtgaggtcacccgcctcggcctcccgaagtgctgggattgcagatgtgagccaccatgtccagccaagaattagtatttaaattttagatactcttttttttttttttttttttttttt

SEQ ID NO: 420402 - DNA, 1723 bp, Homo sapiens
ggcgcgcacggaggcaccgcgcgagcttggctgcttctggggcctgtgtggccctgtgtgtcggaaagatggagcaagaagccgagcccgaggggcggccgcgacccctctgaccgagatcctgctgctttcgcagccaggagcaccgtccctccccggattagtgcgtacgagcgcccagtgccctggcccggagagtggaatgatccccgaggcccagggcgtcgtgcttccgcgcgccccgtgaaggaaactggggagtcttgagggacccccgactccaagcgcgaaaaccccggatggtgaggagcaggcaaatgtgcaataccaacatgtctgtacctactgatggtgctgtaaccacctcacagattccagcttcggaacaagagaccctgcacaagaaagtgaagactattctcagccatcaacttctagtagcattatttatagcagccaagaagatgtgaaagagtttgaaagggaagaaacccaagacaaagaagagagtgtggaatctagtttgccccttaatgccattgaaccttgtgtgatttgtcaaggtcgacctaaaaatggttgcattgtccatggcaaaacaggacatcttatggcctgctttacatgtgcaaagaagctaaagaaaaggaataagccctgcccagtatgtagacaaccaattcaaatgattgtgctaacttatttcccctagttgacctgtctataagagaattatatatttctaactatataaccctaggaatttagacaacctgaaatttattcacatatatcaaagtgagaaaatgcctcaattcacatagatttcttctctttagtataattgacctactttggtagtggaatagtgaatacttactataatttgacttgaatatgtagctcatcctttacaccaactcctaattttaaataatttctactctgtcttaaatgagaagtacttggttttttttttcttaaatatgtatatgacatttaaatgtaacttattattttttttgagaccgagtcttgctctgttacccaggctggagtgcagtgggtgatcttggctcactgcaagctctgccctccccgggttcgcaccattctcctgcctcagcctcccaattagcttggcctacagtcatctgccaccacacctggctaattttttgtacttttagtagagacagggtttcaccgtgttagccaggatggtctcgatctcctgacctcgtgatccgcccacctcggcctcccaaagtgctgggattacaggcatgagccaccgcgtccggcctaaatgtcacttagtacctttgatataaagagaaaatgtgtgaaagatttagttttttgtttttttgtttgtttgtttgtttgtttgttttgagatgagtctctctgtcgcccaggctggagtgcagtgtcatgatctagcagtctccgcttcccgggttcaagccattctcctggctcagcctctggagcagctgggattacaggcatgcaccaccatgcccagctaatttttgtatttttagtagagatagggtttcaccatgttggccaggctggtcacgaactcctgacctcaagtgaggtcacccgcctcggcctcccgaagtgctgggattgcagatgtgagccaccatgtccagccaagaattagtatttaaattttagatactcttttttttttttttttttttttttt

SEQ ID NO: 420403 - DNA, 456 bp, Homo sapiens
tatttacatctgcaacatttagtatgaggatgccacctggaaaatacatgtttaatgtttattgaaaggttaaattgcataagggtttgtgttagactgatagcatatctactgagtagcgccccgccgccccccgcccaccaccaagtttctgatcctttttcttttctctcagaatcatcggactcaggtacatctgtgagtgagaacaggtgtcaccttgaaggtgggagtgatcaaaaggaccttgtacaagagcttcaggaagagaaaccttcatcttcacatttggtttctagaccatctacctcatctagaaggagagcaattagtgagacaggtatatatgaatatttatttgacgcattcacacagctttttgatattctttctctaatgaaattagtgcttttagacttaattaaattgttccctttttttggttgaaaaaattaa

SEQ ID NO: 420404 - DNA, 580 bp, Homo sapiens
tatttacatctgcaacatttagtatgaggatgccacctggaaaatacatgtttaatgtttattgaaaggttaaattgcataagggtttgtgttagactgatagcatatctactgagtagcgccccgccgccccccgcccaccaccaagtttctgatcctttttcttttctctcagaatcatcggactcaggtacatctgtgagtgagaacaggtgtcaccttgaaggtgggagtgatcaaaaggtaatctaagtaaatttctcattctaatgtaatattatttgcaaattggaaaggttatttacaacaagttagcttactggttatgttaagtttgttgtattttatttttttcctaaatgcttaggaccttgtacaagagcttcaggaagagaaaccttcatcttcacatttggtttctagaccatctacctcatctagaaggagagcaattagtgagacaggtatatatgaatatttatttgacgcattcacacagctttttgatattctttctctaatgaaattagtgcttttagacttaattaaattgttccctttttttggttgaaaaaattaa

SEQ ID NO: 420405 - DNA, 1824 bp, Homo sapiens
ggcgcgcacggaggcaccgcgcgagcttggctgcttctggggcctgtgtggccctgtgtgtcggaaagatggagcaagaagccgagcccgaggggcggccgcgacccctctgaccgagatcctgctgctttcgcagccaggagcaccgtccctccccggattagtgcgtacgagcgcccagtgccctggcccggagagtggaatgatccccgaggcccagggcgtcgtgcttccgcgcgccccgtgaaggaaactggggagtcttgagggacccccgactccaagcgcgaaaaccccggatggtgaggagcaggcaaatgtgcaataccaacatgtctgtacctactgatggtgctgtaaccacctcacagattccagcttcggaacaagagaccctggttagaccaaagccattgcttttgaagttattaaagtctgttggtgcacaaaaagacacttatactatgaaagaggttcttttttatcttggccagtatattatgactaaacgattatatgatgagaagcaacaacatattgtatattgttcaaatgatcttctaggagatttgtttggcgtgccaagcttctctgtgaaagagcacaggaaaatatataccatgatctacaggaacttggtagtagtcaatcagcaggaatcatcggactcaggtacatctgtgagtgagaacaggtgtcaccttgaaggtgggagtgatcaaaaggaccttgtacaagagcttcaggaagagaaaccttcatcttcacatttggtttctagaccatctacctcatctagaaggagagcaattagtgagacagaagaaaattcagatgaattatctggtgaacgacaaagaaaacgccacaaatctgatagtatttccctttcctttgatgaaagcctggctctgtgtgtaataagggagatatgttgtgaaagaagcagtagcagtgaatctacagggacgccatcgaatccggatcttgatgctggtgtaagtgaacattcaggtgattggttggatcaggattcagtttcagatcagtttagtgtagaatttgaagttgaatctctcgactcagaagattatagccttagtgaagaaggacaagaactctcagatgaagatgatgaggtatatcaagttactgtgtatcaggcaggggagagtgatacagattcatttgaagaagatcctgaaatttccttagctgactattggaaatgcacttcatgcaatgaaatgaatcccccccttccatcacattgcaacagatgttgggcccttcgtgagaattggcttcctgaagataaagggaaagataaaggggaaatctctgagaaagccaaactggaaaactcaacacaagctgaagagggctttgatgttcctgattgtaaaaaaactatagtgaatgattccagagagtcatgtgttgaggaaaatgatgataaaattacacaagcttcacaatcacaagaaagtgaagactattctcagccatcaacttctagtagcattatttatagcagccaagaagatgtgaaagagtttgaaagggaagaaacccaagacaaagaagagagtgtggaatctagtttgccccttaatgccattgaaccttgtgtgatttgtcaaggtcgacctaaaaatggttgcattgtccatggcaaaacaggacatcttatggcctgctttacatgtgcaaagaagctaaagaaaaggaataagccctgcccagtatgtagacaaccaattcaattatagtaagtagtcagctattccactacccaagtaagctcaattatacttaagagaa

SEQ ID NO: 420406 - DNA, 2225 bp, Homo sapiens
ggcgcgcacggaggcaccgcgcgagcttggctgcttctggggcctgtgtggccctgtgtgtcggaaagatggagcaagaagccgagcccgaggggcggccgcgacccctctgaccgagatcctgctgctttcgcagccaggagcaccgtccctccccggattagtgcgtacgagcgcccagtgccctggcccggagagtggaatgatccccgaggcccagggcgtcgtgcttccgcgcgccccgtgaaggaaactggggagtcttgagggacccccgactccaagcgcgaaaaccccggatggtgaggagcaggcaaatgtgcaataccaacatgtctgtacctactgatggtgctgtaaccacctcacagattccagcttcggaacaagagaccctggttagaccaaagccattgcttttgaagttattaaagtctgttggtgcacaaaaagacacttatactatgaaagagaatcatcggactcaggtacatctgtgagtgagaacaggtgtcaccttgaaggtgggagtgatcaaaaggaccttgtacaagagcttcaggaagagaaaccttcatcttcacatttggtttctagaccatctacctcatctagaaggagagcaattagtgagacaggactattggaaatgcacttcatgcaatgaaatgaatcccccccttccatcacattgcaacagatgttgggcccttcgtgagaattggcttcctgaagataaagggaaagataaaggggaaatctctgagaaagccaaactggaaaactcaacacaagctgaagagggctttgatgttcctgattgtaaaaaaactatagtgaatgattccagagagtcatgtgttgaggaaaatgatgataaaattacacaagcttcacaatcacaagaaagtgaagactattctcagccatcaacttctagtagcattatttatagcagccaagaagatgtgaaagagtttgaaagggaagaaacccaagacaaagaagagagtgtggaatctagtttgccccttaatgccattgaaccttgtgtgatttgtcaaggtcgacctaaaaatggttgcattgtccatggcaaaacaggacatcttatggcctgctttacatgtgcaaagaagctaaagaaaaggaataagccctgcccagtatgtagacaaccaattcaaatgattgtgctaacttatttcccctagttgacctgtctataagagaattatatatttctaactatataaccctaggaatttagacaacctgaaatttattcacatatatcaaagtgagaaaatgcctcaattcacatagatttcttctctttagtataattgacctactttggtagtggaatagtgaatacttactataatttgacttgaatatgtagctcatcctttacaccaactcctaattttaaataatttctactctgtcttaaatgagaagtacttggttttttttttcttaaatatgtatatgacatttaaatgtaacttattattttttttgagaccgagtcttgctctgttacccaggctggagtgcagtgggtgatcttggctcactgcaagctctgccctccccgggttcgcaccattctcctgcctcagcctcccaattagcttggcctacagtcatctgccaccacacctggctaattttttgtacttttagtagagacagggtttcaccgtgttagccaggatggtctcgatctcctgacctcgtgatccgcccacctcggcctcccaaagtgctgggattacaggcatgagccaccgcgtccggcctaaatgtcacttagtacctttgatataaagagaaaatgtgtgaaagatttagttttttgtttttttgtttgtttgtttgtttgtttgttttgagatgagtctctctgtcgcccaggctggagtgcagtgtcatgatctagcagtctccgcttcccgggttcaagccattctcctggctcagcctctggagcagctgggattacaggcatgcaccaccatgcccagctaatttttgtatttttagtagagatagggtttcaccatgttggccaggctggtcacgaactcctgacctcaagtgaggtcacccgcctcggcctcccgaagtgctgggattgcagatgtgagccaccatgtccagccaagaattagtatttaaattttagatactcttttttttttttttttttttttttt

SEQ ID NO: 420407 - DNA, 2141 bp, Homo sapiens
ggcgcgcacggaggcaccgcgcgagcttggctgcttctggggcctgtgtggccctgtgtgtcggaaagatggagcaagaagccgagcccgaggggcggccgcgacccctctgaccgagatcctgctgctttcgcagccaggagcaccgtccctccccggattagtgcgtacgagcgcccagtgccctggcccggagagtggaatgatccccgaggcccagggcgtcgtgcttccgcgcgccccgtgaaggaaactggggagtcttgagggacccccgactccaagcgcgaaaaccccggatggtgaggagcaggcaaatgtgcaataccaacatgtctgtacctactgatggtgctgtaaccacctcacagattccagcttcggaacaagagaccctggatcttgatgctggtgtaagtgaacattcaggtgattggttggatcaggattcagtttcagatcagtttagtgtagaatttgaagttgaatctctcgactcagaagattatagccttagtgaagaaggacaagaactctcagatgaagatgatgaggactattggaaatgcacttcatgcaatgaaatgaatcccccccttccatcacattgcaacagatgttgggcccttcgtgagaattggcttcctgaagataaagggaaagataaaggggaaatctctgagaaagccaaactggaaaactcaacacaagctgaagagggctttgatgttcctgattgtaaaaaaactatagtgaatgattccagagagtcatgtgttgaggaaaatgatgataaaattacacaagcttcacaatcacaagaaagtgaagactattctcagccatcaacttctagtagcattatttatagcagccaagaagatgtgaaagagtttgaaagggaagaaacccaagacaaagaagagagtgtggaatctagtttgccccttaatgccattgaaccttgtgtgatttgtcaaggtcgacctaaaaatggttgcattgtccatggcaaaacaggacatcttatggcctgctttacatgtgcaaagaagctaaagaaaaggaataagccctgcccagtatgtagacaaccaattcaaatgattgtgctaacttatttcccctagttgacctgtctataagagaattatatatttctaactatataaccctaggaatttagacaacctgaaatttattcacatatatcaaagtgagaaaatgcctcaattcacatagatttcttctctttagtataattgacctactttggtagtggaatagtgaatacttactataatttgacttgaatatgtagctcatcctttacaccaactcctaattttaaataatttctactctgtcttaaatgagaagtacttggttttttttttcttaaatatgtatatgacatttaaatgtaacttattattttttttgagaccgagtcttgctctgttacccaggctggagtgcagtgggtgatcttggctcactgcaagctctgccctccccgggttcgcaccattctcctgcctcagcctcccaattagcttggcctacagtcatctgccaccacacctggctaattttttgtacttttagtagagacagggtttcaccgtgttagccaggatggtctcgatctcctgacctcgtgatccgcccacctcggcctcccaaagtgctgggattacaggcatgagccaccgcgtccggcctaaatgtcacttagtacctttgatataaagagaaaatgtgtgaaagatttagttttttgtttttttgtttgtttgtttgtttgtttgttttgagatgagtctctctgtcgcccaggctggagtgcagtgtcatgatctagcagtctccgcttcccgggttcaagccattctcctggctcagcctctggagcagctgggattacaggcatgcaccaccatgcccagctaatttttgtatttttagtagagatagggtttcaccatgttggccaggctggtcacgaactcctgacctcaagtgaggtcacccgcctcggcctcccgaagtgctgggattgcagatgtgagccaccatgtccagccaagaattagtatttaaattttagatactcttttttttttttttttttttttttt

SEQ ID NO: 420408 - DNA, 2060 bp, Homo sapiens
ggcgcgcacggaggcaccgcgcgagcttggctgcttctggggcctgtgtggccctgtgtgtcggaaagatggagcaagaagccgagcccgaggggcggccgcgacccctctgaccgagatcctgctgctttcgcagccaggagcaccgtccctccccggattagtgcgtacgagcgcccagtgccctggcccggagagtggaatgatccccgaggcccagggcgtcgtgcttccgcgcgccccgtgaaggaaactggggagtcttgagggacccccgactccaagcgcgaaaaccccggatggtgaggagcaggcaaatgtgcaataccaacatgtctgtacctactgatggtgctgtaaccacctcacagattccagcttcggaacaagagaccctggttagaccaaagccattgcttttgaagttattaaagtctgttggtgcacaaaaagacacttatactatgaaagaggactattggaaatgcacttcatgcaatgaaatgaatcccccccttccatcacattgcaacagatgttgggcccttcgtgagaattggcttcctgaagataaagggaaagataaaggggaaatctctgagaaagccaaactggaaaactcaacacaagctgaagagggctttgatgttcctgattgtaaaaaaactatagtgaatgattccagagagtcatgtgttgaggaaaatgatgataaaattacacaagcttcacaatcacaagaaagtgaagactattctcagccatcaacttctagtagcattatttatagcagccaagaagatgtgaaagagtttgaaagggaagaaacccaagacaaagaagagagtgtggaatctagtttgccccttaatgccattgaaccttgtgtgatttgtcaaggtcgacctaaaaatggttgcattgtccatggcaaaacaggacatcttatggcctgctttacatgtgcaaagaagctaaagaaaaggaataagccctgcccagtatgtagacaaccaattcaaatgattgtgctaacttatttcccctagttgacctgtctataagagaattatatatttctaactatataaccctaggaatttagacaacctgaaatttattcacatatatcaaagtgagaaaatgcctcaattcacatagatttcttctctttagtataattgacctactttggtagtggaatagtgaatacttactataatttgacttgaatatgtagctcatcctttacaccaactcctaattttaaataatttctactctgtcttaaatgagaagtacttggttttttttttcttaaatatgtatatgacatttaaatgtaacttattattttttttgagaccgagtcttgctctgttacccaggctggagtgcagtgggtgatcttggctcactgcaagctctgccctccccgggttcgcaccattctcctgcctcagcctcccaattagcttggcctacagtcatctgccaccacacctggctaattttttgtacttttagtagagacagggtttcaccgtgttagccaggatggtctcgatctcctgacctcgtgatccgcccacctcggcctcccaaagtgctgggattacaggcatgagccaccgcgtccggcctaaatgtcacttagtacctttgatataaagagaaaatgtgtgaaagatttagttttttgtttttttgtttgtttgtttgtttgtttgttttgagatgagtctctctgtcgcccaggctggagtgcagtgtcatgatctagcagtctccgcttcccgggttcaagccattctcctggctcagcctctggagcagctgggattacaggcatgcaccaccatgcccagctaatttttgtatttttagtagagatagggtttcaccatgttggccaggctggtcacgaactcctgacctcaagtgaggtcacccgcctcggcctcccgaagtgctgggattgcagatgtgagccaccatgtccagccaagaattagtatttaaattttagatactcttttttttttttttttttttttttt

SEQ ID NO: 420409 - DNA, 2035 bp, Homo sapiens
ggcgcgcacggaggcaccgcgcgagcttggctgcttctggggcctgtgtggccctgtgtgtcggaaagatggagcaagaagccgagcccgaggggcggccgcgacccctctgaccgagatcctgctgctttcgcagccaggagcaccgtccctccccggattagtgcgtacgagcgcccagtgccctggcccggagagtggaatgatccccgaggcccagggcgtcgtgcttccgcgcgccccgtgaaggaaactggggagtcttgagggacccccgactccaagcgcgaaaaccccggatggtgaggagcaggcaaatgtgcaataccaacatgtctgtacctactgatggtgctgtaaccacctcacagattccagcttcggaacaagagaccctggaaaatatataccatgatctacaggaacttggtagtagtcaatcagcagggactattggaaatgcacttcatgcaatgaaatgaatcccccccttccatcacattgcaacagatgttgggcccttcgtgagaattggcttcctgaagataaagggaaagataaaggggaaatctctgagaaagccaaactggaaaactcaacacaagctgaagagggctttgatgttcctgattgtaaaaaaactatagtgaatgattccagagagtcatgtgttgaggaaaatgatgataaaattacacaagcttcacaatcacaagaaagtgaagactattctcagccatcaacttctagtagcattatttatagcagccaagaagatgtgaaagagtttgaaagggaagaaacccaagacaaagaagagagtgtggaatctagtttgccccttaatgccattgaaccttgtgtgatttgtcaaggtcgacctaaaaatggttgcattgtccatggcaaaacaggacatcttatggcctgctttacatgtgcaaagaagctaaagaaaaggaataagccctgcccagtatgtagacaaccaattcaaatgattgtgctaacttatttcccctagttgacctgtctataagagaattatatatttctaactatataaccctaggaatttagacaacctgaaatttattcacatatatcaaagtgagaaaatgcctcaattcacatagatttcttctctttagtataattgacctactttggtagtggaatagtgaatacttactataatttgacttgaatatgtagctcatcctttacaccaactcctaattttaaataatttctactctgtcttaaatgagaagtacttggttttttttttcttaaatatgtatatgacatttaaatgtaacttattattttttttgagaccgagtcttgctctgttacccaggctggagtgcagtgggtgatcttggctcactgcaagctctgccctccccgggttcgcaccattctcctgcctcagcctcccaattagcttggcctacagtcatctgccaccacacctggctaattttttgtacttttagtagagacagggtttcaccgtgttagccaggatggtctcgatctcctgacctcgtgatccgcccacctcggcctcccaaagtgctgggattacaggcatgagccaccgcgtccggcctaaatgtcacttagtacctttgatataaagagaaaatgtgtgaaagatttagttttttgtttttttgtttgtttgtttgtttgtttgttttgagatgagtctctctgtcgcccaggctggagtgcagtgtcatgatctagcagtctccgcttcccgggttcaagccattctcctggctcagcctctggagcagctgggattacaggcatgcaccaccatgcccagctaatttttgtatttttagtagagatagggtttcaccatgttggccaggctggtcacgaactcctgacctcaagtgaggtcacccgcctcggcctcccgaagtgctgggattgcagatgtgagccaccatgtccagccaagaattagtatttaaattttagatactcttttttttttttttttttttttttt

SEQ ID NO: 420410 - DNA, 2897 bp, Homo sapiens
ggcgcgcacggaggcaccgcgcgagcttggctgcttctggggcctgtgtggccctgtgtgtcggaaagatggagcaagaagccgagcccgaggggcggccgcgacccctctgaccgagatcctgctgctttcgcagccaggagcaccgtccctccccggattagtgcgtacgagcgcccagtgccctggcccggagagtggaatgatccccgaggcccagggcgtcgtgcttccgcgcgccccgtgaaggaaactggggagtcttgagggacccccgactccaagcgcgaaaaccccggatggtgaggagcaggcaaatgtgcaataccaacatgtctgtacctactgatggtgctgtaaccacctcacagattccagcttcggaacaagagaccctggttagaccaaagccattgcttttgaagttattaaagtctgttggtgcacaaaaagacacttatactatgaaagagagatggagtttcactatgttgcccaggctggtctggaactcctgggctcaagggatctgcttacctcggcctcctaaagtgctagatttacaggttcttttttatcttggccagtatattatgactaaacgattatatgatgagaagcaacaacatattgtatattgttcaaatgatcttctaggagatttgtttggcgtgccaagcttctctgtgaaagagcacaggaaaatatataccatgatctacaggaacttggtagtagtcaatcagcaggaatcatcggactcaggtacatctgtgagtgagaacaggtgtcaccttgaaggtgggagtgatcaaaaggaccttgtacaagagcttcaggaagagaaaccttcatcttcacatttggtttctagaccatctacctcatctagaaggagagcaattagtgagacagaagaaaattcagatgaattatctggtgaacgacaaagaaaacgccacaaatctgatagtatttccctttcctttgatgaaagcctggctctgtgtgtaataagggagatatgttgtgaaagaagcagtagcagtgaatctacagggacgccatcgaatccggatcttgatgctggtgtaagtgaacattcaggtgattggttggatcaggattcagtttcagatcagtttagtgtagaatttgaagttgaatctctcgactcagaagattatagccttagtgaagaaggacaagaactctcagatgaagatgatgaggtatatcaagttactgtgtatcaggcaggggagagtgatacagattcatttgaagaagatcctgaaatttccttagctgactattggaaatgcacttcatgcaatgaaatgaatcccccccttccatcacattgcaacagatgttgggcccttcgtgagaattggcttcctgaagataaagggaaagataaaggggaaatctctgagaaagccaaactggaaaactcaacacaagctgaagagggctttgatgttcctgattgtaaaaaaactatagtgaatgattccagagagtcatgtgttgaggaaaatgatgataaaattacacaagcttcacaatcacaagaaagtgaagactattctcagccatcaacttctagtagcattatttatagcagccaagaagatgtgaaagagtttgaaagggaagaaacccaagacaaagaagagagtgtggaatctagtttgccccttaatgccattgaaccttgtgtgatttgtcaaggtcgacctaaaaatggttgcattgtccatggcaaaacaggacatcttatggcctgctttacatgtgcaaagaagctaaagaaaaggaataagccctgcccagtatgtagacaaccaattcaaatgattgtgctaacttatttcccctagttgacctgtctataagagaattatatatttctaactatataaccctaggaatttagacaacctgaaatttattcacatatatcaaagtgagaaaatgcctcaattcacatagatttcttctctttagtataattgacctactttggtagtggaatagtgaatacttactataatttgacttgaatatgtagctcatcctttacaccaactcctaattttaaataatttctactctgtcttaaatgagaagtacttggttttttttttcttaaatatgtatatgacatttaaatgtaacttattattttttttgagaccgagtcttgctctgttacccaggctggagtgcagtgggtgatcttggctcactgcaagctctgccctccccgggttcgcaccattctcctgcctcagcctcccaattagcttggcctacagtcatctgccaccacacctggctaattttttgtacttttagtagagacagggtttcaccgtgttagccaggatggtctcgatctcctgacctcgtgatccgcccacctcggcctcccaaagtgctgggattacaggcatgagccaccgcgtccggcctaaatgtcacttagtacctttgatataaagagaaaatgtgtgaaagatttagttttttgtttttttgtttgtttgtttgtttgtttgttttgagatgagtctctctgtcgcccaggctggagtgcagtgtcatgatctagcagtctccgcttcccgggttcaagccattctcctggctcagcctctggagcagctgggattacaggcatgcaccaccatgcccagctaatttttgtatttttagtagagatagggtttcaccatgttggccaggctggtcacgaactcctgacctcaagtgaggtcacccgcctcggcctcccgaagtgctgggattgcagatgtgagccaccatgtccagccaagaattagtatttaaattttagatactcttttttttttttttttttttttttt

SEQ ID NO: 420411 - DNA, 2711 bp, Homo sapiens
tctagcaggatctgagtcatataagcggatcccgaggccaggcgtcgtgcttccgcgcgccccgtgaaggaaactggggagtcttgagggacccccgactccaagcgcgaaaaccccggatggtgaggagcaggcaaatgtgcaataccaacatgtctgtacctactgatggtgctgtaaccacctcacagattccagcttcggaacaagagaccctggttagaccaaagccattgcttttgaagttattaaagtctgttggtgcacaaaaagacacttatactatgaaagaggacttcttgggcatccctggatcccaggttaagaacttctgcactagagatacatgagtacagtatactgatctttctgggatagaggttcttttttatcttggccagtatattatgactaaacgattatatgatgagaagcaacaacatattgtatattgttcaaatgatcttctaggagatttgtttggcgtgccaagcttctctgtgaaagagcacaggaaaatatataccatgatctacaggaacttggtagtagtcaatcagcaggaatcatcggactcaggtacatctgtgagtgagaacaggtgtcaccttgaaggtgggagtgatcaaaaggaccttgtacaagagcttcaggaagagaaaccttcatcttcacatttggtttctagaccatctacctcatctagaaggagagcaattagtgagacagaagaaaattcagatgaattatctggtgaacgacaaagaaaacgccacaaatctgatagtatttccctttcctttgatgaaagcctggctctgtgtgtaataagggagatatgttgtgaaagaagcagtagcagtgaatctacagggacgccatcgaatccggatcttgatgctggtgtaagtgaacattcaggtgattggttggatcaggattcagtttcagatcagtttagtgtagaatttgaagttgaatctctcgactcagaagattatagccttagtgaagaaggacaagaactctcagatgaagatgatgaggtatatcaagttactgtgtatcaggcaggggagagtgatacagattcatttgaagaagatcctgaaatttccttagctgactattggaaatgcacttcatgcaatgaaatgaatcccccccttccatcacattgcaacagatgttgggcccttcgtgagaattggcttcctgaagataaagggaaagataaaggggaaatctctgagaaagccaaactggaaaactcaacacaagctgaagagggctttgatgttcctgattgtaaaaaaactatagtgaatgattccagagagtcatgtgttgaggaaaatgatgataaaattacacaagcttcacaatcacaagaaagtgaagactattctcagccatcaacttctagtagcattatttatagcagccaagaagatgtgaaagagtttgaaagggaagaaacccaagacaaagaagagagtgtggaatctagtttgccccttaatgccattgaaccttgtgtgatttgtcaaggtcgacctaaaaatggttgcattgtccatggcaaaacaggacatcttatggcctgctttacatgtgcaaagaagctaaagaaaaggaataagccctgcccagtatgtagacaaccaattcaaatgattgtgctaacttatttcccctagttgacctgtctataagagaattatatatttctaactatataaccctaggaatttagacaacctgaaatttattcacatatatcaaagtgagaaaatgcctcaattcacatagatttcttctctttagtataattgacctactttggtagtggaatagtgaatacttactataatttgacttgaatatgtagctcatcctttacaccaactcctaattttaaataatttctactctgtcttaaatgagaagtacttggttttttttttcttaaatatgtatatgacatttaaatgtaacttattattttttttgagaccgagtcttgctctgttacccaggctggagtgcagtgggtgatcttggctcactgcaagctctgccctccccgggttcgcaccattctcctgcctcagcctcccaattagcttggcctacagtcatctgccaccacacctggctaattttttgtacttttagtagagacagggtttcaccgtgttagccaggatggtctcgatctcctgacctcgtgatccgcccacctcggcctcccaaagtgctgggattacaggcatgagccaccgcgtccggcctaaatgtcacttagtacctttgatataaagagaaaatgtgtgaaagatttagttttttgtttttttgtttgtttgtttgtttgtttgttttgagatgagtctctctgtcgcccaggctggagtgcagtgtcatgatctagcagtctccgcttcccgggttcaagccattctcctggctcagcctctggagcagctgggattacaggcatgcaccaccatgcccagctaatttttgtatttttagtagagatagggtttcaccatgttggccaggctggtcacgaactcctgacctcaagtgaggtcacccgcctcggcctcccgaagtgctgggattgcagatgtgagccaccatgtccagccaagaattagtatttaaattttagatactcttttttttttttttttttttttttt

SEQ ID NO: 420412 - DNA, 1804 bp, Homo sapiens
ggcgcgcacggaggcaccgcgcgagcttggctgcttctggggcctgtgtggccctgtgtgtcggaaagatggagcaagaagccgagcccgaggggcggccgcgacccctctgaccgagatcctgctgctttcgcagccaggagcaccgtccctccccggattagtgcgtacgagcgcccagtgccctggcccggagagtggaatgatccccgaggcccagggcgtcgtgcttccgcgcgccccgtgaaggaaactggggagtcttgagggacccccgactccaagcgcgaaaaccccggatggtgaggagcaggcaaatgtgcaataccaacatgtctgtacctactgatggtgctgtaaccacctcacagattccagcttcggaacaagagaccctgattgtaaaaaaactatagtgaatgattccagagagtcatgtgttgaggaaaatgatgataaaattacacaagcttcacaatcacaagaaagtgaagactattctcagccatcaacttctagtagcattatttatagcagccaagaagatgtgaaagagtttgaaagggaagaaacccaagacaaagaagagagtgtggaatctagtttgccccttaatgccattgaaccttgtgtgatttgtcaaggtcgacctaaaaatggttgcattgtccatggcaaaacaggacatcttatggcctgctttacatgtgcaaagaagctaaagaaaaggaataagccctgcccagtatgtagacaaccaattcaaatgattgtgctaacttatttcccctagttgacctgtctataagagaattatatatttctaactatataaccctaggaatttagacaacctgaaatttattcacatatatcaaagtgagaaaatgcctcaattcacatagatttcttctctttagtataattgacctactttggtagtggaatagtgaatacttactataatttgacttgaatatgtagctcatcctttacaccaactcctaattttaaataatttctactctgtcttaaatgagaagtacttggttttttttttcttaaatatgtatatgacatttaaatgtaacttattattttttttgagaccgagtcttgctctgttacccaggctggagtgcagtgggtgatcttggctcactgcaagctctgccctccccgggttcgcaccattctcctgcctcagcctcccaattagcttggcctacagtcatctgccaccacacctggctaattttttgtacttttagtagagacagggtttcaccgtgttagccaggatggtctcgatctcctgacctcgtgatccgcccacctcggcctcccaaagtgctgggattacaggcatgagccaccgcgtccggcctaaatgtcacttagtacctttgatataaagagaaaatgtgtgaaagatttagttttttgtttttttgtttgtttgtttgtttgtttgttttgagatgagtctctctgtcgcccaggctggagtgcagtgtcatgatctagcagtctccgcttcccgggttcaagccattctcctggctcagcctctggagcagctgggattacaggcatgcaccaccatgcccagctaatttttgtatttttagtagagatagggtttcaccatgttggccaggctggtcacgaactcctgacctcaagtgaggtcacccgcctcggcctcccgaagtgctgggattgcagatgtgagccaccatgtccagccaagaattagtatttaaattttagatactcttttttttttttttttttttttttt

SEQ ID NO: 420413 - DNA, 2670 bp, Homo sapiens
ggcgcgcacggaggcaccgcgcgagcttggctgcttctggggcctgtgtggccctgtgtgtcggaaagatggagcaagaagccgagcccgaggggcggccgcgacccctctgaccgagatcctgctgctttcgcagccaggagcaccgtccctccccggattagtgcgtacgagcgcccagtgccctggcccggagagtggaatgatccccgaggcccagggcgtcgtgcttccgcgcgccccgtgaaggaaactggggagtcttgagggacccccgactccaagcgcgaaaaccccggatggtgaggagcaggcaaatgtgcaataccaacatgtctgtacctactgatggtgctgtaaccacctcacagattccagcttcggaacaagagaccctggttagaccaaagccattgcttttgaagttattaaagtctgttggtgcacaaaaagacacttatactatgaaagaggaaaatatataccatgatctacaggaacttggtagtagtcaatcagcaggaatcatcggactcaggtacatctgtgagtgagaacaggtgtcaccttgaaggtgggagtgatcaaaaggaccttgtacaagagcttcaggaagagaaaccttcatcttcacatttggtttctagaccatctacctcatctagaaggagagcaattagtgagacagaagaaaattcagatgaattatctggtgaacgacaaagaaaacgccacaaatctgatagtatttccctttcctttgatgaaagcctggctctgtgtgtaataagggagatatgttgtgaaagaagcagtagcagtgaatctacagggacgccatcgaatccggatcttgatgctggtgtaagtgaacattcaggtgattggttggatcaggattcagtttcagatcagtttagtgtagaatttgaagttgaatctctcgactcagaagattatagccttagtgaagaaggacaagaactctcagatgaagatgatgaggtatatcaagttactgtgtatcaggcaggggagagtgatacagattcatttgaagaagatcctgaaatttccttagctgactattggaaatgcacttcatgcaatgaaatgaatcccccccttccatcacattgcaacagatgttgggcccttcgtgagaattggcttcctgaagataaagggaaagataaaggggaaatctctgagaaagccaaactggaaaactcaacacaagctgaagagggctttgatgttcctgattgtaaaaaaactatagtgaatgattccagagagtcatgtgttgaggaaaatgatgataaaattacacaagcttcacaatcacaagaaagtgaagactattctcagccatcaacttctagtagcattatttatagcagccaagaagatgtgaaagagtttgaaagggaagaaacccaagacaaagaagagagtgtggaatctagtttgccccttaatgccattgaaccttgtgtgatttgtcaaggtcgacctaaaaatggttgcattgtccatggcaaaacaggacatcttatggcctgctttacatgtgcaaagaagctaaagaaaaggaataagccctgcccagtatgtagacaaccaattcaaatgattgtgctaacttatttcccctagttgacctgtctataagagaattatatatttctaactatataaccctaggaatttagacaacctgaaatttattcacatatatcaaagtgagaaaatgcctcaattcacatagatttcttctctttagtataattgacctactttggtagtggaatagtgaatacttactataatttgacttgaatatgtagctcatcctttacaccaactcctaattttaaataatttctactctgtcttaaatgagaagtacttggttttttttttcttaaatatgtatatgacatttaaatgtaacttattattttttttgagaccgagtcttgctctgttacccaggctggagtgcagtgggtgatcttggctcactgcaagctctgccctccccgggttcgcaccattctcctgcctcagcctcccaattagcttggcctacagtcatctgccaccacacctggctaattttttgtacttttagtagagacagggtttcaccgtgttagccaggatggtctcgatctcctgacctcgtgatccgcccacctcggcctcccaaagtgctgggattacaggcatgagccaccgcgtccggcctaaatgtcacttagtacctttgatataaagagaaaatgtgtgaaagatttagttttttgtttttttgtttgtttgtttgtttgtttgttttgagatgagtctctctgtcgcccaggctggagtgcagtgtcatgatctagcagtctccgcttcccgggttcaagccattctcctggctcagcctctggagcagctgggattacaggcatgcaccaccatgcccagctaatttttgtatttttagtagagatagggtttcaccatgttggccaggctggtcacgaactcctgacctcaagtgaggtcacccgcctcggcctcccgaagtgctgggattgcagatgtgagccaccatgtccagccaagaattagtatttaaattttagatactcttttttttttttttttttttttttt

SEQ ID NO: 420414 - DNA, 1806 bp, Homo sapiens
ggcgcgcacggaggcaccgcgcgagcttggctgcttctggggcctgtgtggccctgtgtgtcggaaagatggagcaagaagccgagcccgaggggcggccgcgacccctctgaccgagatcctgctgctttcgcagccaggagcaccgtccctccccggattagtgcgtacgagcgcccagtgccctggcccggagagtggaatgatccccgaggcccagggcgtcgtgcttccgcgcgccccgtgaaggaaactggggagtcttgagggacccccgactccaagcgcgaaaaccccggatggtgaggagcaggcaaatgtgcaataccaacatgtctgtacctactgatggtgctgtaaccacctcacagattccagcttcggaacaagagaccctggttagaccaaagccattgcttttgaagttattaaagtctgttggtgcacaaaaagacacttatactatgaaagaggatcttgatgctggtgtaagtgaacattcaggtgattggttggatcaggattcagtttcagatcagtttagtgtagaatttgaagttgaatctctcgactcagaagattatagccttagtgaagaaggacaagaactctcagatgaagatgatgaggtatatcaagttactgtgtatcaggcaggggagagtgatacagattcatttgaagaagatcctgaaatttccttagctatgtgcaaagaagctaaagaaaaggaataagccctgcccagtatgtagacaaccaattcaaatgattgtgctaacttatttcccctagttgacctgtctataagagaattatatatttctaactatataaccctaggaatttagacaacctgaaatttattcacatatatcaaagtgagaaaatgcctcaattcacatagatttcttctctttagtataattgacctactttggtagtggaatagtgaatacttactataatttgacttgaatatgtagctcatcctttacaccaactcctaattttaaataatttctactctgtcttaaatgagaagtacttggttttttttttcttaaatatgtatatgacatttaaatgtaacttattattttttttgagaccgagtcttgctctgttacccaggctggagtgcagtgggtgatcttggctcactgcaagctctgccctccccgggttcgcaccattctcctgcctcagcctcccaattagcttggcctacagtcatctgccaccacacctggctaattttttgtacttttagtagagacagggtttcaccgtgttagccaggatggtctcgatctcctgacctcgtgatccgcccacctcggcctcccaaagtgctgggattacaggcatgagccaccgcgtccggcctaaatgtcacttagtacctttgatataaagagaaaatgtgtgaaagatttagttttttgtttttttgtttgtttgtttgtttgtttgttttgagatgagtctctctgtcgcccaggctggagtgcagtgtcatgatctagcagtctccgcttcccgggttcaagccattctcctggctcagcctctggagcagctgggattacaggcatgcaccaccatgcccagctaatttttgtatttttagtagagatagggtttcaccatgttggccaggctggtcacgaactcctgacctcaagtgaggtcacccgcctcggcctcccgaagtgctgggattgcagatgtgagccaccatgtccagccaagaattagtatttaaattttagatactcttttttttttttttttttttttttt

SEQ ID NO: 420415 - DNA, 2446 bp, Homo sapiens
tatttacatctgcaacatttagtatgaggatgccacctggaaaatacatgtttaatgtttattgaaaggttaaattgcataagggtttgtgttagactgatagcatatctactgagtagcgccccgccgccccccgcccaccaccaagtttctgatcctttttcttttctctcagaatcatcggactcaggtacatctgtgagtgagaacaggtgtcaccttgaaggtgggagtgatcaaaaggtaatctaagtaaatttctcattctaatgtaatattatttgcaaattggaaaggttatttacaacaagttagcttactggttatgttaagtttgttgtattttatttttttcctaaatgcttaggaccttgtacaagagcttcaggaagagaaaccttcatcttcacatttggtttctagaccatctacctcatctagaaggagagcaattagtgagacagaagaaaattcagatgaattatctggtgaacgacaaagaaaacgccacaaatctgatagtatttccctttcctttgatgaaagcctggctctgtgtgtaataagggagatatgttgtgaaagaagcagtagcagtgaatctacagggacgccatcgaatccggatcttgatgctggtgtaagtgaacattcaggtgattggttggatcaggattcagtttcagatcagtttagtgtagaatttgaagttgaatctctcgactcagaagattatagccttagtgaagaaggacaagaactctcagatgaagatgatgaggtatatcaagttactgtgtatcaggcaggggagagtgatacagattcatttgaagaagatcctgaaatttccttagctgactattggaaatgcacttcatgcaatgaaatgaatcccccccttccatcacattgcaacagatgttgggcccttcgtgagaattggcttcctgaagataaagggaaagataaaggggaaatctctgagaaagccaaactggaaaactcaacacaagctgaagagggctttgatgttcctgattgtaaaaaaactatagtgaatgattccagagagtcatgtgttgaggaaaatgatgataaaattacacaagcttcacaatcacaagaaagtgaagactattctcagccatcaacttctagtagcattatttatagcagccaagaagatgtgaaagagtttgaaagggaagaaacccaagacaaagaagagagtgtggaatctagtttgccccttaatgccattgaaccttgtgtgatttgtcaaggtcgacctaaaaatggttgcattgtccatggcaaaacaggacatcttatggcctgctttacatgtgcaaagaagctaaagaaaaggaataagccctgcccagtatgtagacaaccaattcaaatgattgtgctaacttatttcccctagttgacctgtctataagagaattatatatttctaactatataaccctaggaatttagacaacctgaaatttattcacatatatcaaagtgagaaaatgcctcaattcacatagatttcttctctttagtataattgacctactttggtagtggaatagtgaatacttactataatttgacttgaatatgtagctcatcctttacaccaactcctaattttaaataatttctactctgtcttaaatgagaagtacttggttttttttttcttaaatatgtatatgacatttaaatgtaacttattattttttttgagaccgagtcttgctctgttacccaggctggagtgcagtgggtgatcttggctcactgcaagctctgccctccccgggttcgcaccattctcctgcctcagcctcccaattagcttggcctacagtcatctgccaccacacctggctaattttttgtacttttagtagagacagggtttcaccgtgttagccaggatggtctcgatctcctgacctcgtgatccgcccacctcggcctcccaaagtgctgggattacaggcatgagccaccgcgtccggcctaaatgtcacttagtacctttgatataaagagaaaatgtgtgaaagatttagttttttgtttttttgtttgtttgtttgtttgtttgttttgagatgagtctctctgtcgcccaggctggagtgcagtgtcatgatctagcagtctccgcttcccgggttcaagccattctcctggctcagcctctggagcagctgggattacaggcatgcaccaccatgcccagctaatttttgtatttttagtagagatagggtttcaccatgttggccaggctggtcacgaactcctgacctcaagtgaggtcacccgcctcggcctcccgaagtgctgggattgcagatgtgagccaccatgtccagccaagaattagtatttaaattttagatactcttttttttttttttttttttttttt

SEQ ID NO: 420416 - DNA, 1713 bp, Homo sapiens
ggcgcgcacggaggcaccgcgcgagcttggctgcttctggggcctgtgtggccctgtgtgtcggaaagatggagcaagaagccgagcccgaggggcggccgcgacccctctgaccgagatcctgctgctttcgcagccaggagcaccgtccctccccggattagtgcgtacgagcgcccagtgccctggcccggagagtggaatgatccccgaggcccagggcgtcgtgcttccgcgcgccccgtgaaggaaactggggagtcttgagggacccccgactccaagcgcgaaaaccccggatggtgaggagcaggcaaatgtgcaataccaacatgtctgtacctactgatggtgctgtaaccacctcacagattccagcttcggaacaagagaccctggttagaccaaagccattgcttttgaagttattaaagtctgttggtgcacaaaaagacacttatactatgaaagagggaagaaacccaagacaaagaagagagtgtggaatctagtttgccccttaatgccattgaaccttgtgtgatttgtcaaggtcgacctaaaaatggttgcattgtccatggcaaaacaggacatcttatggcctgctttacatgtgcaaagaagctaaagaaaaggaataagccctgcccagtatgtagacaaccaattcaaatgattgtgctaacttatttcccctagttgacctgtctataagagaattatatatttctaactatataaccctaggaatttagacaacctgaaatttattcacatatatcaaagtgagaaaatgcctcaattcacatagatttcttctctttagtataattgacctactttggtagtggaatagtgaatacttactataatttgacttgaatatgtagctcatcctttacaccaactcctaattttaaataatttctactctgtcttaaatgagaagtacttggttttttttttcttaaatatgtatatgacatttaaatgtaacttattattttttttgagaccgagtcttgctctgttacccaggctggagtgcagtgggtgatcttggctcactgcaagctctgccctccccgggttcgcaccattctcctgcctcagcctcccaattagcttggcctacagtcatctgccaccacacctggctaattttttgtacttttagtagagacagggtttcaccgtgttagccaggatggtctcgatctcctgacctcgtgatccgcccacctcggcctcccaaagtgctgggattacaggcatgagccaccgcgtccggcctaaatgtcacttagtacctttgatataaagagaaaatgtgtgaaagatttagttttttgtttttttgtttgtttgtttgtttgtttgttttgagatgagtctctctgtcgcccaggctggagtgcagtgtcatgatctagcagtctccgcttcccgggttcaagccattctcctggctcagcctctggagcagctgggattacaggcatgcaccaccatgcccagctaatttttgtatttttagtagagatagggtttcaccatgttggccaggctggtcacgaactcctgacctcaagtgaggtcacccgcctcggcctcccgaagtgctgggattgcagatgtgagccaccatgtccagccaagaattagtatttaaattttagatactcttttttttttttttttttttttttt

SEQ ID NO: 420417 - DNA, 1638 bp, Homo sapiens
ggcgcgcacggaggcaccgcgcgagcttggctgcttctggggcctgtgtggccctgtgtgtcggaaagatggagcaagaagccgagcccgaggggcggccgcgacccctctgaccgagatcctgctgctttcgcagccaggagcaccgtccctccccggattagtgcgtacgagcgcccagtgccctggcccggagagtggaatgatccccgaggcccagggcgtcgtgcttccgcgcgccccgtgaaggaaactggggagtcttgagggacccccgactccaagcgcgaaaaccccggatggtgaggagcaggcaaatgtgcaataccaacatgtctgtacctactgatggtgctgtaaccacctcacagattccagcttcggaacaagagaccctgggaagaaacccaagacaaagaagagagtgtggaatctagtttgccccttaatgccattgaaccttgtgtgatttgtcaaggtcgacctaaaaatggttgcattgtccatggcaaaacaggacatcttatggcctgctttacatgtgcaaagaagctaaagaaaaggaataagccctgcccagtatgtagacaaccaattcaaatgattgtgctaacttatttcccctagttgacctgtctataagagaattatatatttctaactatataaccctaggaatttagacaacctgaaatttattcacatatatcaaagtgagaaaatgcctcaattcacatagatttcttctctttagtataattgacctactttggtagtggaatagtgaatacttactataatttgacttgaatatgtagctcatcctttacaccaactcctaattttaaataatttctactctgtcttaaatgagaagtacttggttttttttttcttaaatatgtatatgacatttaaatgtaacttattattttttttgagaccgagtcttgctctgttacccaggctggagtgcagtgggtgatcttggctcactgcaagctctgccctccccgggttcgcaccattctcctgcctcagcctcccaattagcttggcctacagtcatctgccaccacacctggctaattttttgtacttttagtagagacagggtttcaccgtgttagccaggatggtctcgatctcctgacctcgtgatccgcccacctcggcctcccaaagtgctgggattacaggcatgagccaccgcgtccggcctaaatgtcacttagtacctttgatataaagagaaaatgtgtgaaagatttagttttttgtttttttgtttgtttgtttgtttgtttgttttgagatgagtctctctgtcgcccaggctggagtgcagtgtcatgatctagcagtctccgcttcccgggttcaagccattctcctggctcagcctctggagcagctgggattacaggcatgcaccaccatgcccagctaatttttgtatttttagtagagatagggtttcaccatgttggccaggctggtcacgaactcctgacctcaagtgaggtcacccgcctcggcctcccgaagtgctgggattgcagatgtgagccaccatgtccagccaagaattagtatttaaattttagatactcttttttttttttttttttttttttt

SEQ ID NO: 420418 - DNA, 1618 bp, Homo sapiens
ggcgcgcacggaggcaccgcgcgagcttggctgcttctggggcctgtgtggccctgtgtgtcggaaagatggagcaagaagccgagcccgaggggcggccgcgacccctctgaccgagatcctgctgctttcgcagccaggagcaccgtccctccccggattagtgcgtacgagcgcccagtgccctggcccggagagtggaatgatccccgaggcccagggcgtcgtgcttccgcgcgccccgtgaaggaaactggggagtcttgagggacccccgactccaagcgcgaaaaccccggatggtgaggagcaggcaaatgtgcaataccaacatgtctgtacctactgatggtgctgtaaccacctcacagattccagcttcggaacaagagaccctggttagaccaaagccattgcttttgaagttattaaagtctgttggtgcacaaaaagacacttatactatgaaagaggttgcattgtccatggcaaaacaggacatcttatggcctgctttacatgtgcaaagaagctaaagaaaaggaataagccctgcccagtatgtagacaaccaattcaaatgattgtgctaacttatttcccctagttgacctgtctataagagaattatatatttctaactatataaccctaggaatttagacaacctgaaatttattcacatatatcaaagtgagaaaatgcctcaattcacatagatttcttctctttagtataattgacctactttggtagtggaatagtgaatacttactataatttgacttgaatatgtagctcatcctttacaccaactcctaattttaaataatttctactctgtcttaaatgagaagtacttggttttttttttcttaaatatgtatatgacatttaaatgtaacttattattttttttgagaccgagtcttgctctgttacccaggctggagtgcagtgggtgatcttggctcactgcaagctctgccctccccgggttcgcaccattctcctgcctcagcctcccaattagcttggcctacagtcatctgccaccacacctggctaattttttgtacttttagtagagacagggtttcaccgtgttagccaggatggtctcgatctcctgacctcgtgatccgcccacctcggcctcccaaagtgctgggattacaggcatgagccaccgcgtccggcctaaatgtcacttagtacctttgatataaagagaaaatgtgtgaaagatttagttttttgtttttttgtttgtttgtttgtttgtttgttttgagatgagtctctctgtcgcccaggctggagtgcagtgtcatgatctagcagtctccgcttcccgggttcaagccattctcctggctcagcctctggagcagctgggattacaggcatgcaccaccatgcccagctaatttttgtatttttagtagagatagggtttcaccatgttggccaggctggtcacgaactcctgacctcaagtgaggtcacccgcctcggcctcccgaagtgctgggattgcagatgtgagccaccatgtccagccaagaattagtatttaaattttagatactcttttttttttttttttttttttttt

SEQ ID NO: 420419 - DNA, 1548 bp, Homo sapiens
ggcgcgcacggaggcaccgcgcgagcttggctgcttctggggcctgtgtggccctgtgtgtcggaaagatggagcaagaagccgagcccgaggggcggccgcgacccctctgaccgagatcctgctgctttcgcagccaggagcaccgtccctccccggattagtgcgtacgagcgcccagtgccctggcccggagagtggaatgatccccgaggcccagggcgtcgtgcttccgcgcgccccgtgaaggaaactggggagtcttgagggacccccgactccaagcgcgaaaaccccggatggtgaggagcaggcaaatgtgcaataccaacatgtctgtacctactgatggtgctgtaaccacctcacagattccagcttcggaacaagagaccctggttagaccaaagccattgcttttgaagttattaaagtctgttggtgcacaaaaagacacttatactatgaaagaggaataagccctgcccagtatgtagacaaccaattcaaatgattgtgctaacttatttcccctagttgacctgtctataagagaattatatatttctaactatataaccctaggaatttagacaacctgaaatttattcacatatatcaaagtgagaaaatgcctcaattcacatagatttcttctctttagtataattgacctactttggtagtggaatagtgaatacttactataatttgacttgaatatgtagctcatcctttacaccaactcctaattttaaataatttctactctgtcttaaatgagaagtacttggttttttttttcttaaatatgtatatgacatttaaatgtaacttattattttttttgagaccgagtcttgctctgttacccaggctggagtgcagtgggtgatcttggctcactgcaagctctgccctccccgggttcgcaccattctcctgcctcagcctcccaattagcttggcctacagtcatctgccaccacacctggctaattttttgtacttttagtagagacagggtttcaccgtgttagccaggatggtctcgatctcctgacctcgtgatccgcccacctcggcctcccaaagtgctgggattacaggcatgagccaccgcgtccggcctaaatgtcacttagtacctttgatataaagagaaaatgtgtgaaagatttagttttttgtttttttgtttgtttgtttgtttgtttgttttgagatgagtctctctgtcgcccaggctggagtgcagtgtcatgatctagcagtctccgcttcccgggttcaagccattctcctggctcagcctctggagcagctgggattacaggcatgcaccaccatgcccagctaatttttgtatttttagtagagatagggtttcaccatgttggccaggctggtcacgaactcctgacctcaagtgaggtcacccgcctcggcctcccgaagtgctgggattgcagatgtgagccaccatgtccagccaagaattagtatttaaattttagatactcttttttttttttttttttttttttt

SEQ ID NO: 420420 - DNA, 776 bp, Homo sapiens
atagtcctcatgctgtttacagtgactattttatataaaacatgaaacactgaatattgagccctatgatatactttaccttagacatagcaaagttgctagcattcctgtgactgagcagttaaagggttacagaaactgactgtgtgtcttatttcattgaaggactattggaaatgcacttcatgcaatgaaatgaatcccccccttccatcacattgcaacagatgttgggcccttcgtgagaattggcttcctgaagataaagggaaagataaaggggaaatctctgagaaagccaaactggaaaactcaacacaagctgaagagggctttgatgttcctgattgtaaaaaaactatagtgaatgattccagagagtcatgtgttgaggaaaatgatgataaaattacacaagcttcacaatcacaagaaagtgaagactattctcagccatcaacttctagtagcattatttatagcagccaagaagatgtgaaagagtttgaaagggaagaaacccaagacaaagaagagagtgtggaatctagtttgccccttaatgccattgaaccttgtgtgatttgtcaaggtcgacctaaaaatggttgcattgtccatggcaaaacaggacatcttatggcctgctttacatgtgcaaagaagctaaagaaaaggaataagccctgcccagtatgtagacaaccaattcaaatgattgtgctaacttatttcccctagttgacctgtctataagagaattatatatttctaac

SEQ ID NO: 420421 - DNA, 527 bp, Homo sapiens
cggccgcgacccctctgaccgagatcctgctgctttcgcagccaggagcaccgtccctccccggattagtgcgtacgagcgcccagtgccctggcccggagagtggaatgatccccgaggcccagggcgtcgtgcttccgcgcgccccgtgaaggaaactggggagtcttgagggacccccgactccaagcgcgaaaaccccggatggtgaggagcaggtactggcccggcagcgagcggtcacttttgggtctgggctctgacggtgtcccctctatcgctggttcccagcctctgcccgttcgcagcctttgtgcggttcgtggctgggggctcggggcgcggggcgcggggcatggggcacgtggctttgcggaggttttgttggactggggctaggcagtcgccgccagggaggagggcgggatttcggacggctctcgcggcggtgggggtgggggtggttcggaggtctccgcgggagttcagggtaaaggtcacgggggccgggggctgcggggccgctt

SEQ ID NO: 420422 - DNA, 2804 bp, Homo sapiens
ggcgcgcacggaggcaccgcgcgagcttggctgcttctggggcctgtgtggccctgtgtgtcggaaagatggagcaagaagccgagcccgaggggcggccgcgacccctctgaccgagatcctgctgctttcgcagccaggagcaccgtccctccccggattagtgcgtacgagcgcccagtgccctggcccggagagtggaatgatccccgaggcccagggcgtcgtgcttccgcgcgccccgtgaaggaaactggggagtcttgagggacccccgactccaagcgcgaaaaccccggatggtgaggagcaggcaaatgtgcaataccaacatgtctgtacctactgatggtgctgtaaccacctcacagattccagcttcggaacaagagaccctggttagaccaaagccattgcttttgaagttattaaagtctgttggtgcacaaaaagacacttatactatgaaagaggttcttttttatcttggccagtatattatgactaaacgattatatgatgagaagcaacaacatattgtatattgttcaaatgatcttctaggagatttgtttggcgtgccaagcttctctgtgaaagagcacaggaaaatatataccatgatctacaggaacttggtagtagtcaatcagcaggaatcatcggactcaggtacatctgtgagtgagaacaggtgtcaccttgaaggtgggagtgatcaaaaggaccttgtacaagagcttcaggaagagaaaccttcatcttcacatttggtttctagaccatctacctcatctagaaggagagcaattagtgagacagaagaaaattcagatgaattatctggtgaacgacaaagaaaacgccacaaatctgatagtatttccctttcctttgatgaaagcctggctctgtgtgtaataagggagatatgttgtgaaagaagcagtagcagtgaatctacagggacgccatcgaatccggatcttgatgctggtgtaagtgaacattcaggtgattggttggatcaggattcagtttcagatcagtttagtgtagaatttgaagttgaatctctcgactcagaagattatagccttagtgaagaaggacaagaactctcagatgaagatgatgaggtatatcaagttactgtgtatcaggcaggggagagtgatacagattcatttgaagaagatcctgaaatttccttagctgactattggaaatgcacttcatgcaatgaaatgaatcccccccttccatcacattgcaacagatgttgggcccttcgtgagaattggcttcctgaagataaagggaaagataaaggggaaatctctgagaaagccaaactggaaaactcaacacaagctgaagagggctttgatgttcctgattgtaaaaaaactatagtgaatgattccagagagtcatgtgttgaggaaaatgatgataaaattacacaagcttcacaatcacaagaaagtgaagactattctcagccatcaacttctagtagcattatttatagcagccaagaagatgtgaaagagtttgaaagggaagaaacccaagacaaagaagagagtgtggaatctagtttgccccttaatgccattgaaccttgtgtgatttgtcaaggtcgacctaaaaatggttgcattgtccatggcaaaacaggacatcttatggcctgctttacatgtgcaaagaagctaaagaaaaggaataagccctgcccagtatgtagacaaccaattcaaatgattgtgctaacttatttcccctagttgacctgtctataagagaattatatatttctaactatataaccctaggaatttagacaacctgaaatttattcacatatatcaaagtgagaaaatgcctcaattcacatagatttcttctctttagtataattgacctactttggtagtggaatagtgaatacttactataatttgacttgaatatgtagctcatcctttacaccaactcctaattttaaataatttctactctgtcttaaatgagaagtacttggttttttttttcttaaatatgtatatgacatttaaatgtaacttattattttttttgagaccgagtcttgctctgttacccaggctggagtgcagtgggtgatcttggctcactgcaagctctgccctccccgggttcgcaccattctcctgcctcagcctcccaattagcttggcctacagtcatctgccaccacacctggctaattttttgtacttttagtagagacagggtttcaccgtgttagccaggatggtctcgatctcctgacctcgtgatccgcccacctcggcctcccaaagtgctgggattacaggcatgagccaccgcgtccggcctaaatgtcacttagtacctttgatataaagagaaaatgtgtgaaagatttagttttttgtttttttgtttgtttgtttgtttgtttgttttgagatgagtctctctgtcgcccaggctggagtgcagtgtcatgatctagcagtctccgcttcccgggttcaagccattctcctggctcagcctctggagcagctgggattacaggcatgcaccaccatgcccagctaatttttgtatttttagtagagatagggtttcaccatgttggccaggctggtcacgaactcctgacctcaagtgaggtcacccgcctcggcctcccgaagtgctgggattgcagatgtgagccaccatgtccagccaagaattagtatttaaattttagatactcttttttttttttttttttttttttt

SEQ ID NO: 420423 - DNA, 1985 bp, Homo sapiens
ggcgcgcacggaggcaccgcgcgagcttggctgcttctggggcctgtgtggccctgtgtgtcggaaagatggagcaagaagccgagcccgaggggcggccgcgacccctctgaccgagatcctgctgctttcgcagccaggagcaccgtccctccccggattagtgcgtacgagcgcccagtgccctggcccggagagtggaatgatccccgaggcccagggcgtcgtgcttccgcgcgccccgtgaaggaaactggggagtcttgagggacccccgactccaagcgcgaaaaccccggatggtgaggagcaggcaaatgtgcaataccaacatgtctgtacctactgatggtgctgtaaccacctcacagattccagcttcggaacaagagaccctggactattggaaatgcacttcatgcaatgaaatgaatcccccccttccatcacattgcaacagatgttgggcccttcgtgagaattggcttcctgaagataaagggaaagataaaggggaaatctctgagaaagccaaactggaaaactcaacacaagctgaagagggctttgatgttcctgattgtaaaaaaactatagtgaatgattccagagagtcatgtgttgaggaaaatgatgataaaattacacaagcttcacaatcacaagaaagtgaagactattctcagccatcaacttctagtagcattatttatagcagccaagaagatgtgaaagagtttgaaagggaagaaacccaagacaaagaagagagtgtggaatctagtttgccccttaatgccattgaaccttgtgtgatttgtcaaggtcgacctaaaaatggttgcattgtccatggcaaaacaggacatcttatggcctgctttacatgtgcaaagaagctaaagaaaaggaataagccctgcccagtatgtagacaaccaattcaaatgattgtgctaacttatttcccctagttgacctgtctataagagaattatatatttctaactatataaccctaggaatttagacaacctgaaatttattcacatatatcaaagtgagaaaatgcctcaattcacatagatttcttctctttagtataattgacctactttggtagtggaatagtgaatacttactataatttgacttgaatatgtagctcatcctttacaccaactcctaattttaaataatttctactctgtcttaaatgagaagtacttggttttttttttcttaaatatgtatatgacatttaaatgtaacttattattttttttgagaccgagtcttgctctgttacccaggctggagtgcagtgggtgatcttggctcactgcaagctctgccctccccgggttcgcaccattctcctgcctcagcctcccaattagcttggcctacagtcatctgccaccacacctggctaattttttgtacttttagtagagacagggtttcaccgtgttagccaggatggtctcgatctcctgacctcgtgatccgcccacctcggcctcccaaagtgctgggattacaggcatgagccaccgcgtccggcctaaatgtcacttagtacctttgatataaagagaaaatgtgtgaaagatttagttttttgtttttttgtttgtttgtttgtttgtttgttttgagatgagtctctctgtcgcccaggctggagtgcagtgtcatgatctagcagtctccgcttcccgggttcaagccattctcctggctcagcctctggagcagctgggattacaggcatgcaccaccatgcccagctaatttttgtatttttagtagagatagggtttcaccatgttggccaggctggtcacgaactcctgacctcaagtgaggtcacccgcctcggcctcccgaagtgctgggattgcagatgtgagccaccatgtccagccaagaattagtatttaaattttagatactcttttttttttttttttttttttttt

SEQ ID NO: 420424 - DNA, 1581 bp, Homo sapiens
ggcgcgcacggaggcaccgcgcgagcttggctgcttctggggcctgtgtggccctgtgtgtcggaaagatggagcaagaagccgagcccgaggggcggccgcgacccctctgaccgagatcctgctgctttcgcagccaggagcaccgtccctccccggattagtgcgtacgagcgcccagtgccctggcccggagagtggaatgatccccgaggcccagggcgtcgtgcttccgcgcgccccgtgaaggaaactggggagtcttgagggacccccgactccaagcgcgaaaaccccggatggtgaggagcaggcaaatgtgcaataccaacatgtctgtacctactgatggtgctgtaaccacctcacagattccagcttcggaacaagagaccctggttagaccaaagccattgcttttgaagttattaaagtctgttggtgcacaaaaagacacttatactatgaaagaggttcttttttatcttggccagtatattatgactaaacgattatatgatgagaagcaacaacatattgtaaatgattgtgctaacttatttcccctagttgacctgtctataagagaattatatatttctaactatataaccctaggaatttagacaacctgaaatttattcacatatatcaaagtgagaaaatgcctcaattcacatagatttcttctctttagtataattgacctactttggtagtggaatagtgaatacttactataatttgacttgaatatgtagctcatcctttacaccaactcctaattttaaataatttctactctgtcttaaatgagaagtacttggttttttttttcttaaatatgtatatgacatttaaatgtaacttattattttttttgagaccgagtcttgctctgttacccaggctggagtgcagtgggtgatcttggctcactgcaagctctgccctccccgggttcgcaccattctcctgcctcagcctcccaattagcttggcctacagtcatctgccaccacacctggctaattttttgtacttttagtagagacagggtttcaccgtgttagccaggatggtctcgatctcctgacctcgtgatccgcccacctcggcctcccaaagtgctgggattacaggcatgagccaccgcgtccggcctaaatgtcacttagtacctttgatataaagagaaaatgtgtgaaagatttagttttttgtttttttgtttgtttgtttgtttgtttgttttgagatgagtctctctgtcgcccaggctggagtgcagtgtcatgatctagcagtctccgcttcccgggttcaagccattctcctggctcagcctctggagcagctgggattacaggcatgcaccaccatgcccagctaatttttgtatttttagtagagatagggtttcaccatgttggccaggctggtcacgaactcctgacctcaagtgaggtcacccgcctcggcctcccgaagtgctgggattgcagatgtgagccaccatgtccagccaagaattagtatttaaattttagatactcttttttttttttttttttttttttt

SEQ ID NO: 420425 - DNA, 876 bp, Homo sapiens
ccgcggttagcctgacccgtgcccgggactcagtggagtcagccacgcaagttagactctagattaaattcctcccgcggttagcctgacccgtgcccgggactcagtggagtcagccacacaagttagactctagattaaattcctcccgcggttagcctgacccgtgcccgggactcagtggagtcagccacacaagttaaactctagattaaattcctcccgcggttagcctgacctgtgcccgggactcagtggagtcagccacacaagttaaactctagattaaattcctcccgcggttagcctgacccgtgcccgggactcagtggagtcagccacgcaagttagactctagattaaattcctcccgcggttagcctgacccgtgcccgggactcagtggggacagccacacaagttaaactctagattaaattcctcccgcggttagcctgacccgtgcccgggactcagtggagtcagccacgcaagttaaactctagattaaattcctcccgcggttagcctgacccgtgcccgggactcagtggagtcagccacgcaagttagactctagattaaattcctcccgcggttagcctgacccgtgcccgggactcagtggagtcagccacgcaagttaaactctagattaaattcctcccgcggttagcctgacccgtgcccgggactcagtggagtcagccacacaagttaaactctagattaaattcctcccgcggttagcctgacccatgcccgggactcggtggaatcagccaccccagacctctctcactgttatcatttttgcacaggtggtttcagcagcttgatgccaaaaaaaataaaaaaggaaaagtattctgaaaa

SEQ ID NO: 420426 - DNA, 292 bp, Homo sapiens
atgttctgaggcagtactggatgaccaggaaaggctgatccactactggctgatccactagcgggccccactactgggtctcccgcggttagcctgacccgtgcccgggactcagtggagtcagccacacaagttaaactctagattaaattcctcccgcggttagcctgacccatgcccgggactcggtggaatcagccaccccagacctctctcactgttatcatttttgcacaggtggtttcagcagcttgatgccaaaaaaaataaaaaaggaaaagtattctgaaaa

SEQ ID NO: 420427 - DNA, 1636 bp, Homo sapiens
ggcctgtcctggcctctgagagtgggatggttggtgctgtacctcaggggacagggcggggcgggaggaggcggggccaggcctggtctctgataacgggatgggtggtgctggacctcgggcggggccgggcctcgtggcgggaggaggcagggcagggcctctgggacggggctggacggcttgttgacggaaacgagcccttgacgctgtggcccggaagtggagcggctgtcgcagtgcggctccggcagtggcagcggaggcctgtgtttgcggccttcggcaagcgactgagatggcgagcgcaactgcacctgcagccgcagtccccaccctggcttcgcctttggagcagctccggcacttggcggaggagctgcggttgctcctgcctcgagtgcgggtcggcgaagcccaggagaccaccgaggagtttaatcgagagatgttctggagaagactcaatgaggcagctgtgactgtgtcaagggaagccacgactctgaccatagtcttctctcagcttccactgccgtctccacaggaaacccagaagttctgtgaacaagtccatgctgccatcaaggcatttattgcagtgtactatttgcttccaaaggatcaggccctgagaacaatgaccttatttcctacaacagtgtctgggttgcgtgccagcagatgcctcagataccaagagataacaaagctgcagctcttttgatgctgaccaagaatgtggattttgtgaaggatgcacatgaagaaatggagcaggctgtggaagaatgtgacccttactctggcctcttgaatgatactgaggagaacaactctgacaaccacaatcatgaggatgatgtgttggggtttcccagcaatcaggacttgtattggtcagaggacgatcaagagctcataatcccatgccttgcgctggtgagagcatccaaagcctgcctgaagaaaattcggatgttagtggcagagaatgggaagaaggatcaggtggcacagctggatgacattgtggatatttctgatgaaatcagccctagtgtggatgatttggctctgagcatatatccacctatgtgtcacctgaccgtgcgaatcaattctgcgaaacttgtatctgttttaaagaaggcacttgaaattacaaaagcaagtcatgtgacccctcagccagaagatagttggatccctttacttattaatgccattgatcattgcatgaatagaatcaaggagctcactcagagtgaacttgaattatgacttttcaggctcatttgtactctcttcccctctcatcgtcatggtcaggctctgatacctgcttttaaaatggagctagaatgcttgctggattgaaagggagtgcctatctatatttagcaagagacactattaccaaagattgttggttaggccagattgacacctatttataaaccatatgcgtatatttttctgtgctatatatgaaaaataattgcatgatttctcattcctgagtcatttctcagagattcctaggaaagctgccttattctctttttgcagtaaagtatgttgttttcattgtaaagatgttgatggtctcaataaaatgctaacttgccagtga

SEQ ID NO: 420428 - DNA, 626 bp, Homo sapiens
gttaatgattacttttgttttctgctcttagtgtggatgatttggctctgagcatatatccacctatgtgtcacctgaccgtgcgaatcaatgtaagtactggctttgagggaatagctacagaacaaatgggcagaatttcactaatcactagtatttcctgtaagctatagggtacatatttattagtcacatttggatggaagtacaacagtaatgtcacagttcttgcatgcgtttggggttgataaatattcactgaagttgaattataatagccatgagctttggtagttctctcttccataatcacctgggtaatcattcagaaaagcccaaaggccttagaaaatgatgctttaaggctgggcgcggtagctcacacctgtaatcccagcactccaggaggcggaggtcaggagttgagaccagcctggccaacatggcgaaaccttgtctctactaagaatacaaaaattagccgggcatcatgcacctataatcccagctacttggaaggcttaagcaggagaatcgcttgaagccgggaagtggaggttgcagtgagccgacatcgcgccactgcactccagcctgagcaacagagcaagactctgtctcaaaaa

SEQ ID NO: 420429 - DNA, 1733 bp, Homo sapiens
ggcctgtcctggcctctgagagtgggatggttggtgctgtacctcaggggacagggcggggcgggaggaggcggggccaggcctggtctctgataacgggatgggtggtgctggacctcgggcggggccgggcctcgtggcgggaggaggcagggcagggcctctgggacggggctggacggcttgttgacggaaacgagcccttgacgctgtggcccggaagtggagcggctgtcgcagtgcggctccggcagtggcagcggaggcctgtgtttgcggccttcggcaagcgactgagatggcgagcgcaactgcacctgcagccgcagtccccaccctggcttcgcctttggagcagctccggcacttggcggaggagctgcggttgctcctgcctcgagtgcgggtcggcgaagcccaggagaccaccgaggagtttaatcgagagatgttctggagaagactcaatgaggcagctgtgactgtgtcaagggaagccacgactctgaccatagtcttctctcagcttccactgccgtctccacaggaaacccagaagttctgtgaacaagtccatgctgccatcaaggcatttattgcagtgtactatttgcttccaaaggatcaggggatcaccctgagaaagctggtacggggcgccaccctggacatcgtggatggcatggctcagctcatggaagtactttccgtcactccaactcagagccctgagaacaatgaccttatttcctacaacagtgtctgggttgcgtgccagcagatgcctcagataccaagagataacaaagctgcagctcttttgatgctgaccaagaatgtggattttgtgaaggatgcacatgaagaaatggagcaggctgtggaagaatgtgacccttactctggcctcttgaatgatactgaggagaacaactctgacaaccacaatcatgaggatgatgtgttggggtttcccagcaatcaggacttgtattggtcagaggacgatcaagagctcataatcccatgccttgcgctggtgagagcatccaaagcctgcctgaagaaaattcggatgttagtggcagagaatgggaagaaggatcaggtggcacagctggatgacattgtggatatttctgatgaaatcagccctagtgtggatgatttggctctgagcatatatccacctatgtgtcacctgaccgtgcgaatcaattctgcgaaacttgtatctgttttaaagaaggcacttgaaattacaaaagcaagtcatgtgacccctcagccagaagatagttggatccctttacttattaatgccattgatcattgcatgaatagaatcaaggagctcactcagagtgaacttgaattatgacttttcaggctcatttgtactctcttcccctctcatcgtcatggtcaggctctgatacctgcttttaaaatggagctagaatgcttgctggattgaaagggagtgcctatctatatttagcaagagacactattaccaaagattgttggttaggccagattgacacctatttataaaccatatgcgtatatttttctgtgctatatatgaaaaataattgcatgatttctcattcctgagtcatttctcagagattcctaggaaagctgccttattctctttttgcagtaaagtatgttgttttcattgtaaagatgttgatggtctcaataaaatgctaacttgccagtga

SEQ ID NO: 420430 - DNA, 1839 bp, Homo sapiens
  misc_feature (1760)..(1761): n is a, c, g, or t
  misc_feature (1819)..(1819): n is a, c, g, or t
  misc_feature (1837)..(1837): n is a, c, g, or t
ggcctgtcctggcctctgagagtgggatggttggtgctgtacctcaggggacagggcggggcgggaggaggcggggccaggcctggtctctgataacgggatgggtggtgctggacctcgggcggggccgggcctcgtggcgggaggaggcagggcagggcctctgggacggggctggacggcttgttgacggaaacgagcccttgacgctgtggcccggaagtggagcggctgtcgcagtgcggctccggcagtggcagcggaggcctgtgtttgcggccttcggcaagcgactgagatggcgagcgcaactgcacctgcagccgcagtccccaccctggcttcgcctttggagcagctccggcacttggcggaggagctgcggttgctcctgcctcgagtgcgggtcggcgaagcccaggagaccaccgaggagtttaatcgagagatgttctggagaagactcaatgaggcagctgtgactgtgtcaagggaagccacgactctgaccatagtcttctctcagcttccactgccgtctccacaggaaacccagaagttctgtgaacaagtccatgctgccatcaaggcatttattgcagtgtactatttgcttccaaaggatcaggggatcaccctgagaaagctggtacggggcgccaccctggacatcgtggatggcatggctcagctcatggaagtactttccgtcactccaactcagagccctgagaacaatgaccttatttcctacaacagtgtctgggttgcgtgccagcagatgcctcagataccaagagataacaaagctgcagctcttttgatgctgaccaagaatgtggattttgtgaaggatgcacatgaagaaatggagcaggctgtggaagaatgtgacccttactctggcctcttgaatgatactgaggagaacaactctgacaaccacaatcatgaggatgatgtgttggggtttcccagcaatcaggacttgtattggtcagaggacgatcaagagctcataatcccatgccttgcgctggtgagagcatccaaagcctgcctgaagaaaattcggatgttagtggcagagaatgggaagaaggatcaggtggcacagctggatgacattgtggatatttctgatgaaatcagccctagtgtggatgatttggctctgagcatatatccacctatgtgtcacctgaccgtgcgaatcaattctgcgaaacttgtatctgttttaaagaaggcacttgaaattacaaaagcaagtcatgtgacccctcagccagaagatagttggatccctttacttattaatgccattgatcattgcatgaatagaatcaaggagctcactcagagtgaacttgaattatgacttttcaggctcatttgtactctcttcccctctcatcgtcatggtcaggctctgatacctgcttttaaaatggagctagaatgcttgctggattgaaagggagtgcctatctatatttagcaagagacactattaccaaagattgttggttaggccagattgacacctatttataaaccatatgcgtatatttttctgtgctatatatgaaaaataattgcatgatttctcattcctgagtcatttctcagagattcctaggaaagctgccttattctctttttgcagtaaagtatgttgttttcattgtaaagatgttgatggtctcaataaaatgctaacttgccagtgaaaaaaaaaaagagagagaagagctgtnncggccgcgagcttattacctttaatgcgtcttctcataacatacacttccataggggngagggaaggaaagagagnga

SEQ ID NO: 420431 - DNA, 2073 bp, Homo sapiens
ggcctgtcctggcctctgagagtgggatggttggtgctgtacctcaggggacagggcggggcgggaggaggcggggccaggcctggtctctgataacgggatgggtggtgctggacctcgggcggggccgggcctcgtggcgggaggaggcagggcagggcctctgggacggggctggacggcttgttgacggaaacgagcccttgacgctgtggcccggaagtggagcggctgtcgcagtgcggctccggcagtggcagcggaggcctgtgtttgcggccttcggcaagcgactgagatggcgagcgcaactgcacctgcagccgcagtccccaccctggcttcgcctttggagcagctccggcacttggcggaggagctgcggttgctcctgcctcgagtgcgggtcggcgaagcccaggagaccaccgaggagtttaatcgagagatgttctggagaagactcaatgaggcagctgtgactgtgtcaagggaagccacgactctgaccatagtcttctctcagcttccactgccgtctccacaggaaacccagaagttctgtgaacaagtccatgctgccatcaaggcatttattgcagtgtactatttgcttccaaaggatcaggggatcaccctgagaaagctggtacggggcgccaccctggacatcgtggatggcatggctcagctcatggaagtactttccgtcactccaactcagagccctgagaacaatgaccttatttcctacaacagtgtctgggttgcgtgccagcagatgcctcagataccaagagataacaaagctgcagctcttttgatgctgaccaagaatgtggattttgtgaaggatgcacatgaagaaatggagcaggctgtggaagaatgtgacccttactctggcctcttgaatgatactgaggagaacaactctgacaaccacaatcatgaggatgatgtgttggggtttcccagcaatcaggacttgtattggtcagaggacgatcaagagctcataatcccatgccttgcgctggtgagagcatccaaagcctgcctgaagaaaattcggatgttagtggcagagaatgggaagaaggatcaggtggcacagctggatgacattgtggatatttctgatgaaatcagccctagtgtggatgatttggctctgagcatatatccacctatgtgtcacctgaccgtgcgaatcaattctgcgaaacttgtatctgttttaaagaaggcacttgaaattacaaaagcaagtcatgtgacccctcagccagaagatagttggatccctttacttattaatgccattgatcattgcatgaatagaatcaaggagctcactcagagtgaacttgaattatgacttttcaggctcatttgtactctcttcccctctcatcgtcatggtcaggctctgatacctgcttttaaaatggagctagaatgcttgctggattgaaagggagtgcctatctatatttagcaagagacactattaccaaagattgttggttaggccagattgacacctatttataaaccatatgcgtatatttttctgtgctatatatgaaaaataattgcatgatttctcattcctgagtcatttctcagagattcctaggaaagctgccttattctctttttgcagtaaagtatgttgttttcattgtaaagatgttgatggtctcaataaaatgctaacttgccagtgaaaaaaaaaaaaaaaaaaaaaaaaaaaaacaaagacaagcaaaaaaaaaacaaaacacagcaagagggaacagacgaaaagaaaggaaagacaagagacaaacagcagcaggggacgaaagataagaagaagaagaagaagcaaagcggagaccgggagggaggggagggagaagagagtagagagaaagaggggcgaaaaaaggggagacagggaggcaggaccggtagaggaggcgagccggccgaagacaccagggagagaggagagacaagaagaccgcaggacaagagccagaagcacacgagagcacagcgccgcacaggcgagaacagagacgg

SEQ ID NO: 420432 - DNA, 2007 bp, Homo sapiens
ggcctgtcctggcctctgagagtgggatggttggtgctgtacctcaggggacagggcggggcgggaggaggcggggccaggcctggtctctgataacgggatgggtggtgctggacctcgggcggggccgggcctcgtggcgggaggaggcagggcagggcctctgggacggggctggacggcttgttgacggaaacgagcccttgacgctgtggcccggaagtggagcggctgtcgcagtgcggctccggcagtggcagcggaggcctgtgtttgcggccttcggcaagcgactgagatggcgagcgcaactgcacctgcagccgcagtccccaccctggcttcgcctttggagcagctccggcacttggcggaggagctgcggttgctcctgcctcgagtgcgggtcggcgaagcccaggagaccaccgaggagtttaatcgagagatgttctggagaagactcagtgagtgcgcctccttccgggctccccttgcctcacttcctccagcgtcccgaccccttttcctcccgctgtcccccacggaggggactgctctcccccgctgcatcctttctgtgaggtaccttacccacctcagcacctgagagggtgaaatagaattctaacctcgacattcgggaagtgtttttgagaagtctcggtcggtaagggaagtcttccaagtccgtgcagcactaacgtattggcacctgcctcctcttcggccaccccccagatgaggcagctgtgactgtgtcaagggaagccacgactctgaccatagtcttctctcagcttccactgccgtctccacaggaaacccagaagttctgtgaacaagtccatgctgccatcaaggcatttattgcagtgtactatttgcttccaaaggatcaggggatcaccctgagaaagctggtacggggcgccaccctggacatcgtggatggcatggctcagctcatggaagtactttccgtcactccaactcagagccctgagaacaatgaccttatttcctacaacagtgtctgggttgcgtgccagcagatgcctcagataccaagagataacaaagctgcagctcttttgatgctgaccaagaatgtggattttgtgaaggatgcacatgaagaaatggagcaggctgtggaagaatgtgacccttactctggcctcttgaatgatactgaggagaacaactctgacaaccacaatcatgaggatgatgtgttggggtttcccagcaatcaggacttgtattggtcagaggacgatcaagagctcataatcccatgccttgcgctggtgagagcatccaaagcctgcctgaagaaaattcggatgttagtggcagagaatgggaagaaggatcaggtggcacagctggatgacattgtggatatttctgatgaaatcagccctagtgtggatgatttggctctgagcatatatccacctatgtgtcacctgaccgtgcgaatcaattctgcgaaacttgtatctgttttaaagaaggcacttgaaattacaaaagcaagtcatgtgacccctcagccagaagatagttggatccctttacttattaatgccattgatcattgcatgaatagaatcaaggagctcactcagagtgaacttgaattatgacttttcaggctcatttgtactctcttcccctctcatcgtcatggtcaggctctgatacctgcttttaaaatggagctagaatgcttgctggattgaaagggagtgcctatctatatttagcaagagacactattaccaaagattgttggttaggccagattgacacctatttataaaccatatgcgtatatttttctgtgctatatatgaaaaataattgcatgatttctcattcctgagtcatttctcagagattcctaggaaagctgccttattctctttttgcagtaaagtatgttgttttcattgtaaagatgttgatggtctcaataaaatgctaacttgccagtga

SEQ ID NO: 420433 - DNA, 1653 bp, Homo sapiens
ggcctgtcctggcctctgagagtgggatggttggtgctgtacctcaggggacagggcggggcgggaggaggcggggccaggcctggtctctgataacgggatgggtggtgctggacctcgggcggggccgggcctcgtggcgggaggaggcagggcagggcctctgggacggggctggacggcttgttgacggaaacgagcccttgacgctgtggcccggaagtggagcggctgtcgcagtgcggctccggcagtggcagcggaggcctgtgtttgcggccttcggcaagcgactgagatggcgagcgcaactgcacctgcagccgcagtccccaccctggcttcgcctttggagcagctccggcacttggcggaggagctgcggttgctcctgcctcgagtgcgggtcggcgaagcccaggagaccaccgaggagtttaatcgagagatgttctggagaagactcagaaacccagaagttctgtgaacaagtccatgctgccatcaaggcatttattgcagtgtactatttgcttccaaaggatcaggggatcaccctgagaaagctggtacggggcgccaccctggacatcgtggatggcatggctcagctcatggaagtactttccgtcactccaactcagagccctgagaacaatgaccttatttcctacaacagtgtctgggttgcgtgccagcagatgcctcagataccaagagataacaaagctgcagctcttttgatgctgaccaagaatgtggattttgtgaaggatgcacatgaagaaatggagcaggctgtggaagaatgtgacccttactctggcctcttgaatgatactgaggagaacaactctgacaaccacaatcatgaggatgatgtgttggggtttcccagcaatcaggacttgtattggtcagaggacgatcaagagctcataatcccatgccttgcgctggtgagagcatccaaagcctgcctgaagaaaattcggatgttagtggcagagaatgggaagaaggatcaggtggcacagctggatgacattgtggatatttctgatgaaatcagccctagtgtggatgatttggctctgagcatatatccacctatgtgtcacctgaccgtgcgaatcaattctgcgaaacttgtatctgttttaaagaaggcacttgaaattacaaaagcaagtcatgtgacccctcagccagaagatagttggatccctttacttattaatgccattgatcattgcatgaatagaatcaaggagctcactcagagtgaacttgaattatgacttttcaggctcatttgtactctcttcccctctcatcgtcatggtcaggctctgatacctgcttttaaaatggagctagaatgcttgctggattgaaagggagtgcctatctatatttagcaagagacactattaccaaagattgttggttaggccagattgacacctatttataaaccatatgcgtatatttttctgtgctatatatgaaaaataattgcatgatttctcattcctgagtcatttctcagagattcctaggaaagctgccttattctctttttgcagtaaagtatgttgttttcattgtaaagatgttgatggtctcaataaaatgctaacttgccagtga

SEQ ID NO: 420434 - DNA, 1593 bp, Homo sapiens
ggcctgtcctggcctctgagagtgggatggttggtgctgtacctcaggggacagggcggggcgggaggaggcggggccaggcctggtctctgataacgggatgggtggtgctggacctcgggcggggccgggcctcgtggcgggaggaggcagggcagggcctctgggacggggctggacggcttgttgacggaaacgagcccttgacgctgtggcccggaagtggagcggctgtcgcagtgcggctccggcagtggcagcggaggcctgtgtttgcggccttcggcaagcgactgagatggcgagcgcaactgcacctgcagccgcagtccccaccctggcttcgcctttggagcagctccggcacttggcggaggagctgcggttgctcctgcctcgagtgcggggaaacccagaagttctgtgaacaagtccatgctgccatcaaggcatttattgcagtgtactatttgcttccaaaggatcaggggatcaccctgagaaagctggtacggggcgccaccctggacatcgtggatggcatggctcagctcatggaagtactttccgtcactccaactcagagccctgagaacaatgaccttatttcctacaacagtgtctgggttgcgtgccagcagatgcctcagataccaagagataacaaagctgcagctcttttgatgctgaccaagaatgtggattttgtgaaggatgcacatgaagaaatggagcaggctgtggaagaatgtgacccttactctggcctcttgaatgatactgaggagaacaactctgacaaccacaatcatgaggatgatgtgttggggtttcccagcaatcaggacttgtattggtcagaggacgatcaagagctcataatcccatgccttgcgctggtgagagcatccaaagcctgcctgaagaaaattcggatgttagtggcagagaatgggaagaaggatcaggtggcacagctggatgacattgtggatatttctgatgaaatcagccctagtgtggatgatttggctctgagcatatatccacctatgtgtcacctgaccgtgcgaatcaattctgcgaaacttgtatctgttttaaagaaggcacttgaaattacaaaagcaagtcatgtgacccctcagccagaagatagttggatccctttacttattaatgccattgatcattgcatgaatagaatcaaggagctcactcagagtgaacttgaattatgacttttcaggctcatttgtactctcttcccctctcatcgtcatggtcaggctctgatacctgcttttaaaatggagctagaatgcttgctggattgaaagggagtgcctatctatatttagcaagagacactattaccaaagattgttggttaggccagattgacacctatttataaaccatatgcgtatatttttctgtgctatatatgaaaaataattgcatgatttctcattcctgagtcatttctcagagattcctaggaaagctgccttattctctttttgcagtaaagtatgttgttttcattgtaaagatgttgatggtctcaataaaatgctaacttgccagtga

SEQ ID NO: 420435 - DNA, 1790 bp, Homo sapiens
ggcctgtcctggcctctgagagtgggatggttggtgctgtacctcaggggacagggcggggcgggaggaggcggggccaggcctggtctctgataacgggatgggtggtgctggacctcgggcggggccgggcctcgtggcgggaggaggcagggcagggcctctgggacggggctggacggcttgttgacggaaacgagcccttgacgctgtggcccggaagtggagcggctgtcgcagtgcggctccggcagtggcagcggaggcctgtgtttgcggccttcggcaagcgactgagatggcgagcgcaactgcacctgcagccgcagtccccaccctggcttcgcctttggagcagctccggcacttggcggaggagctgcggttgctcctgcctcgagtgcgggtcggcgaagcccaggagaccaccgaggagtttaatcgagagatgttctggagaagactcaatgaggcagctgtgactgtgtcaagggaagccacgactctgaccatagtcttctctcagcttccactgccgtctccacaggaaacccagaagttctgtgaacaagtccatgctgccatcaaggcatttattgcagtgtactatttgcttccaaaggatcaggggatcaccctgagaaagctggtacggggcgccaccctggacatcgtggatggcatggctcagctcatggaagtactttccgtcactccaactcagagccctgagaacaatgaccttatttcctacaacagtgtctgggttgcgtgccagcagatgcctcagataccaagagataacaaagctgcagctcttttgatgctgaccaagaatgtggattttgtgaaggatgcacatgaagaaatggagcaggctgtggaagaatgtgacccttactctggcctcttgaatgatactgaggagaacaactctgacaaccacaatcatgaggatgatgtgttggggtttcccagcaatcaggacttgtattggtcagaggacgatcaagagctcataatcccatgccttgcgctggtgagagcatccaaagcctgcctgaagaaaattcggatgttagtggcagagaatgggaagaaggatcaggtggcacagctggatgacattgtggatatttctgatgaaatcagccctagtgtggatgatttggctctgagcatatatccacctatgtgtcacctgaccgtgcgaatcaatgaaccttagtcatttctgctttatattttgagctatcagcatttgggaccaattcagtctgcgaaacttgtatctgttttaaagaaggcacttgaaattacaaaagcaagtcatgtgacccctcagccagaagatagttggatccctttacttattaatgccattgatcattgcatgaatagaatcaaggagctcactcagagtgaacttgaattatgacttttcaggctcatttgtactctcttcccctctcatcgtcatggtcaggctctgatacctgcttttaaaatggagctagaatgcttgctggattgaaagggagtgcctatctatatttagcaagagacactattaccaaagattgttggttaggccagattgacacctatttataaaccatatgcgtatatttttctgtgctatatatgaaaaataattgcatgatttctcattcctgagtcatttctcagagattcctaggaaagctgccttattctctttttgcagtaaagtatgttgttttcattgtaaagatgttgatggtctcaataaaatgctaacttgccagtga

SEQ ID NO: 420436 - DNA, 2067 bp, Homo sapiens
ggcctgtcctggcctctgagagtgggatggttggtgctgtacctcaggggacagggcggggcgggaggaggcggggccaggcctggtctctgataacgggatgggtggtgctggacctcgggcggggccgggcctcgtggcgggaggaggcagggcagggcctctgggacggggctggacggcttgttgacggaaacgagcccttgacgctgtggcccggaagtggagcggctgtcgcagtgcggctccggcagtggcagcggaggcctgtgtttgcggccttcggcaagcgactgagatggcgagcgcaactgcacctgcagccgcagtccccaccctggcttcgcctttggagcagctccggcacttggcggaggagctgcggttgctcctgcctcgagtgcgggtcggcgaagcccaggagaccaccgaggagtttaatcgagagatgttctggagaagactcaatgaggcagctgtgactgtgtcaagggaagccacgactctgaccatagtcttctctcagcttccactgccgtctccacaggaaacccagaagttctgtgaacaagtccatgctgccatcaaggcatttattgcagtgtactatttgcttccaaaggatcaggggatcaccctgagaaagctggtacggggcgccaccctggacatcgtggatggcatggctcagctcatggaagtactttccgtcactccaactcagagccctgagaacaatgaccttatttcctacaacagtgtctgggttgcgtgccagcagatgcctcagataccaagagataacaaagctgcagctcttttgatgctgaccaagaatgtggattttgtgaaggatgcacatgaagaaatggagcaggctgtggaagaatgtgacccttactctggcctcttgaatgatactgaggagaacaactctgacaaccacaatcatgaggatgatgtgttggggtttcccagcaatcaggacttgtattggtcagaggacgatcaagagctcataatcccatgccttgcgctggtgagagcatccaaagcctgcctgaagaaaattcggatgttagtggcagagaatgggaagaaggatcaggtggcacagctggatgacattgtggatatttctgatgaaatcagccctagtgtggatgatttggctctgagcatatatccacctatgtgtcacctgaccgtgcgaatcaatgaaccttagtcatttctgctttatattttgagctatcagcatttgggaccaattcaggttacattttcctttttctgtccttttttaaattgaaaatattttagatctaaaaaatcttattaaaatgttatagcaatagtattaataagatcttgctaaatagaaaagaacccgtaatcctgccaccctaacctaatcagcattttaaattttgcatacttccttcaggtcctttttctaaataatttttttattacttgggtctttaaaaatatttgaactcacctttttatggtagggctcagggtgaataacttctgtgtttcttttctagtctgcgaaacttgtatctgttttaaagaaggcacttgaaattacaaaagcaagtcatgtgacccctcagccagaagatagttggatccctttacttattaatgccattgatcattgcatgaatagaatcaaggagctcactcagagtgaacttgaattatgacttttcaggctcatttgtactctcttcccctctcatcgtcatggtcaggctctgatacctgcttttaaaatggagctagaatgcttgctggattgaaagggagtgcctatctatatttagcaagagacactattaccaaagattgttggttaggccagattgacacctatttataaaccatatgcgtatatttttctgtgctatatatgaaaaataattgcatgatttctcattcctgagtcatttctcagagattcctaggaaagctgccttattctctttttgcagtaaagtatgttgttttcattgtaaagatgttgatggtctcaataaaatgctaacttgccagtga

SEQ ID NO: 420437 - DNA, 1998 bp, Homo sapiens
ggcctgtcctggcctctgagagtgggatggttggtgctgtacctcaggggacagggcggggcgggaggaggcggggccaggcctggtctctgataacgggatgggtggtgctggacctcgggcggggccgggcctcgtggcgggaggaggcagggcagggcctctgggacggggctggacggcttgttgacggaaacgagcccttgacgctgtggcccggaagtggagcggctgtcgcagtgcggctccggcagtggcagcggaggcctgtgtttgcggccttcggcaagcgactgagatggcgagcgcaactgcacctgcagccgcagtccccaccctggcttcgcctttggagcagctccggcacttggcggaggagctgcggttgctcctgcctcgagtgcgggtcggcgaagcccaggagaccaccgaggagtttaatcgagagatgttctggagaagactcaatgaggcagctgtgactgtgtcaagggaagccacgactctgaccatagtcttctctcagcttccactgccgtctccacaggaaacccagaagttctgtgaacaagtccatgctgccatcaaggcatttattgcagtgtactatttgcttccaaaggatcaggggatcaccctgagaaagctggtacggggcgccaccctggacatcgtggatggcatggctcagctcatggaagtactttccgtcactccaactcagagccctgagaacaatgaccttatttcctacaacagtgtctgggttgcgtgccagcagatgcctcagataccaagagataacaaagctgcagctcttttgatgctgaccaagaatgtggattttgtgaaggatgcacatgaagaaatggagcaggctgtggaagaatgtgacccttactctggcctcttgaatgatactgaggagaacaactctgacaaccacaatcatgaggatgatgtgttggggtttcccagcaatcaggacttgtattggtcagaggacgatcaagagctcataatcccatgccttgcgctggtgagagcatccaaagcctgcctgaagaaaattcggatgttagtggcagagaatgggaagaaggatcaggtggcacagctggatgacattgtggatatttctgatgaaatcagccctagtgtggatgatttggctctgagcatatatccacctatgtgtcacctgaccgtgcgaatcaattctgcgaaacttgtatctgttttaaagaaggcacttgaaattacaaagtaagtatgaagacttctcagatagctttttgtgagtaaaacggaactgctgtccagacgttctcaactccctagctcccatttcaaggagtgggaaagggtgggtgtgggattttctttcagcttcagttgtggggcagctgagattctgcaaagaagcttccctttaaaaaaattttagttttccctgtgctccctcctgaggataggttttcccttgacatcctaataagtttaacttacttctttcctattctattcacagagcaagtcatgtgacccctcagccagaagatagttggatccctttacttattaatgccattgatcattgcatgaatagaatcaaggagctcactcagagtgaacttgaattatgacttttcaggctcatttgtactctcttcccctctcatcgtcatggtcaggctctgatacctgcttttaaaatggagctagaatgcttgctggattgaaagggagtgcctatctatatttagcaagagacactattaccaaagattgttggttaggccagattgacacctatttataaaccatatgcgtatatttttctgtgctatatatgaaaaataattgcatgatttctcattcctgagtcatttctcagagattcctaggaaagctgccttattctctttttgcagtaaagtatgttgttttcattgtaaagatgttgatggtctcaataaaatgctaacttgccagtga

SEQ ID NO: 420438 - DNA, 1346 bp, Homo sapiens
agcgggagggcgggctggggcggcggcggggagccggacttgggcgagggaggtggctccgcttacctcagcttttccattcgccaccgttcggcccccacacgccacacccacaagtcggcgaagcccaggagaccaccgaggagtttaatcgagagatgttctggagaagactcaatgaggcagctgtgactgtgtcaagggaagccacgactctgaccatagtcttctctcagcttccactgccgtctccacaggaaacccagaagttctgtgaacaagtccatgctgccatcaaggcatttattgcagtgtactatttgcttccaaaggatcaggccctgagaacaatgaccttatttcctacaacagtgtctgggttgcgtgccagcagatgcctcagataccaagagataacaaagctgcagctcttttgatgctgaccaagaatgtggattttgtgaaggatgcacatgaagaaatggagcaggctgtggaagaatgtgacccttactctggcctcttgaatgatactgaggagaacaactctgacaaccacaatcatgaggatgatgtgttggggtttcccagcaatcaggacttgtattggtcagaggacgatcaagagctcataatcccatgccttgcgctggtgagagcatccaaagcctgcctgaagaaaattcggatgttagtggcagagaatgggaagaaggatcaggtggcacagctggatgacattgtggatatttctgatgaaatcagccctagtgtggatgatttggctctgagcatatatccacctatgtgtcacctgaccgtgcgaatcaattctgcgaaacttgtatctgttttaaagaaggcacttgaaattacaaaagcaagtcatgtgacccctcagccagaagatagttggatccctttacttattaatgccattgatcattgcatgaatagaatcaaggagctcactcagagtgaacttgaattatgacttttcaggctcatttgtactctcttcccctctcatcgtcatggtcaggctctgatacctgcttttaaaatggagctagaatgcttgctggattgaaagggagtgcctatctatatttagcaagagacactattaccaaagattgttggttaggccagattgacacctatttataaaccatatgcgtatatttttctgtgctatatatgaaaaataattgcatgatttctcattcctgagtcatttctcagagattcctaggaaagctgccttattctctttttgcagtaaagtatgttgttttcattgtaaagatgttgatggtctcaataaaatgctaacttgccagtga

SEQ ID NO: 420439 - DNA, 2332 bp, Homo sapiens
ggcctgtcctggcctctgagagtgggatggttggtgctgtacctcaggggacagggcggggcgggaggaggcggggccaggcctggtctctgataacgggatgggtggtgctggacctcgggcggggccgggcctcgtggcgggaggaggcagggcagggcctctgggacggggctggacggcttgttgacggaaacgagcccttgacgctgtggcccggaagtggagcggctgtcgcagtgcggctccggcagtggcagcggaggcctgtgtttgcggccttcggcaagcgactgagatggcgagcgcaactgcacctgcagccgcagtccccaccctggcttcgcctttggagcagctccggcacttggcggaggagctgcggttgctcctgcctcgagtgcgggtcggcgaagcccaggagaccaccgaggagtttaatcgagagatgttctggagaagactcaatgaggcagctgtgactgtgtcaagggaagccacgactctgaccatagtcttctctcagcttccactgccgtctccacaggaaacccagaagttctgtgaacaagtccatgctgccatcaaggcatttattgcagtgtactatttgcttccaaaggatcaggggatcaccctgagaaagctggtacggggcgccaccctggacatcgtggatggcatggctcagctcatggaagtactttccgtcactccaactcagagccctgagaacaatgaccttatttcctacaacagtgtctgggttgcgtgccagcagatgcctcagataccaagagataacaaagctgcagctcttttgatgctgaccaagaatgtggattttgtgaaggatgcacatgaagaaatggagcaggctgtggaagaatgtgacccttactctggcctcttgaatgatactgaggagaacaactctgacaaccacaatcatgaggatgatgtgttggggtttcccagcaatcaggacttgtattggtcagaggacgatcaagagctcataatcccatgccttgcgctggtgagagcatccaaagcctgcctgaagaaaattcggatgttagtggcagagaatgggaagaaggatcaggtggcacagctggatgacattgtggatatttctgatgaaatcagccctagtgtggatgatttggctctgagcatatatccacctatgtgtcacctgaccgtgcgaatcaatgaaccttagtcatttctgctttatattttgagctatcagcatttgggaccaattcaggttacattttcctttttctgtccttttttaaattgaaaatattttagatctaaaaaatcttattaaaatgttatagcaatagtattaataagatcttgctaaatagaaaagaacccgtaatcctgccaccctaacctaatcagcattttaaattttgcatacttccttcaggtcctttttctaaataatttttttattacttgggtctttaaaaatatttgaactcacctttttatggtagggctcagggtgaataacttctgtgtttcttttctagtctgcgaaacttgtatctgttttaaagaaggcacttgaaattacaaagtaagtatgaagacttctcagatagctttttgtgagtaaaacggaactgctgtccagacgttctcaactccctagctcccatttcaaggagtgggaaagggtgggtgtgggattttctttcagcttcagttgtggggcagctgagattctgcaaagaagcttccctttaaaaaaattttagttttccctgtgctccctcctgaggataggttttcccttgacatcctaataagtttaacttacttctttcctattctattcacagagcaagtcatgtgacccctcagccagaagatagttggatccctttacttattaatgccattgatcattgcatgaatagaatcaaggagctcactcagagtgaacttgaattatgacttttcaggctcatttgtactctcttcccctctcatcgtcatggtcaggctctgatacctgcttttaaaatggagctagaatgcttgctggattgaaagggagtgcctatctatatttagcaagagacactattaccaaagattgttggttaggccagattgacacctatttataaaccatatgcgtatatttttctgtgctatatatgaaaaataattgcatgatttctcattcctgagtcatttctcagagattcctaggaaagctgccttattctctttttgcagtaaagtatgttgttttcattgtaaagatgttgatggtctcaataaaatgctaacttgccagtga

SEQ ID NO: 420440 - DNA, 1910 bp, Homo sapiens
ggcctgtcctggcctctgagagtgggatggttggtgctgtacctcaggggacagggcggggcgggaggaggcggggccaggcctggtctctgataacgggatgggtggtgctggacctcgggcggggccgggcctcgtggcgggaggaggcagggcagggcctctgggacggggctggacggcttgttgacggaaacgagcccttgacgctgtggcccggaagtggagcggctgtcgcagtgcggctccggcagtggcagcggaggcctgtgtttgcggccttcggcaagcgactgagatggcgagcgcaactgcacctgcagccgcagtccccaccctggcttcgcctttggagcagctccggcacttggcggaggagctgcggttgctcctgcctcgagtgcgggtcggcgaagcccaggagaccaccgaggagtttaatcgagagatgttctggagaagactcagtgagtgcgcctccttccgggctccccttgcctcacttcctccagcgtcccgaccccttttcctcccgctgtcccccacggaggggactgctctcccccgctgcatcctttctgtgaggtaccttacccacctcagcacctgagagggtgaaatagaattctaacctcgacattcgggaagtgtttttgagaagtctcggtcggtaagggaagtcttccaagtccgtgcagcactaacgtattggcacctgcctcctcttcggccaccccccagatgaggcagctgtgactgtgtcaagggaagccacgactctgaccatagtcttctctcagcttccactgccgtctccacaggaaacccagaagttctgtgaacaagtccatgctgccatcaaggcatttattgcagtgtactatttgcttccaaaggatcaggccctgagaacaatgaccttatttcctacaacagtgtctgggttgcgtgccagcagatgcctcagataccaagagataacaaagctgcagctcttttgatgctgaccaagaatgtggattttgtgaaggatgcacatgaagaaatggagcaggctgtggaagaatgtgacccttactctggcctcttgaatgatactgaggagaacaactctgacaaccacaatcatgaggatgatgtgttggggtttcccagcaatcaggacttgtattggtcagaggacgatcaagagctcataatcccatgccttgcgctggtgagagcatccaaagcctgcctgaagaaaattcggatgttagtggcagagaatgggaagaaggatcaggtggcacagctggatgacattgtggatatttctgatgaaatcagccctagtgtggatgatttggctctgagcatatatccacctatgtgtcacctgaccgtgcgaatcaattctgcgaaacttgtatctgttttaaagaaggcacttgaaattacaaaagcaagtcatgtgacccctcagccagaagatagttggatccctttacttattaatgccattgatcattgcatgaatagaatcaaggagctcactcagagtgaacttgaattatgacttttcaggctcatttgtactctcttcccctctcatcgtcatggtcaggctctgatacctgcttttaaaatggagctagaatgcttgctggattgaaagggagtgcctatctatatttagcaagagacactattaccaaagattgttggttaggccagattgacacctatttataaaccatatgcgtatatttttctgtgctatatatgaaaaataattgcatgatttctcattcctgagtcatttctcagagattcctaggaaagctgccttattctctttttgcagtaaagtatgttgttttcattgtaaagatgttgatggtctcaataaaatgctaacttgccagtga

SEQ ID NO: 420441 - DNA, 1556 bp, Homo sapiens
ggcctgtcctggcctctgagagtgggatggttggtgctgtacctcaggggacagggcggggcgggaggaggcggggccaggcctggtctctgataacgggatgggtggtgctggacctcgggcggggccgggcctcgtggcgggaggaggcagggcagggcctctgggacggggctggacggcttgttgacggaaacgagcccttgacgctgtggcccggaagtggagcggctgtcgcagtgcggctccggcagtggcagcggaggcctgtgtttgcggccttcggcaagcgactgagatggcgagcgcaactgcacctgcagccgcagtccccaccctggcttcgcctttggagcagctccggcacttggcggaggagctgcggttgctcctgcctcgagtgcgggtcggcgaagcccaggagaccaccgaggagtttaatcgagagatgttctggagaagactcagaaacccagaagttctgtgaacaagtccatgctgccatcaaggcatttattgcagtgtactatttgcttccaaaggatcaggccctgagaacaatgaccttatttcctacaacagtgtctgggttgcgtgccagcagatgcctcagataccaagagataacaaagctgcagctcttttgatgctgaccaagaatgtggattttgtgaaggatgcacatgaagaaatggagcaggctgtggaagaatgtgacccttactctggcctcttgaatgatactgaggagaacaactctgacaaccacaatcatgaggatgatgtgttggggtttcccagcaatcaggacttgtattggtcagaggacgatcaagagctcataatcccatgccttgcgctggtgagagcatccaaagcctgcctgaagaaaattcggatgttagtggcagagaatgggaagaaggatcaggtggcacagctggatgacattgtggatatttctgatgaaatcagccctagtgtggatgatttggctctgagcatatatccacctatgtgtcacctgaccgtgcgaatcaattctgcgaaacttgtatctgttttaaagaaggcacttgaaattacaaaagcaagtcatgtgacccctcagccagaagatagttggatccctttacttattaatgccattgatcattgcatgaatagaatcaaggagctcactcagagtgaacttgaattatgacttttcaggctcatttgtactctcttcccctctcatcgtcatggtcaggctctgatacctgcttttaaaatggagctagaatgcttgctggattgaaagggagtgcctatctatatttagcaagagacactattaccaaagattgttggttaggccagattgacacctatttataaaccatatgcgtatatttttctgtgctatatatgaaaaataattgcatgatttctcattcctgagtcatttctcagagattcctaggaaagctgccttattctctttttgcagtaaagtatgttgttttcattgtaaagatgttgatggtctcaataaaatgctaacttgccagtga

SEQ ID NO: 420442 - DNA, 1496 bp, Homo sapiens
ggcctgtcctggcctctgagagtgggatggttggtgctgtacctcaggggacagggcggggcgggaggaggcggggccaggcctggtctctgataacgggatgggtggtgctggacctcgggcggggccgggcctcgtggcgggaggaggcagggcagggcctctgggacggggctggacggcttgttgacggaaacgagcccttgacgctgtggcccggaagtggagcggctgtcgcagtgcggctccggcagtggcagcggaggcctgtgtttgcggccttcggcaagcgactgagatggcgagcgcaactgcacctgcagccgcagtccccaccctggcttcgcctttggagcagctccggcacttggcggaggagctgcggttgctcctgcctcgagtgcggggaaacccagaagttctgtgaacaagtccatgctgccatcaaggcatttattgcagtgtactatttgcttccaaaggatcaggccctgagaacaatgaccttatttcctacaacagtgtctgggttgcgtgccagcagatgcctcagataccaagagataacaaagctgcagctcttttgatgctgaccaagaatgtggattttgtgaaggatgcacatgaagaaatggagcaggctgtggaagaatgtgacccttactctggcctcttgaatgatactgaggagaacaactctgacaaccacaatcatgaggatgatgtgttggggtttcccagcaatcaggacttgtattggtcagaggacgatcaagagctcataatcccatgccttgcgctggtgagagcatccaaagcctgcctgaagaaaattcggatgttagtggcagagaatgggaagaaggatcaggtggcacagctggatgacattgtggatatttctgatgaaatcagccctagtgtggatgatttggctctgagcatatatccacctatgtgtcacctgaccgtgcgaatcaattctgcgaaacttgtatctgttttaaagaaggcacttgaaattacaaaagcaagtcatgtgacccctcagccagaagatagttggatccctttacttattaatgccattgatcattgcatgaatagaatcaaggagctcactcagagtgaacttgaattatgacttttcaggctcatttgtactctcttcccctctcatcgtcatggtcaggctctgatacctgcttttaaaatggagctagaatgcttgctggattgaaagggagtgcctatctatatttagcaagagacactattaccaaagattgttggttaggccagattgacacctatttataaaccatatgcgtatatttttctgtgctatatatgaaaaataattgcatgatttctcattcctgagtcatttctcagagattcctaggaaagctgccttattctctttttgcagtaaagtatgttgttttcattgtaaagatgttgatggtctcaataaaatgctaacttgccagtga

SEQ ID NO: 420443 - DNA, 1593 bp, Homo sapiens
ggcctgtcctggcctctgagagtgggatggttggtgctgtacctcaggggacagggcggggcgggaggaggcggggccaggcctggtctctgataacgggatgggtggtgctggacctcgggcggggccgggcctcgtggcgggaggaggcagggcagggcctctgggacggggctggacggcttgttgacggaaacgagcccttgacgctgtggcccggaagtggagcggctgtcgcagtgcggctccggcagtggcagcggaggcctgtgtttgcggccttcggcaagcgactgagatggcgagcgcaactgcacctgcagccgcagtccccaccctggcttcgcctttggagcagctccggcacttggcggaggagctgcggttgctcctgcctcgagtgcgggtcggcgaagcccaggagaccaccgaggagtttaatcgagagatgttctggagaagactcaatgaggcagctgtgactgtgtcaagggaagccacgactctgaccatagtcttctctcagcttccactgccgtctccacaggaaacccagaagttctgtgaacaagtccatgctgccatcaaggcatttattgcagtgtactatttgcttccaaaggatcaggggatcaccctgagaaagctggtacggggcgccaccctggacatcgtggatggcatggctcagctcatggaagtactttccgtcactccaactcagagccctgagaacaatgaccttatttcctacaacagtgtctgggttgcgtgccagcagatgcctcagataccaagagataacaaagctgcagctcttttgatgctgaccaagaatgtggattttgtgaaggatgcacatgaagaaatggagcaggctgtggaagaatgtgacccttactctggcctcttgaatgatactgaggagaacaactctgacaaccacaatcatgaggatgatgtgttggggtttcccagcaatcaggacttgtattggtcagaggacgatcaagagctcataatcccatgccttgcgctggtgagagcatccaaagcctgcctgaagaaaattcggatgttagtggcagagaatgggaagaaggatcaggtggcacagctggatgacattgtggatatttctgatgaaatcagccctagtgtggatgatttggctctgagcatatatccacctatgtgtcacctgaccgtgcgaatcaattctgcgaaacttgtatctgttttaaagaaggcacttgaaattacaaaagcaagtcatgtgacccctcagccagaagatagttggatccctttacttattaatgccattgatcattgcatgaatagaatcaaggagctcactcagagtgaacttgaattatgacttttcaggctcatttgtactctcttcccctctcatcgtcatggtcaggctctgatacctgcttttaaaatggagctagaatgcttgctggattgaaagggagtgcctatctatatttagcaagagacacttgcatccagaggacactttgcatccagaggacactttgcatccagaggcactttgcatccagagacactttgcatccagag

SEQ ID NO: 420444 - DNA, 1679 bp, Homo sapiens
ggcctgtcctggcctctgagagtgggatggttggtgctgtacctcaggggacagggcggggcgggaggaggcggggccaggcctggtctctgataacgggatgggtggtgctggacctcgggcggggccgggcctcgtggcgggaggaggcagggcagggcctctgggacggggctggacggcttgttgacggaaacgagcccttgacgctgtggcccggaagtggagcggctgtcgcagtgcggctccggcagtggcagcggaggcctgtgtttgcggccttcggcaagcgactgagatggcgagcgcaactgcacctgcagccgcagtccccaccctggcttcgcctttggagcagctccggcacttggcggaggagctgcggttgctcctgcctcgagtgcgggtcggcgaagcccaggagaccaccgaggagtttaatcgagagatgttctggagaagactcaatgaggcagctgtgactgtgtcaagggaagccacgactctgaccatagtcttctctcagcttccactgccgtctccacaggaaacccagaagttctgtgaacaagtccatgctgccatcaaggcatttattgcagtgtactatttgcttccaaaggatcaggggatcaccctgagaaagctggtacggggcgccaccctggacatcgtggatggcatggctcagctcatggaagtactttccgtcactccaactcagagccctgagaacaatgaccttatttcctacaacagtgtctgggttgcgtgccagcagatgcctcagataccaagagataacaaagctgcagctcttttgatgctgaccaagaatgtggattttgtgaaggatgcacatgaagaaatggagcaggctgtggaagaatgtgacccttactctggcctcttgaatgatactgaggagaacaactctgacaaccacaatcatgaggatgatgtgttggggtttcccagcaatcaggacttgtattggtcagaggacgatcaagagctcataatcccatgccttgcgctggtgagagcatccaaagcctgcctgaagaaaattcggatgttagtggcagagaatgggaagaaggatcaggtggcacagctggatgacattgtggatatttctgatgaaatcagccctagtgtggatgatttggctctgagcatatatccacctatgtgtcacctgaccgtgcgaatcaattctgcgaaacttgtatctgttttaaagaaggcacttgaaattacaaatgccattgatcattgcatgaatagaatcaaggagctcactcagagtgaacttgaattatgacttttcaggctcatttgtactctcttcccctctcatcgtcatggtcaggctctgatacctgcttttaaaatggagctagaatgcttgctggattgaaagggagtgcctatctatatttagcaagagacactattaccaaagattgttggttaggccagattgacacctatttataaaccatatgcgtatatttttctgtgctatatatgaaaaataattgcatgatttctcattcctgagtcatttctcagagattcctaggaaagctgccttattctctttttgcagtaaagtatgttgttttcattgtaaagatgttgatggtctcaataaaatgctaacttgccagtga

SEQ ID NO: 420445 - DNA, 2407 bp, Homo sapiens
ggcctgtcctggcctctgagagtgggatggttggtgctgtacctcaggggacagggcggggcgggaggaggcggggccaggcctggtctctgataacgggatgggtggtgctggacctcgggcggggccgggcctcgtggcgggaggaggcagggcagggcctctgggacggggctggacggcttgttgacggaaacgagcccttgacgctgtggcccggaagtggagcggctgtcgcagtgcggctccggcagtggcagcggaggcctgtgtttgcggccttcggcaagcgactgagatggcgagcgcaactgcacctgcagccgcagtccccaccctggcttcgcctttggagcagctccggcacttggcggaggagctgcggttgctcctgcctcgagtgcgggtcggcgaagcccaggagaccaccgaggagtttaatcgagagatgttctggagaagactcaatgaggcagctgtgactgtgtcaagggaagccacgactctgaccatagtcttctctcagcttccactgccgtctccacaggaaacccagaagttctgtgaacaagtccatgctgccatcaaggcatttattgcagtgtactatttgcttccaaaggatcaggggatcaccctgagaaagctggtacggggcgccaccctggacatcgtggatggcatggctcagctcatggaagtactttccgtcactccaactcagagccctgagaacaatgaccttatttcctacaacagtgtctgggttgcgtgccagcagatgcctcagataccaagagataacaaagctgcagctcttttgatgctgaccaagaatgtggattttgtgaaggatgcacatgaagaaatggagcaggctgtggaagaatgtgacccttactctggcctcttgaatgatactgaggagaacaactctgacaaccacaatcatgaggatgatgtgttggggtttcccagcaatcaggacttgtattggtcagaggacgatcaagagctcataatcccatgccttgcgctggtgagagcatccaaagcctgcctgaagaaaattcggatgttagtggcagagaatgggaagaaggatcaggtggcacagctggatgacattgtggatatttctgatgaaatcagccctagtgtggatgatttggctctgagcatatatccacctatgtgtcacctgaccgtgcgaatcaatgaaccttagtcatttctgctttatattttgagctatcagcatttgggaccaattcaggttacattttcctttttctgtccttttttaaattgaaaatattttagatctaaaaaatcttattaaaatgttatagcaatagtattaataagatcttgctaaatagaaaagaacccgtaatcctgccaccctaacctaatcagcattttaaattttgcatacttccttcaggtcctttttctaaataatttttttattacttgggtctttaaaaatatttgaactcacctttttatggtagggctcagggtgaataacttctgtgtttcttttctagtctgcgaaacttgtatctgttttaaagaaggcacttgaaattacaaaagcaagtcatgtgacccctcagccagaagatagttggatccctttacttattaatgccattgatcattgcatgaatagaatcaaggagctcactcagagtgaacttgaattatgacttttcaggctcatttgtactctcttcccctctcatcgtcatggtcaggctctgatacctgcttttaaaatggagctagaatgcttgctggattgaaagggagtgcctatctatatttagcaagagacactattaccaaagattgttggttaggccagattgacacctatttataaaccatatgcgtatatttttctgtgctatatatgaaaaataattgcatgatttctcattcctgagtcatttctcagagattcctaggaaagctgccttattctctttttgcagtaaagtatgttgttttcattgtaaagatgttgatggtctcaataaaatgctaacttgccagtgaaaaaaaaaaaaaaaaaaaaaaaaaaaaacaaagacaagcaaaaaaaaaacaaaacacagcaagagggaacagacgaaaagaaaggaaagacaagagacaaacagcagcaggggacgaaagataagaagaagaagaagaagcaaagcggagaccgggagggaggggagggagaagagagtagagagaaagaggggcgaaaaaaggggagacagggaggcaggaccggtagaggaggcgagccggccgaagacaccagggagagaggagagacaagaagaccgcaggacaagagccagaagcacacgagagcacagcgccgcacaggcgagaacagagacgg

SEQ ID NO: 420446 - DNA, 1753 bp, Homo sapiens
ggcctgtcctggcctctgagagtgggatggttggtgctgtacctcaggggacagggcggggcgggaggaggcggggccaggcctggtctctgataacgggatgggtggtgctggacctcgggcggggccgggcctcgtggcgggaggaggcagggcagggcctctgggacggggctggacggcttgttgacggaaacgagcccttgacgctgtggcccggaagtggagcggctgtcgcagtgcggctccggcagtggcagcggaggcctgtgtttgcggccttcggcaagcgactgagatggcgagcgcaactgcacctgcagccgcagtccccaccctggcttcgcctttggagcagctccggcacttggcggaggagctgcggttgctcctgcctcgagtgcgggtcggcgaagcccaggagaccaccgaggagtttaatcgagagatgttctggagaagactcaatgaggcagctgtgactgtgtcaagggaagccacgactctgaccatagtcttctctcagcttccactgccgtctccacaggaaacccagaagttctgtgaacaagtccatgctgccatcaaggcatttattgcagtgtactatttgcttccaaaggatcaggggatcaccctgagaaagctggtacggggcgccaccctggacatcgtggatggcatggctcagctcatggaagtactttccgtcactccaactcagagccctgagaacaatgaccttatttcctacaacagtgtctgggttgcgtgccagcagatgcctcagataccaagagataacaaagctgcagctcttttgatgctgaccaagaatgtggattttgtgaaggatgcacatgaagaaatggagcaggctgtggaagaatgtgacccttactctggcctcttgaatgatactgaggagaacaactctgacaaccacaatcatgaggatgatgtgttggggtttcccagcaatcaggacttgtattggtcagaggacgatcaagagctcataatcccatgccttgcgctggtgagagcatccaaagcctgcctgaagaaaattcggatgttagtggcagagaatgggaagaaggatcaggtggcacagctggatgacattgtggatatttctgatgaaatcagccctagtgtggatgatttggctctgagcatatatccacctatgtgtcacctgaccgtgcgaatcaatgtaagtactggctttgagggaatagctacagaacaaatgggcagaatttcactaatcactagtatttcctgtaagctatagggtacatatttattagtcacatttggatggaagtacaacagtaatgtcacagttcttgcatgcgtttggggttgataaatattcactgaagttgaattataatagccatgagctttggtagttctctcttccataatcacctgggtaatcattcagaaaagcccaaaggccttagaaaatgatgctttaaggctgggcgcggtagctcacacctgtaatcccagcactccaggaggcggaggtcaggagttgagaccagcctggccaacatggcgaaaccttgtctctactaagaatacaaaaattagccgggcatcatgcacctataatcccagctacttggaaggcttaagcaggagaatcgcttgaagccgggaagtggaggttgcagtgagccgacatcgcgccactgcactccagcctgagcaacagagcaagactctgtctcaaaaa

SEQ ID NO: 420447 - DNA, 1693 bp, Homo sapiens
ggcctgtcctggcctctgagagtgggatggttggtgctgtacctcaggggacagggcggggcgggaggaggcggggccaggcctggtctctgataacgggatgggtggtgctggacctcgggcggggccgggcctcgtggcgggaggaggcagggcagggcctctgggacggggctggacggcttgttgacggaaacgagcccttgacgctgtggcccggaagtggagcggctgtcgcagtgcggctccggcagtggcagcggaggcctgtgtttgcggccttcggcaagcgactgagatggcgagcgcaactgcacctgcagccgcagtccccaccctggcttcgcctttggagcagctccggcacttggcggaggagctgcggttgctcctgcctcgagtgcgggtcggcgaagcccaggagaccaccgaggagtttaatcgagagatgttctggagaagactcaatgaggcagctgtgactgtgtcaagggaagccacgactctgaccatagtcttctctcagcttccactgccgtctccacaggaaacccagaagttctgtgaacaagtccatgctgccatcaaggcatttattgcagtgtactatttgcttccaaaggatcaggccctgagaacaatgaccttatttcctacaacagtgtctgggttgcgtgccagcagatgcctcagataccaagagataacaaagctgcagctcttttgatgctgaccaagaatgtggattttgtgaaggatgcacatgaagaaatggagcaggctgtggaagaatgtgacccttactctggcctcttgaatgatactgaggagaacaactctgacaaccacaatcatgaggatgatgtgttggggtttcccagcaatcaggacttgtattggtcagaggacgatcaagagctcataatcccatgccttgcgctggtgagagcatccaaagcctgcctgaagaaaattcggatgttagtggcagagaatgggaagaaggatcaggtggcacagctggatgacattgtggatatttctgatgaaatcagccctagtgtggatgatttggctctgagcatatatccacctatgtgtcacctgaccgtgcgaatcaatgaaccttagtcatttctgctttatattttgagctatcagcatttgggaccaattcagtctgcgaaacttgtatctgttttaaagaaggcacttgaaattacaaaagcaagtcatgtgacccctcagccagaagatagttggatccctttacttattaatgccattgatcattgcatgaatagaatcaaggagctcactcagagtgaacttgaattatgacttttcaggctcatttgtactctcttcccctctcatcgtcatggtcaggctctgatacctgcttttaaaatggagctagaatgcttgctggattgaaagggagtgcctatctatatttagcaagagacactattaccaaagattgttggttaggccagattgacacctatttataaaccatatgcgtatatttttctgtgctatatatgaaaaataattgcatgatttctcattcctgagtcatttctcagagattcctaggaaagctgccttattctctttttgcagtaaagtatgttgttttcattgtaaagatgttgatggtctcaataaaatgctaacttgccagtga

SEQ ID NO: 420448 - DNA, 554 bp, Homo sapiens
accggacttggcgggctcatatccctctagaggagctgtctgtaatcgataaaccccgatcaacctcaccacctctgctcagcctatataccgccatcttcagcaaaccctgatgaaggctacaaagtaagcgcaagtacccacgtaaagacgttaggtctacctggccaggtagacctatcagagtgaacttgaattatgacttttcaggctcatttgtactctcttcccctctcatcgtcatggtcaggctctgatacctgcttttaaaatggagctagaatgcttgctggattgaaagggagtgcctatctatatttagcaagagacactattaccaaagattgttggttaggccagattgacacctatttataaaccatatgcgtatatttttctgtgctatatatgaaaaataattgcatgatttctcattcctgagtcatttctcagagattcctaggaaagctgccttattctctttttgcagtaaagtatgttgttttcattgtaaagatgttgatggtctcaataaaatgctaacttgccagtga

SEQ ID NO: 420449 - DNA, 1224 bp, Homo sapiens
ggcctgtcctggcctctgagagtgggatggttggtgctgtacctcaggggacagggcggggcgggaggaggcggggccaggcctggtctctgataacgggatgggtggtgctggacctcgggcggggccgggcctcgtggcgggaggaggcagggcagggcctctgggacggggctggacggcttgttgacggaaacgagcccttgacgctgtggcccggaagtggagcggctgtcgcagtgcggctccggcagtggcagcggaggcctgtgtttgcggccttcggcaagcgactgagatggcgagcgcaactgcacctgcagccgcagtccccaccctggcttcgcctttggagcagctccggcacttggcggaggagctgcggttgctcctgcctcgagtgcgggtcggcgaagcccaggagaccaccgaggagtttaatcgagagatgttctggagaagactcaatgaggcagctgtgactgtgtcaagggaagccacgactctgaccatagtcttctctcagcttccactgccgtctccacaggtgggcttcactttcgtggaatccttgggctgccgagttacaccttaggaatcctctaattttctttccaccttttgcacgcacgccaggagatttcttttcttcatctgtccagtgaggttaccgtttttacttcacaggattgttgtgaagaccgaattgccaagtgcagttcctggcgcggagtaggcaggtcttataaatattggttcagtctgaagtttatcctggttgtttcccttctgataattttttaagcactttttatttgctgggtgttttcacatacttgatggccatctgacagatgagcaaggaggctcagaagctcagcttaagatttaaaaaaaagcaggggggctagaatttaaatcaaggtctatctgatgtctaagctacctattctgttatactgcataataccctttttatattattttttatatttaatcagtaacatatgtagatagtacaaaattcaacagatatcaaagtgtgttaagtttacctttccacccactttctcatttttgtctcccccagttccttttgcattattccacgtatattctgtgcatatatacattcatatacatttatctgtatgtgtcagcttctttttacacaaatgatacataaacactgttctggaccttccaacttagaattactgcaaa

SEQ ID NO: 420450 - DNA, 2799 bp, Homo sapiens
  misc_feature (48)..(48): n is a, c, g, or t
  misc_feature (205)..(206): n is a, c, g, or t
  misc_feature (215)..(215): n is a, c, g, or t
atgccaggccccccaccagccacgttgggcagcccccacagctccccnttcgggccaaggtgtcggggtgcgtctcctggcccatcaatacagattacatatttatatcaatcgcgggctctgagggcgccctcggagagcggccccgcgcctacgaaaccaaactgggagtggtcgcgcggaaactctggctcgggattggctnngggcgccgnccggtgcggggggattgctatcgtattcagcatgttttgcacaagaaatgtcagccagaaagggctatctgctcccttcgccaaattatcccacaacaatgtcatgctcggagagccccgccgcgaactcttttttggtcgactcgctcatcagctcgggcagaggcgaggcaggcggcggtggtggtggcgcggggggcggcggcggtggcggttactacgcccacggcggggtctacctgccgcccgccgccgacctgccctacgggctgcagagctgcgggctcttccccacgctgggcggcaagcgcaatgaggcagcgtcgccgggcagcggtggcggtggcgggggtctaggtcccggggcgcacggctacgggccctcgcccatagacctgtggctagacgcgccccggtcttgccggatggagccgcctgacgggccgccgccgccgccccagcagcagccgccgcccccgccgcaaccaccccagccagcgccgcaggccacctcgtgctctttcgcgcagaacatcaaagaagagagctcctactgcctctacgactcggcggacaaatgccccaaagtctcggccaccgccgccgaactggctcccttcccgcggggcccgccgcccgacggctgcgccctgggcacctccagcggggtgccagtgcctggctacttccgcctttctcaggcctacggcaccgccaagggctatggcagcggcggcggcggcgcgcagcaactcggggctggcccgttccccgcgcagcccccggggcgcggtttcgatctcccgcccgcgctagcctccggctcggccgatgcggcccggaaggagcgagccctcgattcgccgccgccccccacgctggcttgcggcagcggcgggggctcgcagggcgacgaggaggcgcacgcgtcgtcctcggccgcggaggagctctccccggccccttccgagagcagcaaagcctcgccggagaaggattccctgggcaattccaaaggtgaaaacgcagccaactggctcacggcaaagagtggtcggaagaagcgctgcccctacacgaagcaccagacactggagctggagaaggagtttctgttcaatatgtaccttactcgagagcggcgcctagagattagccgcagcgtccacctcacggacagacaagtgaaaatctggtttcagaaccgcaggatgaaactgaagaaaatgaatcgagaaaaccggatccgggagctcacagccaactttaatttttcctgatgaatctccaggcgacgcggttttttcacttcccgagcgctggtcccctccctctgtcttcaggctctgcccaggaactcgcacctgtgctggagccctgttcctccctcccacactcgccatctcctgggccgttacatctgtgcagggctggtttgttctgactttttgtttctttgtgtttgcttggtgctggtttatttgttgttttctgggggaaaaagccatatcatgctaaaattctatagagatagatattgtcctaagtgtcaagtcctgactgggctgggtttgctgtcttggggtcccactgctcgaaatggcccctgtcttcggccgagctggtttcctgcccagcctggggcaaacctagccggaaggccgaggtcccattgttggcgctgaggtgtctggcctgaggtcaatggtgcaaaggagccgccaccgggcatgtctgcctggagtgctgtgctgtgtttaatcaggggatacaggcccctgggtttcttttttctttcttcctttcttccttggccaagagaagggcttacaggcatggacatgcaggttggcaaacgggcttgactttggctgatttaaaaagtgagaaagaaagtaaaaaaggttaatttttccttcctctgtaagatatcccagctttaaaaagaaaaaaaaagaattaccaagagaaggggacttctcttccagtttctgtaaggtcttacattgcctgactaaaatgtttcatttacctctaaatttccatatccttctggctgtagataaataatgtagttttgtttatgcatttggaattagtggatttttttgtcattaaaattgttaccactggtaacatgtgacaagcacaccacaattctccctatcttgtgaagttgtttttttaaatcgccttgaacaaaaagttttttttttgtttgtttttgctttctgaaattcacagaagcctaggaggactggggtaagcggaataaactagagaagggagacattgtttggatttcctttatactgtgaagttacatgcataaaagggtcaaacctgtagatgcagaaaaagaaaaaaacctataaatacaaatctgtataaatgtctattattatgaagaattgccaatcttgttttaagcaaatgcattctatcgttattataaatgttagttctagctctatttacttctaatcttaaatcagaataaattaatattgtattgctgctgtgcgtggaaaaagacgatgtttatgttcttatagaataaaagctgtggaatgaagctttttaa

SEQ ID NO: 420451 - DNA, 650 bp, Homo sapiens
  misc_feature (615)..(615): n is a, c, g, or t
ctagagagagtctagccaggaggactgctcgcgggcgggcggcgggcgggcgcgggtttgatttctgagccctataaaagcccatcctccgatggctgtgacaatgtggtcgtaaacccgtccggggccggccaatttgcatatttggaatgcgccgctataaacccggctggggttttgcagcgatttcttagatgtaaaaatgagatctcaatagcagcgggctgggcacatcctctcctctctccttctctctctgcccggagctggtttccgtctctcggctcggggctggaactccggcccaacctaggcgcgcagccgccacgagatggcgcacttccgatcaatgtcaaagccgccggggagccgggaaccccagcatgattcttggcctttgttcgcttctgatactaagagcagcacggtacattatttcacttgtcccgctccccttcataacagaaaaaggggactcaccctcaagaagtgattggtatggtaatttaaagcaacgcgcattcgctaggcctcgcgagcgtcgccgcgcggagaagccagctgtcccttggcagtgatttcggaaatgtgtcaagcaatttcaaggttgcgcgncaactggtcacggggagttttggtctatggacctc

SEQ ID NO: 420452 - DNA, 2175 bp, Homo sapiens
ctagagagagtctagccaggaggactgctcgcgggcgggcggcgggcgggcgcgggtttgatttctgagccctataaaagcccatcctccgatggctgtgacaatgtggtcgtaaacccgtccggggccggccaatttgcatatttggaatgcgccgctataaacccggctggggttttgcagcgatttcttagatgtaaaaatgagatctcaatagcagcgggctgggcacatcctctcctctctccttctctctctgcccggagctggtttccgtctctcggctcggggctggaactccggcccaacctaggcgcgcagccgccacgagatggcgcacttccgatcaatgtcaaagccgccggggagccgggaaccccagcatgattcttggcctttgttcgcttctgatactaagagcagcacggtacattatttcacttgtcccgctccccttcataacagaaaaaggggactcaccctcaagaagtgattggtatggtaatttaaagcaacgcgcattcgctaggcctcgcgagcgtcgccgcgcggagaagccagctgtcccttggcagtgatttcggaaatgtgtcaaggcaattccaaaggtgaaaacgcagccaactggctcacggcaaagagtggtcggaagaagcgctgcccctacacgaagcaccagacactggagctggagaaggagtttctgttcaatatgtaccttactcgagagcggcgcctagagattagccgcagcgtccacctcacggacagacaagtgaaaatctggtttcagaaccgcaggatgaaactgaagaaaatgaatcgagaaaaccggatccgggagctcacagccaactttaatttttcctgatgaatctccaggcgacgcggttttttcacttcccgagcgctggtcccctccctctgtcttcaggctctgcccaggaactcgcacctgtgctggagccctgttcctccctcccacactcgccatctcctgggccgttacatctgtgcagggctggtttgttctgactttttgtttctttgtgtttgcttggtgctggtttatttgttgttttctgggggaaaaagccatatcatgctaaaattctatagagatagatattgtcctaagtgtcaagtcctgactgggctgggtttgctgtcttggggtcccactgctcgaaatggcccctgtcttcggccgagctggtttcctgcccagcctggggcaaacctagccggaaggccgaggtcccattgttggcgctgaggtgtctggcctgaggtcaatggtgcaaaggagccgccaccgggcatgtctgcctggagtgctgtgctgtgtttaatcaggggatacaggcccctgggtttcttttttctttcttcctttcttccttggccaagagaagggcttacaggcatggacatgcaggttggcaaacgggcttgactttggctgatttaaaaagtgagaaagaaagtaaaaaaggttaatttttccttcctctgtaagatatcccagctttaaaaagaaaaaaaaagaattaccaagagaaggggacttctcttccagtttctgtaaggtcttacattgcctgactaaaatgtttcatttacctctaaatttccatatccttctggctgtagataaataatgtagttttgtttatgcatttggaattagtggatttttttgtcattaaaattgttaccactggtaacatgtgacaagcacaccacaattctccctatcttgtgaagttgtttttttaaatcgccttgaacaaaaagttttttttttgtttgtttttgctttctgaaattcacagaagcctaggaggactggggtaagcggaataaactagagaagggagacattgtttggatttcctttatactgtgaagttacatgcataaaagggtcaaacctgtagatgcagaaaaagaaaaaaacctataaatacaaatctgtataaatgtctattattatgaagaattgccaatcttgttttaagcaaatgcattctatcgttattataaatgttagttctagctctatttacttctaatcttaaatcagaataaattaatattgtattgctgctgtgcgtggaaaaagacgatgtttatgttcttatagaataaaagctgtggaatgaagctttttaa

SEQ ID NO: 420453 - DNA, 3305 bp, Homo sapiens
  misc_feature (48)..(48): n is a, c, g, or t
  misc_feature (205)..(206): n is a, c, g, or t
  misc_feature (215)..(215): n is a, c, g, or t
atgccaggccccccaccagccacgttgggcagcccccacagctccccnttcgggccaaggtgtcggggtgcgtctcctggcccatcaatacagattacatatttatatcaatcgcgggctctgagggcgccctcggagagcggccccgcgcctacgaaaccaaactgggagtggtcgcgcggaaactctggctcgggattggctnngggcgccgnccggtgcggggggattgctatcgtattcagcatgttttgcacaagaaatgtcagccagaaagggctatctgctcccttcgccaaattatcccacaacaatgtcatgctcggagagccccgccgcgaactcttttttggtcgactcgctcatcagctcgggcagaggcgaggcaggcggcggtggtggtggcgcggggggcggcggcggtggcggttactacgcccacggcggggtctacctgccgcccgccgccgacctgccctacgggctgcagagctgcgggctcttccccacgctgggcggcaagcgcaatgaggcagcgtcgccgggcagcggtggcggtggcgggggtctaggtcccggggcgcacggctacgggccctcgcccatagacctgtggctagacgcgccccggtcttgccggatggagccgcctgacgggccgccgccgccgccccagcagcagccgccgcccccgccgcaaccaccccagccagcgccgcaggccacctcgtgctctttcgcgcagaacatcaaagaagagagctcctactgcctctacgactcggcggacaaatgccccaaagtctcggccaccgccgccgaactggctcccttcccgcggggcccgccgcccgacggctgcgccctgggcacctccagcggggtgccagtgcctggctacttccgcctttctcaggcctacggcaccgccaagggctatggcagcggcggcggcggcgcgcagcaactcggggctggcccgttccccgcgcagcccccggggcgcggtttcgatctcccgcccgcgctagcctccggctcggccgatgcggcccggaaggagcgagccctcgattcgccgccgccccccacgctggcttgcggcagcggcgggggctcgcagggcgacgaggaggcgcacgcgtcgtcctcggccgcggaggagctctccccggccccttccgagagcagcaaagcctcgccggagaaggattccctgggcaattccaaaggtgaaaacgcagccaactggctcacggcaaagagtggtcggaagaagcgctgcccctacacgaagcaccagacactggagctggagaaggagtttctgttcaatatgtaccttactcgagagcggcgcctagagattagccgcagcgtccacctcacggacagacaagtgaaaatctggtttcagaaccgcaggatgaaactgaagaaaatgaatcgagaaaaccggatccgggagctcacagccaactttaatttttcctgatgaatctccaggcgacgcggttttttcacttcccgagcgctggtcccctccctctgtcttcaggctctgcccaggaactcgcacctgtgctggagccctgttcctccctcccacactcgccatctcctgggccgttacatctgtgcagggctggtttgttctgactttttgtttctttgtgtttgcttggtgctggtttatttgttgttttctgggggaaaaagccatatcatgctaaaattctatagagatagatattgtcctaagtgtcaagtcctgactgggctgggtttgctgtcttggggtcccactgctcgaaatggcccctgtcttcggccgagctggtttcctgcccagcctggggcaaacctagccggaaggccgaggtcccattgttggcgctgaggtgtctggcctgaggtcaatggtgcaaaggagccgccaccgggcatgtctgcctggagtgctgtgctgtgtttaatcaggggatacaggcccctgggtttcttttttctttcttcctttcttccttggccaagagaagggcttacaggcatggacatgcaggttggcaaacgggcttgactttggctgatttaaaaagtgagaaagaaagtaaaaaaggttaatttttccttcctctgtaagatatcccagctttaaaaagaaaaaaaaagaattaccaagagaaggggacttctcttccagtttctgtaaggtcttacattgcctgactaaaatgtttcatttacctctaaatttccatatccttctggctgtagataaataatgtagttttgtttatgcatttggaattagtggatttttttgtcattaaaattgttaccactggtaacatgtgacaagcacaccacaattctccctatcttgtgaagttgtttttttaaatcgccttgaacaaaaagttttttttttgtttgtttttgctttctgaaattcacagaagcctaggaggactggggtaagcggaataaactagagaagggagacattgtttggatttcctttatactgtgaagttacatgcataaaagggtcaaacctgtagatgcagaaaaagaaaaaaacctataaatacaaatctgtataaatgtctattattatgaagaattgccaatcttgttttaagcaaatgcattctatcgttattataaatgttagttctagctctatttacttctaatcttaaatcagaataaattaatattgtattgctgctgtgcgtggaaaaagacgatgtttatgttcttatagaataaaagctgtggaatgaagctttttaaaaaaaaaaaaaaaaaaaaaaaaaaaaaaacaagaaaaaaaaaaaaaaaaaaaaaaaaaaaaaaaagaaaaaaaacaaagaaaaggatattcaactcatgagaagaaacaaaagattgaaaagcagctgaccacgacatacaggacgacaagagcgggagctccctatagtgggcgcgatgttaccatagcgacagcatgggcgccgccacttaccaagagtactggtagactttgtgaaacactatgctcgttgcgtatcttttcttagcgagaagagccgccccctatcatagtagtgggtgcagcacacatattggggcacgacgtctccccagcaaacgagtatttcaagcgtacccacggagaaaattgaaccgactgcgcgccgttctacagtcggtggacaacccacaatatcgacatagtacagcacgccgcgcagcgagtactttaggtataaggcaagtgttagttgtcgacagaattttttcaccatggagtgtgg

SEQ ID NO: 420454 - DNA, 2121 bp, Homo sapiens
ctagagagagtctagccaggaggactgctcgcgggcgggcggcgggcgggcgcgggtttgatttctgagccctataaaagcccatcctccgatggctgtgacaatgtggtcgtaaacccgtccggggccggccaatttgcatatttggaatgcgccgctataaacccggctggggttttgcagcgatttcttagatctctctctgcccggagctggtttccgtctctcggctcggggctggaactccggcccaacctaggcgcgcagccgccacgagatggcgcacttccgatcaatgtcaaagccgccggggagccgggaaccccagcatgattcttggcctttgttcgcttctgatactaagagcagcacggtacattatttcacttgtcccgctccccttcataacagaaaaaggggactcaccctcaagaagtgattggtatggtaatttaaagcaacgcgcattcgctaggcctcgcgagcgtcgccgcgcggagaagccagctgtcccttggcagtgatttcggaaatgtgtcaaggcaattccaaaggtgaaaacgcagccaactggctcacggcaaagagtggtcggaagaagcgctgcccctacacgaagcaccagacactggagctggagaaggagtttctgttcaatatgtaccttactcgagagcggcgcctagagattagccgcagcgtccacctcacggacagacaagtgaaaatctggtttcagaaccgcaggatgaaactgaagaaaatgaatcgagaaaaccggatccgggagctcacagccaactttaatttttcctgatgaatctccaggcgacgcggttttttcacttcccgagcgctggtcccctccctctgtcttcaggctctgcccaggaactcgcacctgtgctggagccctgttcctccctcccacactcgccatctcctgggccgttacatctgtgcagggctggtttgttctgactttttgtttctttgtgtttgcttggtgctggtttatttgttgttttctgggggaaaaagccatatcatgctaaaattctatagagatagatattgtcctaagtgtcaagtcctgactgggctgggtttgctgtcttggggtcccactgctcgaaatggcccctgtcttcggccgagctggtttcctgcccagcctggggcaaacctagccggaaggccgaggtcccattgttggcgctgaggtgtctggcctgaggtcaatggtgcaaaggagccgccaccgggcatgtctgcctggagtgctgtgctgtgtttaatcaggggatacaggcccctgggtttcttttttctttcttcctttcttccttggccaagagaagggcttacaggcatggacatgcaggttggcaaacgggcttgactttggctgatttaaaaagtgagaaagaaagtaaaaaaggttaatttttccttcctctgtaagatatcccagctttaaaaagaaaaaaaaagaattaccaagagaaggggacttctcttccagtttctgtaaggtcttacattgcctgactaaaatgtttcatttacctctaaatttccatatccttctggctgtagataaataatgtagttttgtttatgcatttggaattagtggatttttttgtcattaaaattgttaccactggtaacatgtgacaagcacaccacaattctccctatcttgtgaagttgtttttttaaatcgccttgaacaaaaagttttttttttgtttgtttttgctttctgaaattcacagaagcctaggaggactggggtaagcggaataaactagagaagggagacattgtttggatttcctttatactgtgaagttacatgcataaaagggtcaaacctgtagatgcagaaaaagaaaaaaacctataaatacaaatctgtataaatgtctattattatgaagaattgccaatcttgttttaagcaaatgcattctatcgttattataaatgttagttctagctctatttacttctaatcttaaatcagaataaattaatattgtattgctgctgtgcgtggaaaaagacgatgtttatgttcttatagaataaaagctgtggaatgaagctttttaa

SEQ ID NO: 420455 - DNA, 1725 bp, Homo sapiens
cgcggatgtttgtaaggcatccaaaataagcagccgccagcgccaataaataagcccattaaccggcgaagttcgagtttacgatcccccatgcttttttcaaagttgctgaggggcgggaatcttcgttgcgggaagaagaaaaggcaattccaaaggtgaaaacgcagccaactggctcacggcaaagagtggtcggaagaagcgctgcccctacacgaagcaccagacactggagctggagaaggagtttctgttcaatatgtaccttactcgagagcggcgcctagagattagccgcagcgtccacctcacggacagacaagtgaaaatctggtttcagaaccgcaggatgaaactgaagaaaatgaatcgagaaaaccggatccgggagctcacagccaactttaatttttcctgatgaatctccaggcgacgcggttttttcacttcccgagcgctggtcccctccctctgtcttcaggctctgcccaggaactcgcacctgtgctggagccctgttcctccctcccacactcgccatctcctgggccgttacatctgtgcagggctggtttgttctgactttttgtttctttgtgtttgcttggtgctggtttatttgttgttttctgggggaaaaagccatatcatgctaaaattctatagagatagatattgtcctaagtgtcaagtcctgactgggctgggtttgctgtcttggggtcccactgctcgaaatggcccctgtcttcggccgagctggtttcctgcccagcctggggcaaacctagccggaaggccgaggtcccattgttggcgctgaggtgtctggcctgaggtcaatggtgcaaaggagccgccaccgggcatgtctgcctggagtgctgtgctgtgtttaatcaggggatacaggcccctgggtttcttttttctttcttcctttcttccttggccaagagaagggcttacaggcatggacatgcaggttggcaaacgggcttgactttggctgatttaaaaagtgagaaagaaagtaaaaaaggttaatttttccttcctctgtaagatatcccagctttaaaaagaaaaaaaaagaattaccaagagaaggggacttctcttccagtttctgtaaggtcttacattgcctgactaaaatgtttcatttacctctaaatttccatatccttctggctgtagataaataatgtagttttgtttatgcatttggaattagtggatttttttgtcattaaaattgttaccactggtaacatgtgacaagcacaccacaattctccctatcttgtgaagttgtttttttaaatcgccttgaacaaaaagttttttttttgtttgtttttgctttctgaaattcacagaagcctaggaggactggggtaagcggaataaactagagaagggagacattgtttggatttcctttatactgtgaagttacatgcataaaagggtcaaacctgtagatgcagaaaaagaaaaaaacctataaatacaaatctgtataaatgtctattattatgaagaattgccaatcttgttttaagcaaatgcattctatcgttattataaatgttagttctagctctatttacttctaatcttaaatcagaataaattaatattgtattgctgctgtgcgtggaaaaagacgatgtttatgttcttatagaataaaagctgtggaatgaagctttttaa

SEQ ID NO: 420456 - DNA, 2115 bp, Homo sapiens
ctagagagagtctagccaggaggactgctcgcgggcgggcggcgggcgggcgcgggtttgatttctgagccctataaaagcccatcctccgatggctgtgacaatgtggtcgtaaacccgtccggggccggccaatttgcatatttggaatgcgccgctataaacccggctggggttttgcagcgatttcttagatgtaaaaatgagatctcaatagcagcgggctgggcacatcctctcctctctccttctctctctgcccggagctggtttccgtctctcggctcggggctggaactccggcccaacctaggcgcgcagccgccacgagatggcgcacttccgatcaatgtcaaagccgccggggagccgggaaccccagcatgattcttggcctttgttcgcttctgatactaagagcagcacggtacattatttcacttgtcccgctccccttcataacagaaaaaggggactcaccctcaagaagtgattggtatggtaatttaaagcaacgcgcattcgctaggcctcgcgagcgtcgccgcgcggagaagccagctgtcccttggcagtgatttcggaaatgtgtcaaggctgcccctacacgaagcaccagacactggagctggagaaggagtttctgttcaatatgtaccttactcgagagcggcgcctagagattagccgcagcgtccacctcacggacagacaagtgaaaatctggtttcagaaccgcaggatgaaactgaagaaaatgaatcgagaaaaccggatccgggagctcacagccaactttaatttttcctgatgaatctccaggcgacgcggttttttcacttcccgagcgctggtcccctccctctgtcttcaggctctgcccaggaactcgcacctgtgctggagccctgttcctccctcccacactcgccatctcctgggccgttacatctgtgcagggctggtttgttctgactttttgtttctttgtgtttgcttggtgctggtttatttgttgttttctgggggaaaaagccatatcatgctaaaattctatagagatagatattgtcctaagtgtcaagtcctgactgggctgggtttgctgtcttggggtcccactgctcgaaatggcccctgtcttcggccgagctggtttcctgcccagcctggggcaaacctagccggaaggccgaggtcccattgttggcgctgaggtgtctggcctgaggtcaatggtgcaaaggagccgccaccgggcatgtctgcctggagtgctgtgctgtgtttaatcaggggatacaggcccctgggtttcttttttctttcttcctttcttccttggccaagagaagggcttacaggcatggacatgcaggttggcaaacgggcttgactttggctgatttaaaaagtgagaaagaaagtaaaaaaggttaatttttccttcctctgtaagatatcccagctttaaaaagaaaaaaaaagaattaccaagagaaggggacttctcttccagtttctgtaaggtcttacattgcctgactaaaatgtttcatttacctctaaatttccatatccttctggctgtagataaataatgtagttttgtttatgcatttggaattagtggatttttttgtcattaaaattgttaccactggtaacatgtgacaagcacaccacaattctccctatcttgtgaagttgtttttttaaatcgccttgaacaaaaagttttttttttgtttgtttttgctttctgaaattcacagaagcctaggaggactggggtaagcggaataaactagagaagggagacattgtttggatttcctttatactgtgaagttacatgcataaaagggtcaaacctgtagatgcagaaaaagaaaaaaacctataaatacaaatctgtataaatgtctattattatgaagaattgccaatcttgttttaagcaaatgcattctatcgttattataaatgttagttctagctctatttacttctaatcttaaatcagaataaattaatattgtattgctgctgtgcgtggaaaaagacgatgtttatgttcttatagaataaaagctgtggaatgaagctttttaa

SEQ ID NO: 420457 - DNA, 2133 bp, Homo sapiens
  misc_feature (48)..(48): n is a, c, g, or t
  misc_feature (205)..(206): n is a, c, g, or t
  misc_feature (215)..(215): n is a, c, g, or t
atgccaggccccccaccagccacgttgggcagcccccacagctccccnttcgggccaaggtgtcggggtgcgtctcctggcccatcaatacagattacatatttatatcaatcgcgggctctgagggcgccctcggagagcggccccgcgcctacgaaaccaaactgggagtggtcgcgcggaaactctggctcgggattggctnngggcgccgnccggtgcggggggattgctatcgtattcagcatgttttgcacaagaaatgtcagccagaaagggctatctgctcccttcgccaaattatcccacaacaatgtcatgctcggagagccccgccgcgaactcttttttggtcgactcgctcatcagctcgggcagaggcgaggcaggcggcggtggtggtggcgcggggggcggcggcggtggcggttactacgcccacggcggggtctacctgccgcccgccgccgacctgccctacgggctgcagagctgcgggctcttccccacgctgggcggcaagcgcaatgaggcagcgtcgccgggcagcggtggcggtggcgggggtctaggtcccggggcgcacggctacgggccctcgcccatagacctgtggctagacgcgccccggtcttgccggatggagccgcctgacgggccgccgccgccgccccagcagcagccgccgcccccgccgcaaccaccccagccagcgccgcaggccacctcgtgctctttcgcgcagaacatcaaagaagagagctcctactgcctctacgactcggcggacaaatgccccaaagtctcggccaccgccgccgaactggctcccttcccgcggggcccgccgcccgacggctgcgccctgggcacctccagcggggtgccagtgcctggctacttccgcctttctcaggcctacggcaccgccaagggctatggcagcggcggcggcggcgcgcagcaactcggggctggcccgttccccgcgcagcccccggggcgcggtttcgatctcccgcccgcgctagcctccggctcggccgatgcggcccggaaggagcgagccctcgattcgccgccgccccccacgctggcttgcggcagcggcgggggctcgcagggcgacgaggaggcgcacgcgtcgtcctcggccgcggaggagctctccccggccccttccgagagcagcaaagcctcgccggagaaggattccctgggcaattccaaaggtgaaaacgcagccaactggctcacggcaaagagtggtcggaagaagcgctgcccctacacgaagcaccagacactggagctggagaaggagtttctgttcaatatgtaccttactcgagagcggcgcctagagattagccgcagcgtccacctcacggacagacaagtgaaaatctggtttcagaaccgcaggatgaaactgaagaaaatgaatcgagaaaaccggatccgggagctcacagccaactttaatttttcctgatgaatctccaggcgacgcggttttttcacttcccgagcgctggtcccctccctctgtcttcaggctctgcccaggaactcgcacctgtgctggagccctgttcctccctcccacactcgccatctcctgggccgttacatctgtgcagggctggtttgttctgactttttgtttctttgtgtttgcttggtgctggtttatttgttgttttctgggggaaaaagccatatcatgctaaaattctatagagatagatattgtcctaagtgtcaagtcctgactgggctgggtttgctgtcttggggtcccactgctcgaaatggcccctgtcttcggccgagctggtttcctgcccagcctggggcaaacctagccggaaggccgaggtcccattgttggcgctgaggtgtctggcctgaggtcaatggtgcaaaggagccgccaccgggcatgtctgcctggagtgctgtgctgtgtttaatcaggggatacaggcccctgggtttcttttttctttcttcctttcttccttggccaagagaagggcttacaggcatggacatgcaggttggcaaacgggcttgactttggcttactggggcctgtggcttccccttccttgacgcatttgcggccgc

SEQ ID NO: 420458 - DNA, 1279 bp, Homo sapiens
  misc_feature (17)..(17): n is a, c, g, or t
cagggctggcgagtgtnggagggaggaacagggctccagcacaggtgcgagttcctgggcagagctgaagacagagggaggggaccagcgctcgccatctcctgggccgttacatctgtgcagggctggtttgttctgactttttgtttctttgtgtttgcttggtgctggtttatttgttgttttctgggggaaaaagccatatcatgctaaaattctatagagatagatattgtcctaagtgtcaagtcctgactgggctgggtttgctgtcttggggtcccactgctcgaaatggcccctgtcttcggccgagctggtttcctgcccagcctggggcaaacctagccggaaggccgaggtcccattgttggcgctgaggtgtctggcctgaggtcaatggtgcaaaggagccgccaccgggcatgtctgcctggagtgctgtgctgtgtttaatcaggggatacaggcccctgggtttcttttttctttcttcctttcttccttggccaagagaagggcttacaggcatggacatgcaggttggcaaacgggcttgactttggctgatttaaaaagtgagaaagaaagtaaaaaaggttaatttttccttcctctgtaagatatcccagctttaaaaagaaaaaaaaagaattaccaagagaaggggacttctcttccagtttctgtaaggtcttacattgcctgactaaaatgtttcatttacctctaaatttccatatccttctggctgtagataaataatgtagttttgtttatgcatttggaattagtggatttttttgtcattaaaattgttaccactggtaacatgtgacaagcacaccacaattctccctatcttgtgaagttgtttttttaaatcgccttgaacaaaaagttttttttttgtttgtttttgctttctgaaattcacagaagcctaggaggactggggtaagcggaataaactagagaagggagacattgtttggatttcctttatactgtgaagttacatgcataaaagggtcaaacctgtagatgcagaaaaagaaaaaaacctataaatacaaatctgtataaatgtctattattatgaagaattgccaatcttgttttaagcaaatgcattctatcgttattataaatgttagttctagctctatttacttctaatcttaaatcagaataaattaatattgtattgctgctgtgcgtggaaaaagacgatgtttatgttcttatagaataaaagctgtggaatgaagctttttaa

SEQ ID NO: 420459 - DNA, 850 bp, Homo sapiens
atcccagctttaaaaagaaaggaaaaattaaccttttttactttctttctcacttttttctttcttcctttcttccttggccaagagaagggcttacaggcatggacatgcaggttggcaaacgggcttgactttggctgatttaaaaagtgagaaagaaagtaaaaaaggttaatttttccttcctctgtaagatatcccagctttaaaaagaaaaaaaaagaattaccaagagaaggggacttctcttccagtttctgtaaggtcttacattgcctgactaaaatgtttcatttacctctaaatttccatatccttctggctgtagataaataatgtagttttgtttatgcatttggaattagtggatttttttgtcattaaaattgttaccactggtaacatgtgacaagcacaccacaattctccctatcttgtgaagttgtttttttaaatcgccttgaacaaaaagttttttttttgtttgtttttgctttctgaaattcacagaagcctaggaggactggggtaagcggaataaactagagaagggagacattgtttggatttcctttatactgtgaagttacatgcataaaagggtcaaacctgtagatgcagaaaaagaaaaaaacctataaatacaaatctgtataaatgtctattattatgaagaattgccaatcttgttttaagcaaatgcattctatcgttattataaatgttagttctagctctatttacttctaatcttaaatcagaataaattaatattgtattgctgctgtgcgtggaaaaagacgatgtttatgttcttatagaataaaagctgtggaatgaagctttttaa

SEQ ID NO: 420460 - DNA, 861 bp, Homo sapiens
ctagagagagtctagccaggaggactgctcgcgggcgggcggcgggcgggcgcgggtttgatttctgagccctataaaagcccatcctccgatggctgtgacaatgtggtcgtaaacccgtccggggccggccaatttgcatatttggaatgcgccgctataaacccggctggggttttgcagcgatttcttagatctctctctgcccggagctggtttccgtctctcggctcggggctggaactccggcccaacctaggcgcgcagccgccacgagatggcgcacttccgatcaatgtcaaagccgccggggagccgggaaccccagcatgattcttggcctttgttcgcttctgatactaagagcagcacggtacattatttcacttgtcccgctccccttcataacagaaaaaggggactcaccctcaagaagtgattggtatggtaatttaaagcaacgcgcattcgctaggcctcgcgagcgtcgccgcgcggagaagccagctgtcccttggcagtgatttcggaaatgtgtcaaggtaagaggccacaagtttagcaatttcagtctggtggggcgggagtggggaggtggccgatgtctaagcagggctctcgggaacgtggctgggtttgtggggtgacgcggtagggagcccccaccccattgctccctaaggttggaaagcagggggaggcctaagtagaaaagttgaggattttagctccttgcgccagcatttcactcaaggcgaatctttcgattttgtagaaatacacagaatagaatgggctagggatgagaggcatctaggcgaaagtgttccagctgtgctgcgatagggggttgtgggaggg

SEQ ID NO: 420461 - DNA, 803 bp, Homo sapiens
tttaatatttgggcgtggggacgcagtaaaattcatgtccggcttagcgccccacagcaagacgtcctcggcgctggcctcagctccccctgactagggacgaggacaccagcgagcaggccccctcctgtgcgctctttcctgtggccgggaggacccagagccctggtccctgcccagcctgcgcggcgcggcccacgcggggggagggggagggagggaaagtagctcgcccgcagatagcgcggatgtttgtaaggcatccaaaataagcagccgccagcgccaataaataagcccattaaccggcgaagttcgagtttacgatcccccatgcttttttcaaagttgctgaggggcgggaatcttcgttgcgggaagaagaaaaggcaaatccggcctggaagcggggggccctgagctgagagccagagaagggccatttcccttcccctggacctcggaatcgcccagctatctatccctggctcctggagaaacttgagggagggcccttgacccccgaatcggtttttcctgccttccccattggaccaatgatgcccttctttctccccttatcgagtcttgggcaatcagggccctggggtgagacagccaagctgcctggcccatcttccaagtaagcaccccgcgctcctagcctgggggctacaggaaatgcttgtctgccatatggcaagaggcaaagaaaagcgttaagttcaagatgtacagcctgccctcccaggcctttccttctgcaagcatctacggcttagcgctaaaacaggtgtttggaa

SEQ ID NO: 420462 - DNA, 2485 bp, Homo sapiens
  misc_feature (48)..(48): n is a, c, g, or t
  misc_feature (205)..(206): n is a, c, g, or t
  misc_feature (215)..(215): n is a, c, g, or t
atgccaggccccccaccagccacgttgggcagcccccacagctccccnttcgggccaaggtgtcggggtgcgtctcctggcccatcaatacagattacatatttatatcaatcgcgggctctgagggcgccctcggagagcggccccgcgcctacgaaaccaaactgggagtggtcgcgcggaaactctggctcgggattggctnngggcgccgnccggtgcggggggattgctatcgtattcagcatgttttgcacaagaaatgtcagccagaaagggctatctgctcccttcgccaaattatcccacaacaatgtcatgctcggagagccccgccgcgaactcttttttggtcgactcgctcatcagctcgggcagaggcgaggcaggcggcggtggtggtggcgcggggggcggcggcggtggcggttactacgcccacggcggggtctacctgccgcccgccgccgacctgccctacgggctgcagagctgcgggctcttccccacgctgggcggcaagcgcaatgaggcagcgtcgccgggcagcggtggcggtggcgggggtctaggtcccggggcgcacggctacgggccctcgcccatagacctgtggctagacgcgccccggtcttgccggcggcgcgcagcaactcggggctggcccgttccccgcgcagcccccggggcgcggtttcgatctcccgcccgcgctagcctccggctcggccgatgcggcccggaaggagcgagccctcgattcgccgccgccccccacgctggcttgcggcagcggcgggggctcgcagggcgacgaggaggcgcacgcgtcgtcctcggccgcggaggagctctccccggccccttccgagagcagcaaagcctcgccggagaaggattccctgggcaattccaaaggtgaaaacgcagccaactggctcacggcaaagagtggtcggaagaagcgctgcccctacacgaagcaccagacactggagctggagaaggagtttctgttcaatatgtaccttactcgagagcggcgcctagagattagccgcagcgtccacctcacggacagacaagtgaaaatctggtttcagaaccgcaggatgaaactgaagaaaatgaatcgagaaaaccggatccgggagctcacagccaactttaatttttcctgatgaatctccaggcgacgcggttttttcacttcccgagcgctggtcccctccctctgtcttcaggctctgcccaggaactcgcacctgtgctggagccctgttcctccctcccacactcgccatctcctgggccgttacatctgtgcagggctggtttgttctgactttttgtttctttgtgtttgcttggtgctggtttatttgttgttttctgggggaaaaagccatatcatgctaaaattctatagagatagatattgtcctaagtgtcaagtcctgactgggctgggtttgctgtcttggggtcccactgctcgaaatggcccctgtcttcggccgagctggtttcctgcccagcctggggcaaacctagccggaaggccgaggtcccattgttggcgctgaggtgtctggcctgaggtcaatggtgcaaaggagccgccaccgggcatgtctgcctggagtgctgtgctgtgtttaatcaggggatacaggcccctgggtttcttttttctttcttcctttcttccttggccaagagaagggcttacaggcatggacatgcaggttggcaaacgggcttgactttggctgatttaaaaagtgagaaagaaagtaaaaaaggttaatttttccttcctctgtaagatatcccagctttaaaaagaaaaaaaaagaattaccaagagaaggggacttctcttccagtttctgtaaggtcttacattgcctgactaaaatgtttcatttacctctaaatttccatatccttctggctgtagataaataatgtagttttgtttatgcatttggaattagtggatttttttgtcattaaaattgttaccactggtaacatgtgacaagcacaccacaattctccctatcttgtgaagttgtttttttaaatcgccttgaacaaaaagttttttttttgtttgtttttgctttctgaaattcacagaagcctaggaggactggggtaagcggaataaactagagaagggagacattgtttggatttcctttatactgtgaagttacatgcataaaagggtcaaacctgtagatgcagaaaaagaaaaaaacctataaatacaaatctgtataaatgtctattattatgaagaattgccaatcttgttttaagcaaatgcattctatcgttattataaatgttagttctagctctatttacttctaatcttaaatcagaataaattaatattgtattgctgctgtgcgtggaaaaagacgatgtttatgttcttatagaataaaagctgtggaatgaagctttttaa

SEQ ID NO: 420463 - DNA, 2868 bp, Homo sapiens
  misc_feature (48)..(48): n is a, c, g, or t
  misc_feature (205)..(206): n is a, c, g, or t
  misc_feature (215)..(215): n is a, c, g, or t
atgccaggccccccaccagccacgttgggcagcccccacagctccccnttcgggccaaggtgtcggggtgcgtctcctggcccatcaatacagattacatatttatatcaatcgcgggctctgagggcgccctcggagagcggccccgcgcctacgaaaccaaactgggagtggtcgcgcggaaactctggctcgggattggctnngggcgccgnccggtgcggggggattgctatcgtattcagcatgttttgcacaagaaatgtcagccagaaagggctatctgctcccttcgccaaattatcccacaacaatgtcatgctcggagagccccgccgcgaactcttttttggtcgactcgctcatcagctcgggcagaggcgaggcaggcggcggtggtggtggcgcggggggcggcggcggtggcggttactacgcccacggcggggtctacctgccgcccgccgccgacctgccctacgggctgcagagctgcgggctcttccccacgctgggcggcaagcgcaatgaggcagcgtcgccgggcagcggtggcggtggcgggggtctaggtcccggggcgcacggctacgggccctcgcccatagacctgtggctagacgcgccccggtcttgccggatggagccgcctgacgggccgccgccgccgccccagcagcagccgccgcccccgccgcaaccaccccagccagcgccgcaggccacctcgtgctctttcgcgcagaacatcaaagaagagagctcctactgcctctacgactcggcggacaaatgccccaaagtctcggccaccgccgccgaactggctcccttcccgcggggcccgccgcccgacggctgcgccctgggcacctccagcggggtgccagtgcctggctacttccgcctttctcaggcctacggcaccgccaagggctatggcagcggcggcggcggcgcgcagcaactcggggctggcccgttccccgcgcagcccccggggcgcggtttcgatctcccgcccgcgctagcctccggctcggccgatgcggcccggaaggagcgagccctcgattcgccgccgccccccacgctggcttgcggcagcggcgggggctcgcagggcgacgaggaggcgcacgcgtcgtcctcggccgcggaggagctctccccggccccttccgagagcagcaaagcctcgccggagaaggattccctgggcaattccaaaggtgaaaacgcagccaactggctcacggcaaagagtggtcggaagaagcgctgcccctacacgaagcaccagacactggagctggagaaggagtttctgttcaatatgtaccttactcgagagcggcgcctagagattagccgcagcgtccacctcacggacagacaagtgaaaatctggtttcagaaccgcaggatgaaactgaagaaaatgaatcgagaaaaccggatccgggagctcacagccaactttaatttttcctgatgaatctccaggcgacgcggttttttcacttcccgagcgctggtcccctccctctgtcttcaggctctgcccaggaactcgcacctgtgctggagccctgttcctccctcccacactcgccatctcctgggccgttacatctgtgcagggctggtttgttctgactttttgtttctttgtgtttgcttggtgctggtttatttgttgttttctgggggaaaaagccatatcatgctaaaattctatagagatagatattgtcctaagtgtcaagtcctgactgggctgggtttgctgtcttggggtcccactgctcgaaatggcccctgtcttcggccgagctggtttcctgcccagcctggggcaaacctagccggaaggccgaggtcccattgttggcgctgaggtgtctggcctgaggtcaatggtgcaaaggagccgccaccgggcatgtctgcctggagtgctgtgctgtgtttaatcaggggatacaggcccctgggtttcttttttctttcttcctttcttccttggccaagagaagggcttacaggcatggacatgcaggttggcaaacgggcttgactttggctgatttaaaaagtgagaaagaaagtaaaaaaggttaatttttccttcctctgtaagatatcccagctttaaaaagaaaaaaaaagaattaccaagagaaggggacttctcttccagtttctgtaaggtcttacattgcctgactaaaatgtttcatttacctctaaatttccatatccttctggctgtagataaataatgtagttttgtttatgcatttggaattagtggatttttttgtcattaaaattgttaccactggtaacatgtgacaagcacaccacaattctccctatcttgtgaagttgtttttttaaatcgccttgaacaaaaagttttttttttgtttgtttttgctttctgaaattcacagaagcctaggaggactggggtaagcggaataaactagagaagggagacattgtttggatttcctttatactgtgaagttacatgcataaaagggtcaaacctgtagatgcagaaaaagaaaaaaacctataaatacaaatctgtataaatgtctattattatgaagaattgccaatcttgttttaagcaaatgcattctatcgttattataaatgttagttctagctctatttacttctaatcttaaatcagaataaattaatatcgcatttgctaaaaaaaaaaaaataaattcacttggcgtcgctttacaacgccgtgacttggtaaacctctggcgttacccacctaaatcgccttgaagacattcccctcttcgtcagtttgcgtaataccaagaaggccccact

SEQ ID NO: 420464 - DNA, 869 bp, Homo sapiens
ctagagagagtctagccaggaggactgctcgcgggcgggcggcgggcgggcgcgggtttgatttctgagccctataaaagcccatcctccgatggctgtgacaatgtggtcgtaaacccgtccggggccggccaatttgcatatttggaatgcgccgctataaacccggctggggttttgcagcgatttcttagatgtaaaaatgagatctcaatagcagcgggctgggcacatcctctcctctctccttctctctctgcccggagctggtttccgtctctcggctcggggctggaactccggcccaacctaggcgcgcagccgccacgagatggcgcacttccgatcaatgtcaaagccgccggggagccgggaaccccagcatgattcttggcctttgttcgcttctgatactaagagcagcacggtacattatttcacttgtcccgctccccttcataacagaaaaaggggactcaccctcaagaagtgattggtatggtaatttaaagcaacgcgcattcgctaggcctcgcgagcgtcgccgcgcggagaagccagctgtcccttggcagtgatttcggaaatgtgtcaagttgatagagaaaaacaacccagcgaaggcgccttctctgaaaacaatgctgagaatgagagcggcggagacaagccccccatcgatcccaataacccagcagccaactggcttcatgcgcgctccactcggaaaaagcggtgcccctatacaaaacaccagaccctggaactggagaaagagtttctgttcaacatgtacctcaccagggaccgcaggtacgaggtggctcgactgctcaacctcaccgagaggcaggtcaagatctggttcc

SEQ ID NO: 420465 - DNA, 1142 bp, Homo sapiens
aaggaaagcaggacccagtggtgtgctcctgtagttccagctattcaggaggctgtggcaggaggaccacttgaggccagagggtcaaggctgcagtgtgctataattgggcctgtaaatagccactgtactccaagctgagcaacacagtaagacactgtctctaaaaataattaaagtaaaataaaaataaggaaagctcctgtgacatcaacctgatccagaattggggacagcgctactgcgggttcaatgtactgccatgttttccctgtcttatcagttctatcagcacactgaccccactcgagaccaactacaagactaaggctggaagtggttgagtagcagaagtgttatgtattctatcttcccaagggaaccatatccacatctacccctaactttggcctgagctgaaaatgggttttctctccctgtggctcatttgtttcctatattgagagaacacccaaaaaaagactactcaagatgactttttacaagtcttttctttatcctaaaacatcctccaaccgaaggcatgggaagctatcctatactctgaccttgcctatattttaaatggcaggggccccaagctaagaatcagcaggcagtggcatctacagcttctggtctgtagtggcgtagaagcaggaaaatcaatgctccaaagcaacaatgtccagctttcctgccagtgagctgggcttgagggagtgaatgggactctttctgccttttctttttctcaaaatacgactgcattaactgggtgtatgcacacacaaacatgttcaaactagggcactcatacctagctagaacctactcagggaaagaaatatgtatttccacagtaccctgatcacccagtaaaagctaatatttattgaataattactatgcaaattatggtaagcaaattgtagtgtgaatacatgatatgagaatatcacttaattcacacagcaaccttcacaatggggttccttttggtacagtctgaaaagagaatgattatctgcgcagggtctcagagctagtgtggtagaataagaaattaaacctaagtagttgctaaacaatatacattctaatctatcctattgaggtaatccgtgaggtagaaacctaaa

SEQ ID NO: 420466 - DNA, 1093 bp, Homo sapiens
gggttgctatgagacccgctcgagcggaggaccagcagccagcccgacgctgatggttcttacctcgtactaaaacctttgctttgacacagttttagagttgcttaatattcgagcaagcacctgacacgggtgactttctccttctttttttcctccggtccctcgggtaagatggaggtagaaaatgaagccagctgctccccgggcagcgcatcaggcgggtccagagagtacaaggtggtaatgctgggagcagggggagttggtaaaagcgcaatgacaatgcagtttattagtcatcagttccctgattatcatgaccctactatagaagatgcttataagacccaggtcaggattgacaatgagccagcttacttggacatcttggacactgctggccaggcagaattcacagccatgcgggagcagtacatgcgaggtggggaaggcttcatcatctgctactccgtcactgaccgtcaatcatttcaggaggctgccaagtttaaagagctcatttttcaggtccgccacacctatgaaattcccctggtgctggtgggtaacaaaattgatctggaacagttccgccaggtttctacagaagaaggcttgagtcttgcccaagatataattgtggtttttttgagacctctgcagccctcagattctgtattgatgatgcttttcatggcttagtgagggaaattcgcaagaaggagtccatgccatccttgatggaaaagaaactgaagagaaaagacagcctgtggaagaagctaaaaggttctttgaagaagaagagagaaaatatgacatgatatctttgcttttgagttcctcacgctctctgaattttattagttggacaattccatatgtagcattctgcttcaatattatctctctatgtgtctctctctctttaaatatctgcctgtaggtaaaagcaagctctgcatatctgtacctcttgagatagttttgttttgcctttaacagttggatggattttgtcaatcagctggatatgctgtttagtttttacaacatagtactaaataaaattgacattccaattgcctca

SEQ ID NO: 420467 - DNA, 1157 bp, Homo sapiens
gggttgctatgagacccgctcgagcggaggaccagcagccagcccgacgctgatggttcttacctcgtactaaaacctttgctttgacacagttttagagttgcttaatattcgagcaagcacctgacacgggtgactttctccttctttttttcctccggtccctcgggtaagatggaggtagaaaatgaagccagctgctccccgggcagcgcatcaggcgggtccagagagtacaaggtggtaatgctgggagcagggggagttggtaaaagcgcaatgacaatgcagtttattagtcatcagttccctgattatcatgaccctactatagaagatgcttataagacccaggtcaggattgacaatgagccagcttacttggacatcttggacactgctggccaggcagaattcacagccatgcgggagcagtacatgcgaggtggggaaggcttcatcatctgctactccgtcactgaccgtcaatcatttcaggaggctgccaagtttaaagagctcatttttcaggtccgccacacctatgaaattcccctggtgctggtgggtaacaaaattgatctggaacagttccgccagcctacactgaaagagtttggaagggaagaattctgatggttgaagctgcttcttttcatatttggtttctacagaagaaggcttgagtcttgcccaagatataattgtggtttttttgagacctctgcagccctcagattctgtattgatgatgcttttcatggcttagtgagggaaattcgcaagaaggagtccatgccatccttgatggaaaagaaactgaagagaaaagacagcctgtggaagaagctaaaaggttctttgaagaagaagagagaaaatatgacatgatatctttgcttttgagttcctcacgctctctgaattttattagttggacaattccatatgtagcattctgcttcaatattatctctctatgtgtctctctctctttaaatatctgcctgtaggtaaaagcaagctctgcatatctgtacctcttgagatagttttgttttgcctttaacagttggatggattttgtcaatcagctggatatgctgtttagtttttacaacatagtactaaataaaattgacattccaattgcctca

SEQ ID NO: 420468 - DNA, 546 bp, Homo sapiens
  misc_feature (42)..(42): n is a, c, g, or t
tttatttctgataatttttattaaaatatttttcactctgtnttctaattcgcgtttctacagaagaaggcttgagtcttgcccaagatataattgtggtttttttgagacctctgcagccctcagattctgtattgatgatgcttttcatggcttagtgagggaaattcgcaagaaggagtccatgccatccttgatggaaaagaaactgaagagaaaagacagcctgtggaagaagctaaaaggttctttgaagaagaagagagaaaatatgacatgatatctttgcttttgagttcctcacgctctctgaattttattagttggacaattccatatgtagcattctgcttcaatattatctctctatgtgtctctctctctttaaatatctgcctgtaggtaaaagcaagctctgcatatctgtacctcttgagatagttttgttttgcctttaacagttggatggattttgtcaatcagctggatatgctgtttagtttttacaacatagtactaaataaaattgacattccaattgcctca

SEQ ID NO: 420469 - DNA, 545 bp, Homo sapiens
  misc_feature (22)..(22): n is a, c, g, or t
  misc_feature (27)..(28): n is a, c, g, or t
tttaaattatttatattatatnagaannttttgcaaaaaaatttgcaattcagtttctacagaagaaggcttgagtcttgcccaagatataattgtggtttttttgagacctctgcagccctcagattctgtattgatgatgcttttcatggcttagtgagggaaattcgcaagaaggagtccatgccatccttgatggaaaagaaactgaagagaaaagacagcctgtggaagaagctaaaaggttctttgaagaagaagagagaaaatatgacatgatatctttgcttttgagttcctcacgctctctgaattttattagttggacaattccatatgtagcattctgcttcaatattatctctctatgtgtctctctctctttaaatatctgcctgtaggtaaaagcaagctctgcatatctgtacctcttgagatagttttgttttgcctttaacagttggatggattttgtcaatcagctggatatgctgtttagtttttacaacatagtactaaataaaattgacattccaattgcctca

SEQ ID NO: 420470 - DNA, 1155 bp, Homo sapiens
gggttgctatgagacccgctcgagcggaggaccagcagccagcccgacgctgatggttcttacctcgtactaaaacctttgctttgacacagttttagagttgcttaatattcgagcaagcacctgacacgggtgactttctccttctttttttcctccggtccctcgggtaagatggaggtagaaaatgaagccagctgctccccgggcagcgcatcaggcgggtccagagagtacaaggtggtaatgctgggagcagggggagttggtaaaagcgcaatgacaatgcagtttattagtcatcagttccctgattatcatgaccctactatagaagatgcttataagacccaggtcaggattgacaatgagccagcttacttggacatcttggacactgctggccagctgtgtgactggctgaaacacagatgggaagtagagctgtgggaaatcagaagaactgaaaagcagaattcacagccatgcgggagcagtacatgcgaggtggggaaggcttcatcatctgctactccgtcactgaccgtcaatcatttcaggaggctgccaagtttaaagagctcatttttcaggtccgccacacctatgaaattcccctggtgctggtgggtaacaaaattgatctggaacagttccgccaggtttctacagaagaaggcttgagtcttgcccaagatataattgtggtttttttgagacctctgcagccctcagattctgtattgatgatgcttttcatggcttagtgagggaaattcgcaagaaggagtccatgccatccttgatggaaaagaaactgaagagaaaagacagcctgtggaagaagctaaaaggttctttgaagaagaagagagaaaatatgacatgatatctttgcttttgagttcctcacgctctctgaattttattagttggacaattccatatgtagcattctgcttcaatattatctctctatgtgtctctctctctttaaatatctgcctgtaggtaaaagcaagctctgcatatctgtacctcttgagatagttttgttttgcctttaacagttggatggattttgtcaatcagctggatatgctgtttagtttttacaacatagtactaaataaaattgacattccaattgcctca

SEQ ID NO: 420471 - DNA, 557 bp, Homo sapiens
  misc_feature (38)..(40): n is a, c, g, or t
  misc_feature (42)..(42): n is a, c, g, or t
  misc_feature (51)..(51): n is a, c, g, or t
ggccgaggggccgcaggggagagagttaagtttaggannngnctcgggtgnttatcacatattagtttctacagaagaaggcttgagtcttgcccaagatataattgtggtttttttgagacctctgcagccctcagattctgtattgatgatgcttttcatggcttagtgagggaaattcgcaagaaggagtccatgccatccttgatggaaaagaaactgaagagaaaagacagcctgtggaagaagctaaaaggttctttgaagaagaagagagaaaatatgacatgatatctttgcttttgagttcctcacgctctctgaattttattagttggacaattccatatgtagcattctgcttcaatattatctctctatgtgtctctctctctttaaatatctgcctgtaggtaaaagcaagctctgcatatctgtacctcttgagatagttttgttttgcctttaacagttggatggattttgtcaatcagctggatatgctgtttagtttttacaacatagtactaaataaaattgacattccaattgcctca

SEQ ID NO: 420472 - DNA, 1355 bp, Homo sapiens
gggttgctatgagacccgctcgagcggaggaccagcagccagcccgacgctgatggttcttacctcgtactaaaacctttgctttgacacagttttagagttgcttaatattcgagcaagcacctgacacgggtgactttctccttctttttttcctccggtccctcgggtaagatggaggtagaaaatgaagccagctgctccccgggcagcgcatcaggcgggtccagagagtacaaggtggtaatgctgggagcagggggagttggtaaaagcgcaatgacaatgcagtttattagtcatcagttccctgattatcatgaccctactatagaagatgcttataagacccaggtcaggattgacaatgagccagcttacttggacatcttggacactgctggccaggcagaattcacagccatgcgggagcagtacatgcgaggtggggaaggcttcatcatctgctactccgtcactgaccgtcaatcatttcaggaggctgccaagtttaaagagctcatttttcaggtccgccacacctatgaaattcccctggtgctggtgggtaacaaaattgatctggaacagttccgccaggtttctacagaagaaggcttgagtcttgcccaagatataattgtggtttttttgagacctctgcagccctcagattctgtattgatgatgcttttcatggcttagtgagggaaattcgcaagaaggagtccatgccatccttgatggaaaagaaactgaagagaaaagacagcctgtggaagaagctaaaaggttctttgaagaagaagagagaaaatatgacatgatatctttgcttttgagttcctcacgctctctgaattttattagttggacaattccatatgtagcattctgcttcaatattatctctctatgtgtctctctctctttaaatatctgcctgtaggtaaaagcaagctctgcatatctgtacctcttgagatagttttgttttgcctttaacagttggatggattttgtcaatcagctggatatgctgtttagtttttacaacatagtactaaataaaattgacattccaattgcctcaaaaaaaaaaaaataaaatggcctcggtggcctgaggggtggaactctgtggccggttacattaagtgaggggtaattaatgatccacgcacaatgagctcctgccgacgccgataggatgtggctatcgctatctgcgtacttgttgacgcgaatacgggctgtcaagaaggatgaggtgacgacaggcaagaccttgtagagacaggttaaaggatagcaacggccgtctcgggcgtgcgatttggcgtggattacgggac

SEQ ID NO: 420473 - DNA, 559 bp, Homo sapiens
  misc_feature (39)..(39): n is a, c, g, or t
accaacctcccgcccccctccataccctccccaaacaanaccgaaccttcggtttatcacacagcagtttctacagaagaaggcttgagtcttgcccaagatataattgtggtttttttgagacctctgcagccctcagattctgtattgatgatgcttttcatggcttagtgagggaaattcgcaagaaggagtccatgccatccttgatggaaaagaaactgaagagaaaagacagcctgtggaagaagctaaaaggttctttgaagaagaagagagaaaatatgacatgatatctttgcttttgagttcctcacgctctctgaattttattagttggacaattccatatgtagcattctgcttcaatattatctctctatgtgtctctctctctttaaatatctgcctgtaggtaaaagcaagctctgcatatctgtacctcttgagatagttttgttttgcctttaacagttggatggattttgtcaatcagctggatatgctgtttagtttttacaacatagtactaaataaaattgacattccaattgcctca

SEQ ID NO: 420474 - DNA, 400 bp, Homo sapiens
gcagaattcacagccatgcgggagcagtacatgcgaggtggggaaggcttcatcatctgctactccgtcactgaccgtcaatcatttcaggaggctgccaagtttaaagagctcatttttcaggtccgccacacctatgaaattcccctggtgctggtgggtaacaaaattgatctggaacagttccgccaggtgagtgccgattttatctggtagcttctgtcttttgctctgaggatgcatagtacaaaatatggctgctttcccaggttcacactgaaaattatgagaaagaaattatgcacatgatttttctaataagtcatggtggtcccatggtaaattgtgttggcctccataatatattttaccacatatgctattttgcagagtgccctta

SEQ ID NO: 420475 - DNA, 6130 bp, Homo sapiens
cgccgcgctcccgcccgccggggcctgggcgctgcggcgcgtgcgcgagcggtgccgcaccggccgcgggcgcagggagtattatgggctgtgggtgccgctgagcaagatggagctgtctgcagtgggcgagcgggtcttcgcggccgaatccatcatcaaacggcggatccgaaagggacgcatcgagtacctggtgaaatggaaggggtgggcgatcaagtacagcacttgggagcccgaggagaacatcctggactcgcggctcattgcagccttcgaacaaaaggagagggagcgtgagctgtatgggcccaagaagaggggacccaaacccaaaactttcctcctgaaggcgcgggcccaggccgaggccctccgcatcagtgatgtgcatttctctgtcaagccgagcgccagtgcctcctcgcccaagctgcactccagcgcagccgtgcaccggctcaagaaggacatccgccgctgccaccgtatgtcccgccgtcccctgccccgcccggacccgcaggggggcagccccggactgcgcccgcccatttcgcccttctcggagacggtgcgcatcatcaaccgcaaggtgaagccgcgggagcccaagcggaaccgcatcatcctgaacctgaaggtgatcgacaagggcgctggcggcgggggcgccgggcagggggccggggcgctggcccgccccaaagtcccctcgcggaaccgcgttataggcaagagcaagaagttcagcgagagcgtcctgcgtacacagatccgccacatgaagttcggcgcctttgcgctgtacaagcctccgcccgcccccctggtagccccgtcccccggcaaggctgaggcctcagccccgggccctgggctacttctggccgcccccgccgccccctacgacgcccgcagctctggctcctccggctgcccctcgcctacaccacagtcctctgaccccgacgacacgccccccaagctcctccccgagaccgtgagcccatccgcccccagctggcgcgagccggaggtgctcgacctgtccctccctcccgagtcggcagccaccagcaagcgggcaccgcctgaggtcacagctgctgccggcccggcacctcccacggcccctgagcccgccggtgcctcctccgagcccgaggctggggactggcgccccgagatgtcaccctgctccaatgtggtcgtcaccgatgtcaccagcaacctcctgacggtcacaatcaaggaattctgcaaccctgaggatttcgagaaggtggctgctggggtagcaggcgccgctgggggcggtggcagcattggggcgagcaagtgagggggctccaccaaggaggggggcttgggggggccctcctgcccgaagtcatactcttgctcccaccccacccttgcccccagccctctctccctgtgctttgcttgtctcaaatggctcggtgttgacccagggatggggctgggtagttggggtcccagaaagccgggggtaggggccaccctggaatggggcaggggaagggcacaccccctgcccatgcatggtagcccactgggtggtttctggaaagccctagaaactagggttcctctgccccttccacatcccacctgtctctctagcttgcttcctgctctcctgtgcggcgtctgatttctcggtgctaacctggcagctgtggggcccttaggagccccccaccgagggtggacacagtccctttccttcctgcagatgcctaggcaggaggagggcttcctgcctgtttggcaaagtcccaggcagaggccaaggatgaggcctgactcggctcctccctccacatcagccagggcatcagaagttgggccagggcggggtcttccctgctcgattttggacgaggcctaagtagaccccctatgccctgccccagccctggctctttcctaaccccctcaacggtgggaggaactggcagagggtgcgcctggccacagcctccccgcatctaaaggccccttcagttcttgaccaaaggtgctacgagaacctgccgtggaaacttccagttgtgcgtctgccccactcgctgtgtttgtccgtgggttcatacatgcattgggtgctaggccccaggctgccgggtggcaccctttacagttcctttgaacaggggcattgaaggcctggactgcctctcgcctcagtaggcctggggaccaggcttgggtctggaggtttgctgtggaagtcaccaggcctcccctcctggcccaggtgtgctgggggcaccgtgccccccacccccctgccctcctcagggtggtcagcccaacctgtcggaccttcacttcacatcatggtggggaccgagatagagagggagaccccattccaagctccctcttcctcccggtgtttggggaggatgctgaagaatccattcccgagggcctcccggcttgtcccagcccctcttttgcttctgaccacggaggctttctcacagcccagcctgcctgaagcaaaggaggctcccgtgtcctgggcagcttctgtttccctctgctgcctgggagctgaggcacccgtgccagtggcagaggccacagccccagccttaggccaggccctgggagggcaggcaggcaaaggggagaccagagggtctgtgttctccaggagaatgagggtgttggtcccagaattgggaccggggccccgctggccagccctgggccacttcccgggtctccattgtgcgtgggtggcgtgttccaggcgtggctggagctggcttcctggctgtgctgccatgggcccctccctcagaagcacgttggcaggaggccgatcagaaccctagcgcctttggtcctaagaatgggaggctgccttccttcccaatctccctgccagggcccacagcgtggccctagccctcccctccccgggatgtagaacggggaccctcgcagggttggggcgggggctgatactcctcggcccctccctaccctgccctgtgtgttggctttgtggccgtccaagtgccaattggcttttcgcccaaataagggctggtatttctcctctgtccttggaggtgatttccccctgaccccctcccccaggtgagtgaccacctgggtgccagttacaggtgtttccagagaccatagaaatgtgttttcctgagagttcgtgtcattcgtgacttttttgtaaagaagttgtgttttcagaggtgattttatgacaggaaagtgaaagaattagttttgcaaaaaaacaaaaacaaaaaaagaggaaaaaaaaaagaaatagaaaaaaatattgtgggattcctatgggggggtggcgggggagaaagagctatttaagaaaaaatagtaacgcagtgattgcacaggtgaggtggcaatgtcaggatggggcggaggcctgggcccagctggcaggtcccctggcatcgcaggcactgtggagagggcctggacccagatctccacacccgtgcttgctcaaagggaaggacaacagcgggcccccgggagctaacccaagctgcaggtcccggcaagctgaggtttgggagggtgggggttgtcactggtgattttctccagggggctggtgagtgggcagtttggtttcttgcccccttctgttcctttcccagttgttgggccatctggtccccaccaccgccaccctatgggggagacctccctccccacgggtcaccctaaagcccacaacctctctgagcctccctggcctgaaaggggatgcaggcttcaggaggcaagaagctgggcccctgggggtggctggggagagggaatgcatttcccttgccacaggtggtctgcttctgctggcctgagctccaagtggagcagcccgggccagccttggtgcatgaagaggcaccaggcacaccgccttgaggtgggcagtgcccatgggggcccgagtggatgggaccgagggtgagtggagcctccttcctcccctctctagtacccccgcctcccacacacttgcacggatcggcctcccttgggagatcagcctccatgggcccctcgtccacccttgctgctttccatttgcctaattaccaagcagaagttgcaatctggtttgctttatttttgtatgtgaaataacccccaaagcccaatctcctcctacgttcaatattggttggggcatccgtcatctccccttaagtgcgccccctccccacccaagtatcataggaaaccggtgaggtctggtgtctctggtttgagacggtaagttgggacccatccctgtctgggtgcccactctgacctttagtttgcccttctgtgaaatgggtgtattgggtagcaagccctcttcagaaagcgctgctggtgtcagagcagctgcccagtaccaggtggggggtcaaggttgctggtactggggcccccagctgcccacaacccctctttgttctcaccctgcaaaggggtcaaggtcaaaatgagcctcatccttcctatgatctgggaagaggtgatgatcaagtccccaacttcagtgtgaggtggacagagttggggggatggcccctttttgaagaggtgaaaatggttttggagaagcgcagctgcttcactgggggaatgcggcagggactggggcccaggatgctttggcctatggggaaaagccctttaaaaggcagggcccaggccctggagccagcacaagactggcctcgagcccctgagccaggaggtcctggaggagagccaggccggtgggcccgcccaaggctggagggtcagccccaacagggagctgggttggccagggggctggactgctaccagcctctctggcctatggggacccaagaggacacatcccccttttgcccactcttctgtgtcattttgttgttttggtttgtggtggtttttcttttttcttttgtttttcttttttctttctttctttttttttttttttttttttttttttgcacttcgcccacacaggacagtggagccccacctggtcagttccacttccgggctcccatgcacttgcccaaggcggcctctttgggacggggatggtttgaggaaacacttttaaagaaaaaaggaagacattgaaaggttttagtttcttccctatctgcatgtcctctcatatagaaagcccagaattaggggctagaactccaggagagggtctccccgactcatctcttgctgacggtcaccaggatgcagaaatagggagatggttagtgggggccaaagatgccccctcccaggccttcgtggttccctcctccgccccctgcaatctttggaggagtcagtgcctcactccagcagtgagtgcctactgtatgcaggtagtcagccaggcaaagagagactaacggtctcatgggggaaccctcttgcgggaggccaggtagctggagcgaagcgttccggctgcccttgctgctgggtggagtggagagggagacttctttttgttggttttaatttaaaaacacaaaggcctaaagaaatacgtatcttataatttttttaatttttgagacgttcatttaatgaattgtgcacgaatgaattctatatatataaaatatacatatatagctctatatttggggaggggcactgtctcttttttctctcatttttaaaatgaagtgttgttgcctttgtatgtggttcaaccatccagctcccagctggctaaactttgcctccagtggtcaaagatgggaaaagagtggggttggcaggagatggaaaacggaggtgccgccccagcatggggggcaggtcccccagtccaccctgcccctccccctgtggagaagacgcttagttgggggtgtgggtttgggctccattctggattcggcggttccgggggaggggtgggtctgtgccgattactctgtcttgtacgtttgttctgctgctcttcaatattgtatcaacgccaggaaaggggggtgaaaagcctcttttaccccccaaataaattgtcacattccgaagctgaggcctagcccctaggttggggtgtgtctgtgtcttc

SEQ ID NO: 420476 - DNA, 6342 bp, Homo sapiens
cgccgcgctcccgcccgccggggcctgggcgctgcggcgcgtgcgcgagcggtgccgcaccggccgcgggcgcagggagtattatgggctgtgggtgccgctgagcaagatggagctgtctgcagtgggcgagcgggtcttcgcggccgaatccatcatcaaacggcggatccgaaagggacgcatcgagtacctggtgaaatggaaggggtgggcgatcaagtacagcacttgggagcccgaggagaacatcctggactcgcggctcattgcagccttcgaacaaaaggagagggagcgtgagctgtatgggcccaagaagaggggacccaaacccaaaactttcctcctgaaggcgcgggcccaggccgaggccctccgcatcagtgatgtgcatttctctgtcaagccgagcgccagtgcctcctcgcccaagctgcactccagcgcagccgtgcaccggctcaagaaggacatccgccgctgccaccgtatgtcccgccgtcccctgccccgcccggacccgcaggggggcagccccggactgcgcccgcccatttcgcccttctcggagacggtgcgcatcatcaaccgcaaggtgaagccgcgggagcccaagcggaaccgcatcatcctgaacctgaaggtgatcgacaagggcgctggcggcgggggcgccgggcagggggccggggcgctggcccgccccaaagtcccctcgcggaaccgcgttataggcaagagcaagaagttcagcgagagcgtcctgcgtacacagatccgccacatgaagttcggcgcctttgcgctgtacaagcctccgcccgcccccctggtagccccgtcccccggcaaggctgaggcctcagccccgggccctgggctacttctggccgcccccgccgccccctacgacgcccgcagctctggctcctccggctgcccctcgcctacaccacagtcctctgaccccgacgacacgccccccaagctcctccccgagaccgtgagcccatccgcccccagctggcgcgagccggaggtgctcgacctgtccctccctcccgagtcggcagccaccagcaagcgggcaccgcctgaggtcacagctgctgccggcccggcacctcccacggcccctgagcccgccggtgcctcctccgagcccgaggctggggactggcgccccgagatgtcaccctgctccaatgtggtcgtcaccgatgtcaccagcaacctcctgacggtcacaatcaaggaattctgcaaccctgaggatttcgagaaggtggctgctggggtagcaggcgccgctgggggcggtggcagcattggggcgagcaagtgagggggctccaccaaggaggggggcttgggggggccctcctgcccgaagtcatactcttgctcccaccccacccttgcccccagccctctctccctgtgctttgcttgtctcaaatggctcggtgttgacccagggatggggctgggtagttggggtcccagaaagccgggggtaggggccaccctggaatggggcaggggaagggcacaccccctgcccatgcatggtagcccactgggtggtttctggaaagccctagaaactagggttcctctgccccttccacatcccacctgtctctctagcttgcttcctgctctcctgtgcggcgtctgatttctcggtgctaacctggcagctgtggggcccttaggagccccccaccgagggtggacacagtccctttccttcctgcagatgcctaggcaggaggagggcttcctgcctgtttggcaaagtcccaggcagaggccaaggatgaggcctgactcggctcctccctccacatcagccagggcatcagaagttgggccagggcggggtcttccctgctcgattttggacgaggcctaagtagaccccctatgccctgccccagccctggctctttcctaaccccctcaacggtgggaggaactggcagagggtgcgcctggccacagcctccccgcatctaaaggccccttcagttcttgaccaaaggtgctacgagaacctgccgtggaaacttccagttgtgcgtctgccccactcgctgtgtttgtccgtgggttcatacatgcattgggtgctaggccccaggctgccgggtggcaccctttacagttcctttgaacaggggcattgaaggcctggactgcctctcgcctcagtaggcctggggaccaggcttgggtctggaggtttgctgtggaagtcaccaggcctcccctcctggcccaggtgtgctgggggcaccgtgccccccacccccctgccctcctcagggtggtcagcccaacctgtcggaccttcacttcacatcatggtggggaccgagatagagagggagaccccattccaagctccctcttcctcccggtgtttggggaggatgctgaagaatccattcccgagggcctcccggcttgtcccagcccctcttttgcttctgaccacggaggctttctcacagcccagcctgcctgaagcaaaggaggctcccgtgtcctgggcagcttctgtttccctctgctgcctgggagctgaggcacccgtgccagtggcagaggccacagccccagccttaggccaggccctgggagggcaggcaggcaaaggggagaccagagggtctgtgttctccaggagaatgagggtgttggtcccagaattgggaccggggccccgctggccagccctgggccacttcccgggtctccattgtgcgtgggtggcgtgttccaggcgtggctggagctggcttcctggctgtgctgccatgggcccctccctcagaagcacgttggcaggaggccgatcagaaccctagcgcctttggtcctaagaatgggaggctgccttccttcccaatctccctgccagggcccacagcgtggccctagccctcccctccccgggatgtagaacggggaccctcgcagggttggggcgggggctgatactcctcggcccctccctaccctgccctgtgtgttggctttgtggccgtccaagtgccaattggcttttcgcccaaataagggctggtatttctcctctgtccttggaggtgatttccccctgaccccctcccccaggtgagtgaccacctgggtgccagttacaggtgtttccagagaccatagaaatgtgttttcctgagagttcgtgtcattcgtgacttttttgtaaagaagttgtgttttcagaggtgattttatgacaggaaagtgaaagaattagttttgcaaaaaaacaaaaacaaaaaaagaggaaaaaaaaaagaaatagaaaaaaatattgtgggattcctatgggggggtggcgggggagaaagagctatttaagaaaaaatagtaacgcagtgattgcacaggtgaggtggcaatgtcaggatggggcggaggcctgggcccagctggcaggtcccctggcatcgcaggcactgtggagagggcctggacccagatctccacacccgtgcttgctcaaagggaaggacaacagcgggcccccgggagctaacccaagctgcaggtcccggcaagctgaggtttgggagggtgggggttgtcactggtgattttctccagggggctggtgagtgggcagtttggtttcttgcccccttctgttcctttcccagttgttgggccatctggtccccaccaccgccaccctatgggggagacctccctccccacgggtcaccctaaagcccacaacctctctgagcctccctggcctgaaaggggatgcaggcttcaggaggcaagaagctgggcccctgggggtggctggggagagggaatgcatttcccttgccacaggtggtctgcttctgctggcctgagctccaagtggagcagcccgggccagccttggtgcatgaagaggcaccaggcacaccgccttgaggtgggcagtgcccatgggggcccgagtggatgggaccgagggtgagtggagcctccttcctcccctctctagtacccccgcctcccacacacttgcacggatcggcctcccttgggagatcagcctccatgggcccctcgtccacccttgctgctttccatttgcctaattaccaagcagaagttgcaatctggtttgctttatttttgtatgtgaaataacccccaaagcccaatctcctcctacgttcaatattggttggggcatccgtcatctccccttaagtgcgccccctccccacccaagtatcataggaaaccggtgaggtctggtgtctctggtttgagacggtaagttgggacccatccctgtctgggtgcccactctgacctttagtttgcccttctgtgaaatgggtgtattgggtagcaagccctcttcagaaagcgctgctggtgtcagagcagctgcccagtaccaggtggggggtcaaggttgctggtactggggcccccagctgcccacaacccctctttgttctcaccctgcaaaggggtcaaggtcaaaatgagcctcatccttcctatgatctgggaagaggtgatgatcaagtccccaacttcagtgtgaggtggacagagttggggggatggcccctttttgaagaggtgaaaatggttttggagaagcgcagctgcttcactgggggaatgcggcagggactggggcccaggatgctttggcctatggggaaaagccctttaaaaggcagggcccaggccctggagccagcacaagactggcctcgagcccctgagccaggaggtcctggaggagagccaggccggtgggcccgcccaaggctggagggtcagccccaacagggagctgggttggccagggggctggactgctaccagcctctctggcctatggggacccaagaggacacatcccccttttgcccactcttctgtgtcattttgttgttttggtttgtggtggtttttcttttttcttttgtttttcttttttctttctttctttttttttttttttttttttttttttgcacttcgcccacacaggacagtggagccccacctggtcagttccacttccgggctcccatgcacttgcccaaggcggcctctttgggacggggatggtttgaggaaacacttttaaagaaaaaaggaagacattgaaaggttttagtttcttccctatctgcatgtcctctcatatagaaagcccagaattaggggctagaactccaggagagggtctccccgactcatctcttgctgacggtcaccaggatgcagaaatagggagatggttagtgggggccaaagatgccccctcccaggccttcgtggttccctcctccgccccctgcaatctttggaggagtcagtgcctcactccagcagtgagtgcctactgtatgcaggtagtcagccaggcaaagagagactaacggtctcatgggggaaccctcttgcgggaggccaggtagctggagcgaagcgttccggctgcccttgctgctgggtggagtggagagggagacttctttttgttggttttaatttaaaaacacaaaggcctaaagaaatacgtatcttataatttttttaatttttgagacgttcatttaatgaattgtgcacgaatgaattctatatatataaaatatacatatatagctctatatttggggaggggcactgtctcttttttctctcatttttaaaatgaagtgttgttgcctttgtatgtggttcaaccatccagctcccagctggctaaactttgcctccagtggtcaaagatgggaaaagagtggggttggcaggagatggaaaacggaggtgccgccccagcatggggggcaggtcccccagtccaccctgcccctccccctgtggagaagacgcttagttgggggtgtgggtttgggctccattctggattcggcggttccgggggaggggtgggtctgtgccgattactctgtcttgtacgtttgttctgctgctcttcaatattgtatcaacgccaggaaaggggggtgaaaagcctcttttaccccccaaataaattgtcacattccgaagctgaaaaaaaaaaaaaaaaaaaaaaaaaaaaacacacacgaccaaacaccatcccaaaaaaaaaaaagagcgggcgacgtcaaacaaagaagaatcacccgcaggagaggggacacaataagagcgagacggaccccaccacaattagctggaaacacaaaagagaggcgacccaaaagaagacgcacgcgcatagaaaagcgaagagagccaggccacgacgaaataacacacggtggggccggggaaaac

SEQ ID NO: 420477 - DNA, 6125 bp, Homo sapiens
cgccgcgctcccgcccgccggggcctgggcgctgcggcgcgtgcgcgagcggtgccgcaccggccgcgggcgcagggagtattatgggctgtgggtgccgctgagcaagatggagctgtctgcagtgggcgagcgggtcttcgcggccgaatccatcatcaaacggcggatccgaaagggacgcatcgagtacctggtgaaatggaaggggtgggcgatcaagtacagcacttgggagcccgaggagaacatcctggactcgcggctcattgcagccttcgaacaaaaggagagggagcgtgagctgtatgggcccaagaagaggggacccaaacccaaaactttcctcctgaaggcgcgggcccaggccgaggccctccgcatcagtgatgtgcatttctctgtcaagccgagcgccagtgcctcctcgcccaagctgcactccagcgcagccgtgcaccggctcaagaaggacatccgccgctgccaccgtatgtcccgccgtcccctgccccgcccggacccgcaggggggcagccccggactgcgcccgcccatttcgcccttctcggagacggtgcgcatcatcaaccgcaaggtgaagccgcgggagcccaagcggaaccgcatcatcctgaacctgaaggtgatcgacaagggcgctggcggcgggggcgccgggcagggggccggggcgctggcccgccccaaagtcccctcgcggaaccgcgttataggcaagagcaagaagttcagcgagagcgtcctgcgtacacagatccgccacatgaagttcggcgcctttgcgctgtacaagcctccgcccgcccccctggtagccccgtcccccggcaaggctgaggcctcagccccgggccctgggctacttctggccgcccccgccgccccctacgacgcccgcagctctggctcctccggctgcccctcgcctacaccacagtcctctgaccccgacgacacgccccccaagctcctccccgagaccgtgagcccatccgcccccagctggcgcgagccggaggtgctcgacctgtccctccctcccgagtcggcagccaccagcaagcgggcaccgcctgaggtcacagctgctgccggcccggcacctcccacggcccctgagcccgccggtgcctcctccgagcccgaggctggggactggcgccccgagatgtcaccctgctccaatgtggtcgtcaccgatgtcaccagcaacctcctgacggtcacaatcaaggaattctgcaaccctgaggatttcgagaaggtggctgctggggtagcaggcgccgctgggggcggtggcagcattggggcgagcaagtgagggggctccaccaaggaggggggcttgggggggccctcctgcccgaagtcatactcttgctcccaccccacccttgcccccagccctctctccctgtgctttgcttgtctcaaatggctcggtgttgacccagggatggggctgggtagttggggtcccagaaagccgggggtaggggccaccctggaatggggcaggggaagggcacaccccctgcccatgcatggtagcccactgggtggtttctggaaagccctagaaactagggttcctctgccccttccacatcccacctgtctctctagcttgcttcctgctctcctgtgcggcgtctgatttctcggtgctaacctggcagctgtggggcccttaggagccccccaccgagggtggacacagtccctttccttcctgcagatgcctaggcaggaggagggcttcctgcctgtttggcaaagtcccaggcagaggccaaggatgaggcctgactcggctcctccctccacatcagccagggcatcagaagttgggccagggcggggtcttccctgctcgattttggacgaggcctaagtagaccccctatgccctgccccagccctggctctttcctaaccccctcaacggtgggaggaactggcagagggtgcgcctggccacagcctccccgcatctaaaggccccttcagttcttgaccaaaggtgctacgagaacctgccgtggaaacttccagttgtgcgtctgccccactcgctgtgtttgtccgtgggttcatacatgcattgggtgctaggccccaggctgccgggtggcaccctttacagttcctttgaacaggggcattgaaggcctggactgcctctcgcctcagtaggcctggggaccaggcttgggtctggaggtttgctgtggaagtcaccaggcctcccctcctggcccaggtgtgctgggggcaccgtgccccccacccccctgccctcctcagggtggtcagcccaacctgtcggaccttcacttcacatcatggtggggaccgagatagagagggagaccccattccaagctccctcttcctcccggtgtttggggaggatgctgaagaatccattcccgagggcctcccggcttgtcccagcccctcttttgcttctgaccacggaggctttctcacagcccagcctgcctgaagcaaaggaggctcccgtgtcctgggcagcttctgtttccctctgctgcctgggagctgaggcacccgtgccagtggcagaggccacagccccagccttaggccaggccctgggagggcaggcaggcaaaggggagaccagagggtctgtgttctccaggagaatgagggtgttggtcccagaattgggaccggggccccgctggccagccctgggccacttcccgggtctccattgtgcgtgggtggcgtgttccaggcgtggctggagctggcttcctggctgtgctgccatgggcccctccctcagaagcacgttggcaggaggccgatcagaaccctagcgcctttggtcctaagaatgggaggctgccttccttcccaatctccctgccagggcccacagcgtggccctagccctcccctccccgggatgtagaacggggaccctcgcagggttggggcgggggctgatactcctcggcccctccctaccctgccctgtgtgttggctttgtggccgtccaagtgccaattggcttttcgcccaaataagggctggtatttctcctctgtccttggaggtgatttccccctgaccccctcccccaggtgagtgaccacctgggtgccagttacaggtgtttccagagaccatagaaatgtgttttcctgagagttcgtgtcattcgtgacttttttgtaaagaagttgtgttttcagaggtgattttatgacaggaaagtgaaagaattagttttgcaaaaaaacaaaaacaaaaaaagaggaaaaaaaaaagaaatagaaaaaaatattgtgggattcctatgggggggtggcgggggagaaagagctatttaagaaaaaatagtaacgcagtgattgcacaggtgaggtggcaatgtcaggatggggcggaggcctgggcccagctggcaggtcccctggcatcgcaggcactgtggagagggcctggacccagatctccacacccgtgcttgctcaaagggaaggacaacagcgggcccccgggagctaacccaagctgcaggtcccggcaagctgaggtttgggagggtgggggttgtcactggtgattttctccagggggctggtgagtgggcagtttggtttcttgcccccttctgttcctttcccagttgttgggccatctggtccccaccaccgccaccctatgggggagacctccctccccacgggtcaccctaaagcccacaacctctctgagcctccctggcctgaaaggggatgcaggcttcaggaggcaagaagctgggcccctgggggtggctggggagagggaatgcatttcccttgccacaggtggtctgcttctgctggcctgagctccaagtggagcagcccgggccagccttggtgcatgaagaggcaccaggcacaccgccttgaggtgggcagtgcccatgggggcccgagtggatgggaccgagggtgagtggagcctccttcctcccctctctagtacccccgcctcccacacacttgcacggatcggcctcccttgggagatcagcctccatgggcccctcgtccacccttgctgctttccatttgcctaattaccaagcagaagttgcaatctggtttgctttatttttgtatgtgaaataacccccaaagcccaatctcctcctacgttcaatattggttggggcatccgtcatctccccttaagtgcgccccctccccacccaagtatcataggaaaccggtgaggtctggtgtctctggtttgagacggtaagttgggacccatccctgtctgggtgcccactctgacctttagtttgcccttctgtgaaatgggtgtattgggtagcaagccctcttcagaaagcgctgctggtgtcagagcagctgcccagtaccaggtggggggtcaaggttgctggtactggggcccccagctgcccacaacccctctttgttctcaccctgcaaaggggtcaaggtcaaaatgagcctcatccttcctatgatctgggaagaggtgatgatcaagtccccaacttcagtgtgaggtggacagagttggggggatggcccctttttgaagaggtgaaaatggttttggagaagcgcagctgcttcactgggggaatgcggcagggactggggcccaggatgctttggcctatggggaaaagccctttaaaaggcagggcccaggccctggagccagcacaagactggcctcgagcccctgagccaggaggtcctggaggagagccaggccggtgggcccgcccaaggctggagggtcagccccaacagggagctgggttggccagggggctggactgctaccagcctctctggcctatggggacccaagaggacacatcccccttttgcccactcttctgtgtcattttgttgttttggtttgtggtggtttttcttttttcttttgtttttcttttttctttctttctttttttttttttttttttttttttttgcacttcgcccacacaggacagtggagccccacctggtcagttccacttccgggctcccatgcacttgcccaaggcggcctctttgggacggggatggtttgaggaaacacttttaaagaaaaaaggaagacattgaaaggttttagtttcttccctatctgcatgtcctctcatatagaaagcccagaattaggggctagaactccaggagagggtctccccgactcatctcttgctgacggtcaccaggatgcagaaatagggagatggttagtgggggccaaagatgccccctcccaggccttcgtggttccctcctccgccccctgcaatctttggaggagtcagtgcctcactccagcagtgagtgcctactgtatgcaggtagtcagccaggcaaagagagactaacggtctcatgggggaaccctcttgcgggaggccaggtagctggagcgaagcgttccggctgcccttgctgctgggtggagtggagagggagacttctttttgttggttttaatttaaaaacacaaaggcctaaagaaatacgtatcttataatttttttaatttttgagacgttcatttaatgaattgtgcacgaatgaattctatatatataaaatatacatatatagctctatatttggggaggggcactgtctcttttttctctcatttttaaaatgaagtgttgttgcctttgtatgtggttcaaccatccagctcccagctggctaaactttgcctccagtggtcaaagatgggaaaagagtggggttggcaggagatggaaaacggaggtgccgccccagcatggggggcaggtcccccagtccaccctgcccctccccctgtggagaagacgcttagttgggggtgtgggtttgggctccattctggattcggcggttccgggggaggggtgggtctgtgccgattactctgtcttgtacgtttgttctgctgctcttcaatattgtatcaacgccaggaaaggggggtgaaaagcctcttttaccccccaaatccattcaggccccgccccctcgccgggtcgcgaaatcggagaggccgcggccgc

SEQ ID NO: 420478 - DNA, 6096 bp, Homo sapiens
cgccgcgctcccgcccgccggggcctgggcgctgcggcgcgtgcgcgagcggtgccgcaccggccgcgggcgcagggagtattatgggctgtgggtgccgctgagcaagatggagctgtctgcagtgggcgagcgggtcttcgcggccgaatccatcatcaaacggcggatccgaaagggacgcatcgagtacctggtgaaatggaaggggtgggcgatcaagtacagcacttgggagcccgaggagaacatcctggactcgcggctcattgcagccttcgaacaaaaggagagggagcgtgagctgtatgggcccaagaagaggggacccaaacccaaaactttcctcctgaaggcgcgggcccaggccgaggccctccgcatcagtgatgtgcatttctctgtcaagccgagcgccagtgcctcctcgcccaagctgcactccagcgcagccgtgcaccggctcaagaaggacatccgccgctgccaccgtatgtcccgccgtcccctgccccgcccggacccgcaggggggcagccccggactgcgcccgcccatttcgcccttctcggagacggtgcgcatcatcaaccgcaaggtgaagccgcgggagcccaagcggaaccgcatcatcctgaacctgaaggtgatcgacaagggcgctggcggcgggggcgccgggcagggggccggggcgctggcccgccccaaagtcccctcgcggaaccgcgttataggcaagagcaagaagttcagcgagagcgtcctgcgtacacagatccgccacatgaagttcggcgcctttgcgctgtacaagcctccgcccgcccccctggtagccccgtcccccggcaaggctgaggcctcagccccgggccctgggctacttctggccgcccccgccgccccctacgacgcccgcagctctggctcctccggctgcccctcgcctacaccacagtcctctgaccccgacgacacgccccccaagctcctccccgagaccgtgagcccatccgcccccagctggcgcgagccggaggtgctcgacctgtccctccctcccgagtcggcagccaccagcaagcgggcaccgcctgaggtcacagctgctgccggcccggcacctcccacggcccctgagcccgccggtgcctcctccgagcccgaggctggggactggcgccccgagatgtcaccctgctccaatgtggtcgtcaccgatgtcaccagcaacctcctgacggtcacaatcaaggaattctgcaaccctgaggatttcgagaaggtggctgctggggtagcaggcgccgctgggggcggtggcagcattggggcgagcaagtgagggggctccaccaaggaggggggcttgggggggccctcctgcccgaagtcatactcttgctcccaccccacccttgcccccagccctctctccctgtgctttgcttgtctcaaatggctcggtgttgacccagggatggggctgggtagttggggtcccagaaagccgggggtaggggccaccctggaatggggcaggggaagggcacaccccctgcccatgcatggtagcccactgggtggtttctggaaagccctagaaactagggttcctctgccccttccacatcccacctgtctctctagcttgcttcctgctctcctgtgcggcgtctgatttctcggtgctaacctggcagctgtggggcccttaggagccccccaccgagggtggacacagtccctttccttcctgcagatgcctaggcaggaggagggcttcctgcctgtttggcaaagtcccaggcagaggccaaggatgaggcctgactcggctcctccctccacatcagccagggcatcagaagttgggccagggcggggtcttccctgctcgattttggacgaggcctaagtagaccccctatgccctgccccagccctggctctttcctaaccccctcaacggtgggaggaactggcagagggtgcgcctggccacagcctccccgcatctaaaggccccttcagttcttgaccaaaggtgctacgagaacctgccgtggaaacttccagttgtgcgtctgccccactcgctgtgtttgtccgtgggttcatacatgcattgggtgctaggccccaggctgccgggtggcaccctttacagttcctttgaacaggggcattgaaggcctggactgcctctcgcctcagtaggcctggggaccaggcttgggtctggaggtttgctgtggaagtcaccaggcctcccctcctggcccaggtgtgctgggggcaccgtgccccccacccccctgccctcctcagggtggtcagcccaacctgtcggaccttcacttcacatcatggtggggaccgagatagagagggagaccccattccaagctccctcttcctcccggtgtttggggaggatgctgaagaatccattcccgagggcctcccggcttgtcccagcccctcttttgcttctgaccacggaggctttctcacagcccagcctgcctgaagcaaaggaggctcccgtgtcctgggcagcttctgtttccctctgctgcctgggagctgaggcacccgtgccagtggcagaggccacagccccagccttaggccaggccctgggagggcaggcaggcaaaggggagaccagagggtctgtgttctccaggagaatgagggtgttggtcccagaattgggaccggggccccgctggccagccctgggccacttcccgggtctccattgtgcgtgggtggcgtgttccaggcgtggctggagctggcttcctggctgtgctgccatgggcccctccctcagaagcacgttggcaggaggccgatcagaaccctagcgcctttggtcctaagaatgggaggctgccttccttcccaatctccctgccagggcccacagcgtggccctagccctcccctccccgggatgtagaacggggaccctcgcagggttggggcgggggctgatactcctcggcccctccctaccctgccctgtgtgttggctttgtggccgtccaagtgccaattggcttttcgcccaaataagggctggtatttctcctctgtccttggaggtgatttccccctgaccccctcccccaggtgagtgaccacctgggtgccagttacaggtgtttccagagaccatagaaatgtgttttcctgagagttcgtgtcattcgtgacttttttgtaaagaagttgtgttttcagaggtgattttatgacaggaaagtgaaagaattagttttgcaaaaaaacaaaaacaaaaaaagaggaaaaaaaaaagaaatagaaaaaaatattgtgggattcctatgggggggtggcgggggagaaagagctatttaagaaaaaatagtaacgcagtgattgcacaggtgaggtggcaatgtcaggatggggcggaggcctgggcccagctggcaggtcccctggcatcgcaggcactgtggagagggcctggacccagatctccacacccgtgcttgctcaaagggaaggacaacagcgggcccccgggagctaacccaagctgcaggtcccggcaagctgaggtttgggagggtgggggttgtcactggtgattttctccagggggctggtgagtgggcagtttggtttcttgcccccttctgttcctttcccagttgttgggccatctggtccccaccaccgccaccctatgggggagacctccctccccacgggtcaccctaaagcccacaacctctctgagcctccctggcctgaaaggggatgcaggcttcaggaggcaagaagctgggcccctgggggtggctggggagagggaatgcatttcccttgccacaggtggtctgcttctgctggcctgagctccaagtggagcagcccgggccagccttggtgcatgaagaggcaccaggcacaccgccttgaggtgggcagtgcccatgggggcccgagtggatgggaccgagggtgagtggagcctccttcctcccctctctagtacccccgcctcccacacacttgcacggatcggcctcccttgggagatcagcctccatgggcccctcgtccacccttgctgctttccatttgcctaattaccaagcagaagttgcaatctggtttgctttatttttgtatgtgaaataacccccaaagcccaatctcctcctacgttcaatattggttggggcatccgtcatctccccttaagtgcgccccctccccacccaagtatcataggaaaccggtgaggtctggtgtctctggtttgagacggtaagttgggacccatccctgtctgggtgcccactctgacctttagtttgcccttctgtgaaatgggtgtattgggtagcaagccctcttcagaaagcgctgctggtgtcagagcagctgcccagtaccaggtggggggtcaaggttgctggtactggggcccccagctgcccacaacccctctttgttctcaccctgcaaaggggtcaaggtcaaaatgagcctcatccttcctatgatctgggaagaggtgatgatcaagtccccaacttcagtgtgaggtggacagagttggggggatggcccctttttgaagaggtgaaaatggttttggagaagcgcagctgcttcactgggggaatgcggcagggactggggcccaggatgctttggcctatggggaaaagccctttaaaaggcagggcccaggccctggagccagcacaagactggcctcgagcccctgagccaggaggtcctggaggagagccaggccggtgggcccgcccaaggctggagggtcagccccaacagggagctgggttggccagggggctggactgctaccagcctctctggcctatggggacccaagaggacacatcccccttttgcccactcttctgtgtcattttgttgttttggtttgtggtggtttttcttttttcttttgtttttcttttttctttctttctttttttttttttttttttttttttttgcacttcgcccacacaggacagtggagccccacctggtcagttccacttccgggctcccatgcacttgcccaaggcggcctctttgggacggggatggtttgaggaaacacttttaaagaaaaaaggaagacattgaaaggttttagtttcttccctatctgcatgtcctctcatatagaaagcccagaattaggggctagaactccaggagagggtctccccgactcatctcttgctgacggtcaccaggatgcagaaatagggagatggttagtgggggccaaagatgccccctcccaggccttcgtggttccctcctccgccccctgcaatctttggaggagtcagtgcctcactccagcagtgagtgcctactgtatgcaggtagtcagccaggcaaagagagactaacggtctcatgggggaaccctcttgcgggaggccaggtagctggagcgaagcgttccggctgcccttgctgctgggtggagtggagagggagacttctttttgttggttttaatttaaaaacacaaaggcctaaagaaatacgtatcttataatttttttaatttttgagacgttcatttaatgaattgtgcacgaatgaattctatatatataaaatatacatatatagctctatatttggggaggggcactgtctcttttttctctcatttttaaaatgaagtgttgttgcctttgtatgtggttcaaccatccagctcccagctggctaaactttgcctccagtggtcaaagatgggaaaagagtggggttggcaggagatggaaaacggaggtgccgccccagcatggggggcaggtcccccagtccaccctgcccctccccctgtggagaagacgcttagttgggggtgtgggtttgggctccattctggattcggcggttccgggggaggggtgggtctgtgccgattactctgtcttgtacgtttgttctgctgctcttcaatattgtatcaacgccaaataaattgtcacattccgaagctgaggcctagcccctaggttggggtgtgtctgtgtcttc

SEQ ID NO: 420479 - DNA, 6076 bp, Homo sapiens
cgccgcgctcccgcccgccggggcctgggcgctgcggcgcgtgcgcgagcggtgccgcaccggccgcgggcgcagggagtattatgggctgtgggtgccgctgagcaagatggagctgtctgcagtgggcgagcgggtcttcgcggccgaatccatcatcaaacggcggatccgaaagggacgcatcgagtacctggtgaaatggaaggggtgggcgatcaagtacagcacttgggagcccgaggagaacatcctggactcgcggctcattgcagccttcgaacaaaaggagagggagcgtgagctgtatgggcccaagaagaggggacccaaacccaaaactttcctcctgaagccgagcgccagtgcctcctcgcccaagctgcactccagcgcagccgtgcaccggctcaagaaggacatccgccgctgccaccgtatgtcccgccgtcccctgccccgcccggacccgcaggggggcagccccggactgcgcccgcccatttcgcccttctcggagacggtgcgcatcatcaaccgcaaggtgaagccgcgggagcccaagcggaaccgcatcatcctgaacctgaaggtgatcgacaagggcgctggcggcgggggcgccgggcagggggccggggcgctggcccgccccaaagtcccctcgcggaaccgcgttataggcaagagcaagaagttcagcgagagcgtcctgcgtacacagatccgccacatgaagttcggcgcctttgcgctgtacaagcctccgcccgcccccctggtagccccgtcccccggcaaggctgaggcctcagccccgggccctgggctacttctggccgcccccgccgccccctacgacgcccgcagctctggctcctccggctgcccctcgcctacaccacagtcctctgaccccgacgacacgccccccaagctcctccccgagaccgtgagcccatccgcccccagctggcgcgagccggaggtgctcgacctgtccctccctcccgagtcggcagccaccagcaagcgggcaccgcctgaggtcacagctgctgccggcccggcacctcccacggcccctgagcccgccggtgcctcctccgagcccgaggctggggactggcgccccgagatgtcaccctgctccaatgtggtcgtcaccgatgtcaccagcaacctcctgacggtcacaatcaaggaattctgcaaccctgaggatttcgagaaggtggctgctggggtagcaggcgccgctgggggcggtggcagcattggggcgagcaagtgagggggctccaccaaggaggggggcttgggggggccctcctgcccgaagtcatactcttgctcccaccccacccttgcccccagccctctctccctgtgctttgcttgtctcaaatggctcggtgttgacccagggatggggctgggtagttggggtcccagaaagccgggggtaggggccaccctggaatggggcaggggaagggcacaccccctgcccatgcatggtagcccactgggtggtttctggaaagccctagaaactagggttcctctgccccttccacatcccacctgtctctctagcttgcttcctgctctcctgtgcggcgtctgatttctcggtgctaacctggcagctgtggggcccttaggagccccccaccgagggtggacacagtccctttccttcctgcagatgcctaggcaggaggagggcttcctgcctgtttggcaaagtcccaggcagaggccaaggatgaggcctgactcggctcctccctccacatcagccagggcatcagaagttgggccagggcggggtcttccctgctcgattttggacgaggcctaagtagaccccctatgccctgccccagccctggctctttcctaaccccctcaacggtgggaggaactggcagagggtgcgcctggccacagcctccccgcatctaaaggccccttcagttcttgaccaaaggtgctacgagaacctgccgtggaaacttccagttgtgcgtctgccccactcgctgtgtttgtccgtgggttcatacatgcattgggtgctaggccccaggctgccgggtggcaccctttacagttcctttgaacaggggcattgaaggcctggactgcctctcgcctcagtaggcctggggaccaggcttgggtctggaggtttgctgtggaagtcaccaggcctcccctcctggcccaggtgtgctgggggcaccgtgccccccacccccctgccctcctcagggtggtcagcccaacctgtcggaccttcacttcacatcatggtggggaccgagatagagagggagaccccattccaagctccctcttcctcccggtgtttggggaggatgctgaagaatccattcccgagggcctcccggcttgtcccagcccctcttttgcttctgaccacggaggctttctcacagcccagcctgcctgaagcaaaggaggctcccgtgtcctgggcagcttctgtttccctctgctgcctgggagctgaggcacccgtgccagtggcagaggccacagccccagccttaggccaggccctgggagggcaggcaggcaaaggggagaccagagggtctgtgttctccaggagaatgagggtgttggtcccagaattgggaccggggccccgctggccagccctgggccacttcccgggtctccattgtgcgtgggtggcgtgttccaggcgtggctggagctggcttcctggctgtgctgccatgggcccctccctcagaagcacgttggcaggaggccgatcagaaccctagcgcctttggtcctaagaatgggaggctgccttccttcccaatctccctgccagggcccacagcgtggccctagccctcccctccccgggatgtagaacggggaccctcgcagggttggggcgggggctgatactcctcggcccctccctaccctgccctgtgtgttggctttgtggccgtccaagtgccaattggcttttcgcccaaataagggctggtatttctcctctgtccttggaggtgatttccccctgaccccctcccccaggtgagtgaccacctgggtgccagttacaggtgtttccagagaccatagaaatgtgttttcctgagagttcgtgtcattcgtgacttttttgtaaagaagttgtgttttcagaggtgattttatgacaggaaagtgaaagaattagttttgcaaaaaaacaaaaacaaaaaaagaggaaaaaaaaaagaaatagaaaaaaatattgtgggattcctatgggggggtggcgggggagaaagagctatttaagaaaaaatagtaacgcagtgattgcacaggtgaggtggcaatgtcaggatggggcggaggcctgggcccagctggcaggtcccctggcatcgcaggcactgtggagagggcctggacccagatctccacacccgtgcttgctcaaagggaaggacaacagcgggcccccgggagctaacccaagctgcaggtcccggcaagctgaggtttgggagggtgggggttgtcactggtgattttctccagggggctggtgagtgggcagtttggtttcttgcccccttctgttcctttcccagttgttgggccatctggtccccaccaccgccaccctatgggggagacctccctccccacgggtcaccctaaagcccacaacctctctgagcctccctggcctgaaaggggatgcaggcttcaggaggcaagaagctgggcccctgggggtggctggggagagggaatgcatttcccttgccacaggtggtctgcttctgctggcctgagctccaagtggagcagcccgggccagccttggtgcatgaagaggcaccaggcacaccgccttgaggtgggcagtgcccatgggggcccgagtggatgggaccgagggtgagtggagcctccttcctcccctctctagtacccccgcctcccacacacttgcacggatcggcctcccttgggagatcagcctccatgggcccctcgtccacccttgctgctttccatttgcctaattaccaagcagaagttgcaatctggtttgctttatttttgtatgtgaaataacccccaaagcccaatctcctcctacgttcaatattggttggggcatccgtcatctccccttaagtgcgccccctccccacccaagtatcataggaaaccggtgaggtctggtgtctctggtttgagacggtaagttgggacccatccctgtctgggtgcccactctgacctttagtttgcccttctgtgaaatgggtgtattgggtagcaagccctcttcagaaagcgctgctggtgtcagagcagctgcccagtaccaggtggggggtcaaggttgctggtactggggcccccagctgcccacaacccctctttgttctcaccctgcaaaggggtcaaggtcaaaatgagcctcatccttcctatgatctgggaagaggtgatgatcaagtccccaacttcagtgtgaggtggacagagttggggggatggcccctttttgaagaggtgaaaatggttttggagaagcgcagctgcttcactgggggaatgcggcagggactggggcccaggatgctttggcctatggggaaaagccctttaaaaggcagggcccaggccctggagccagcacaagactggcctcgagcccctgagccaggaggtcctggaggagagccaggccggtgggcccgcccaaggctggagggtcagccccaacagggagctgggttggccagggggctggactgctaccagcctctctggcctatggggacccaagaggacacatcccccttttgcccactcttctgtgtcattttgttgttttggtttgtggtggtttttcttttttcttttgtttttcttttttctttctttctttttttttttttttttttttttttttgcacttcgcccacacaggacagtggagccccacctggtcagttccacttccgggctcccatgcacttgcccaaggcggcctctttgggacggggatggtttgaggaaacacttttaaagaaaaaaggaagacattgaaaggttttagtttcttccctatctgcatgtcctctcatatagaaagcccagaattaggggctagaactccaggagagggtctccccgactcatctcttgctgacggtcaccaggatgcagaaatagggagatggttagtgggggccaaagatgccccctcccaggccttcgtggttccctcctccgccccctgcaatctttggaggagtcagtgcctcactccagcagtgagtgcctactgtatgcaggtagtcagccaggcaaagagagactaacggtctcatgggggaaccctcttgcgggaggccaggtagctggagcgaagcgttccggctgcccttgctgctgggtggagtggagagggagacttctttttgttggttttaatttaaaaacacaaaggcctaaagaaatacgtatcttataatttttttaatttttgagacgttcatttaatgaattgtgcacgaatgaattctatatatataaaatatacatatatagctctatatttggggaggggcactgtctcttttttctctcatttttaaaatgaagtgttgttgcctttgtatgtggttcaaccatccagctcccagctggctaaactttgcctccagtggtcaaagatgggaaaagagtggggttggcaggagatggaaaacggaggtgccgccccagcatggggggcaggtcccccagtccaccctgcccctccccctgtggagaagacgcttagttgggggtgtgggtttgggctccattctggattcggcggttccgggggaggggtgggtctgtgccgattactctgtcttgtacgtttgttctgctgctcttcaatattgtatcaacgccaggaaaggggggtgaaaagcctcttttaccccccaaataaattgtcacattccgaagctgaggcctagcccctaggttggggtgtgtctgtgtcttc

SEQ ID NO: 420480 - DNA, 6081 bp, Homo sapiens
cgccgcgctcccgcccgccggggcctgggcgctgcggcgcgtgcgcgagcggtgccgcaccggccgcgggcgcagggagtattatgggctgtgggtgccgctgagcaagatggagctgtctgcagtgggcgagcgggtcttcgcggccgaatccatcatcaaacggcggatccgaaagggacgcatcgagtacctggtgaaatggaaggggtgggcgatcaagtacagcacttgggagcccgaggagaacatcctggactcgcggctcattgcagccttcgaacaaaaggagagggagcgtgagctgtatgggcccaagaagaggggacccaaacccaaaactttcctcctgaaggcgcgggcccaggccgaggccctccgcatcagtgatgtgcatttctctgtcaagccgagcgccagtgcctcctcgcccaagctgcactccagcgcagccgtgcaccggctcaagaaggacatccgccgctgccaccgtatgtcccgccgtcccctgccccgcccggacccgcaggggggcagccccggactgcgcccgcccatttcgcccttctcggagacggtgcgcatcatcaaccgcaaggtgaagccgcgggagcccaagcggaaccgcatcatcctgaacctgaaggtgatcgacaagggcgctggcggcgggggcgccgggcagggggccggggcgctggcccgccccaaagtcccctcgcggaaccgcgttataggcaagagcaagaagttcagcgagagcgtcctgcgtacacagatccgccacatgaagttcggcgcctttgcgctgtacaagcctccgcccgcccccctggtagccccgtcccccggcaaggctgaggcctcagccccgggccctgggctacttctggccgcccccgccgccccctacgacgcccgcagctctggctcctccggctgcccctcgcctacaccacagtcctctgaccccgacgacacgccccccaagctcctccccgagaccgtgagcccatccgcccccagctggcgcgagccggaggtgctcgacctgtccctccctcccgagtcggcagccaccagcaagcgggcaccgcctgaggtcacagctgctgccggcccggcacctcccacggcccctgagcccgccggtgcctcctccgagcccgaggctggggactggcgccccgagatgtcaccctgctccaatgtggtcgtcaccgatgtcaccagcaacctcctgacggtcacaatcaaggaattctgcaaccctgaggatttcgagaaggtggctgctggggtagcaggcgccgctgggggcggtggcagcattggggcgagcaagtgagggggctccaccaaggaggggggcttgggggggccctcctgcccgaagtcatactcttgctcccaccccacccttgcccccagccctctctccctgtgctttgcttgtctcaaatggctcggtgttgacccagggatggggctgggtagttggggtcccagaaagccgggggtaggggccaccctggaatggggcaggggaagggcacaccccctgcccatgcatggtagcccactgggtggtttctggaaagccctagaaactagggttcctctgccccttccacatcccacctgtctctctagcttgcttcctgctctcctgtgcggcgtctgatttctcggtgctaacctggcagctgtggggcccttaggagccccccaccgagggtggacacagtccctttccttcctgcagatgcctaggcaggaggagggcttcctgcctgtttggcaaagtcccaggcagaggccaaggatgaggcctgactcggctcctccctccacatcagccagggcatcagaagttgggccagggcggggtcttccctgctcgattttggacgaggcctaagtagaccccctatgccctgccccagccctggctctttcctaacccccgcatctaaaggccccttcagttcttgaccaaaggtgctacgagaacctgccgtggaaacttccagttgtgcgtctgccccactcgctgtgtttgtccgtgggttcatacatgcattgggtgctaggccccaggctgccgggtggcaccctttacagttcctttgaacaggggcattgaaggcctggactgcctctcgcctcagtaggcctggggaccaggcttgggtctggaggtttgctgtggaagtcaccaggcctcccctcctggcccaggtgtgctgggggcaccgtgccccccacccccctgccctcctcagggtggtcagcccaacctgtcggaccttcacttcacatcatggtggggaccgagatagagagggagaccccattccaagctccctcttcctcccggtgtttggggaggatgctgaagaatccattcccgagggcctcccggcttgtcccagcccctcttttgcttctgaccacggaggctttctcacagcccagcctgcctgaagcaaaggaggctcccgtgtcctgggcagcttctgtttccctctgctgcctgggagctgaggcacccgtgccagtggcagaggccacagccccagccttaggccaggccctgggagggcaggcaggcaaaggggagaccagagggtctgtgttctccaggagaatgagggtgttggtcccagaattgggaccggggccccgctggccagccctgggccacttcccgggtctccattgtgcgtgggtggcgtgttccaggcgtggctggagctggcttcctggctgtgctgccatgggcccctccctcagaagcacgttggcaggaggccgatcagaaccctagcgcctttggtcctaagaatgggaggctgccttccttcccaatctccctgccagggcccacagcgtggccctagccctcccctccccgggatgtagaacggggaccctcgcagggttggggcgggggctgatactcctcggcccctccctaccctgccctgtgtgttggctttgtggccgtccaagtgccaattggcttttcgcccaaataagggctggtatttctcctctgtccttggaggtgatttccccctgaccccctcccccaggtgagtgaccacctgggtgccagttacaggtgtttccagagaccatagaaatgtgttttcctgagagttcgtgtcattcgtgacttttttgtaaagaagttgtgttttcagaggtgattttatgacaggaaagtgaaagaattagttttgcaaaaaaacaaaaacaaaaaaagaggaaaaaaaaaagaaatagaaaaaaatattgtgggattcctatgggggggtggcgggggagaaagagctatttaagaaaaaatagtaacgcagtgattgcacaggtgaggtggcaatgtcaggatggggcggaggcctgggcccagctggcaggtcccctggcatcgcaggcactgtggagagggcctggacccagatctccacacccgtgcttgctcaaagggaaggacaacagcgggcccccgggagctaacccaagctgcaggtcccggcaagctgaggtttgggagggtgggggttgtcactggtgattttctccagggggctggtgagtgggcagtttggtttcttgcccccttctgttcctttcccagttgttgggccatctggtccccaccaccgccaccctatgggggagacctccctccccacgggtcaccctaaagcccacaacctctctgagcctccctggcctgaaaggggatgcaggcttcaggaggcaagaagctgggcccctgggggtggctggggagagggaatgcatttcccttgccacaggtggtctgcttctgctggcctgagctccaagtggagcagcccgggccagccttggtgcatgaagaggcaccaggcacaccgccttgaggtgggcagtgcccatgggggcccgagtggatgggaccgagggtgagtggagcctccttcctcccctctctagtacccccgcctcccacacacttgcacggatcggcctcccttgggagatcagcctccatgggcccctcgtccacccttgctgctttccatttgcctaattaccaagcagaagttgcaatctggtttgctttatttttgtatgtgaaataacccccaaagcccaatctcctcctacgttcaatattggttggggcatccgtcatctccccttaagtgcgccccctccccacccaagtatcataggaaaccggtgaggtctggtgtctctggtttgagacggtaagttgggacccatccctgtctgggtgcccactctgacctttagtttgcccttctgtgaaatgggtgtattgggtagcaagccctcttcagaaagcgctgctggtgtcagagcagctgcccagtaccaggtggggggtcaaggttgctggtactggggcccccagctgcccacaacccctctttgttctcaccctgcaaaggggtcaaggtcaaaatgagcctcatccttcctatgatctgggaagaggtgatgatcaagtccccaacttcagtgtgaggtggacagagttggggggatggcccctttttgaagaggtgaaaatggttttggagaagcgcagctgcttcactgggggaatgcggcagggactggggcccaggatgctttggcctatggggaaaagccctttaaaaggcagggcccaggccctggagccagcacaagactggcctcgagcccctgagccaggaggtcctggaggagagccaggccggtgggcccgcccaaggctggagggtcagccccaacagggagctgggttggccagggggctggactgctaccagcctctctggcctatggggacccaagaggacacatcccccttttgcccactcttctgtgtcattttgttgttttggtttgtggtggtttttcttttttcttttgtttttcttttttctttctttctttttttttttttttttttttttttttgcacttcgcccacacaggacagtggagccccacctggtcagttccacttccgggctcccatgcacttgcccaaggcggcctctttgggacggggatggtttgaggaaacacttttaaagaaaaaaggaagacattgaaaggttttagtttcttccctatctgcatgtcctctcatatagaaagcccagaattaggggctagaactccaggagagggtctccccgactcatctcttgctgacggtcaccaggatgcagaaatagggagatggttagtgggggccaaagatgccccctcccaggccttcgtggttccctcctccgccccctgcaatctttggaggagtcagtgcctcactccagcagtgagtgcctactgtatgcaggtagtcagccaggcaaagagagactaacggtctcatgggggaaccctcttgcgggaggccaggtagctggagcgaagcgttccggctgcccttgctgctgggtggagtggagagggagacttctttttgttggttttaatttaaaaacacaaaggcctaaagaaatacgtatcttataatttttttaatttttgagacgttcatttaatgaattgtgcacgaatgaattctatatatataaaatatacatatatagctctatatttggggaggggcactgtctcttttttctctcatttttaaaatgaagtgttgttgcctttgtatgtggttcaaccatccagctcccagctggctaaactttgcctccagtggtcaaagatgggaaaagagtggggttggcaggagatggaaaacggaggtgccgccccagcatggggggcaggtcccccagtccaccctgcccctccccctgtggagaagacgcttagttgggggtgtgggtttgggctccattctggattcggcggttccgggggaggggtgggtctgtgccgattactctgtcttgtacgtttgttctgctgctcttcaatattgtatcaacgccaggaaaggggggtgaaaagcctcttttaccccccaaataaattgtcacattccgaagctgaggcctagcccctaggttggggtgtgtctgtgtcttc

SEQ ID NO: 420481 - DNA, 5832 bp, Homo sapiens
cgccgcgctcccgcccgccggggcctgggcgctgcggcgcgtgcgcgagcggtgccgcaccggccgcgggcgcagggagtattatgggctgtgggtgccgctgagcaagatggagctgtctgcagtgggcgagcgggtcttcgcggccgaatccatcatcaaacggcggatccgaaagggacgcatcgagtacctggtgaaatggaaggggtgggcgatcaagtacagcacttgggagcccgaggagaacatcctggactcgcggctcattgcagccttcgaacaaaaggagagggagcgtgagctgtatgggcccaagaagaggggacccaaacccaaaactttcctcctgaaggcgcgggcccaggccgaggccctccgcatcagtgatgtgcatttctctgtcaagccgagcgccagtgcctcctcgcccaagctgcactccagcgcagccgtgcaccggctcaagaaggacatccgccgctgccaccgtatgtcccgccgtcccctgccccgcccggacccgcaggggggcagccccggactgcgcccgcccatttcgcccttctcggagacggtgcgcatcatcaaccgcaaggtgaagccgcgggagcccaagcggaaccgcatcatcctgaacctgaaggtgatcgacaagggcgctggcggcgggggcgccgggcagggggccggggcgctggcccgccccaaagtcccctcgcggaaccgcgttataggcaagagcaagaagttcagcgagagcgtcctgcgtacacagatccgccacatgaagttcggcgcctttgcgctgtacaagcctccgcccgcccccctggtagccccgtcccccggcaaggctgaggcctcagccccgggccctgggctacttctggccgcccccgccgccccctacgacgcccgcagctctggctcctccggctgcccctcgcctacaccacagtcctctgaccccgacgacacgccccccaagctcctccccgagaccgtgagcccatccgcccccagctggcgcgagccggaggtgctcgacctgtccctccctcccgagtcggcagccaccagcaagcgggcaccgcctgaggtcacagctgctgccggcccggcacctcccacggcccctgagcccgccggtgcctcctccgagcccgaggctggggactggcgccccgagatgtcaccctgctccaatgtggtcgtcaccgatgtcaccagcaacctcctgacggtcacaatcaaggaattctgcaaccctgaggatttcgagaaggtggctgctggggtagcaggcgccgctgggggcggtggcagcattggggcgagcaagtgagggggctccaccaaggaggggggcttgggggggccctcctgcccgaagtcatactcttgctcccaccccacccttgcccccagccctctctccctgtgctttgcttgtctcaaatggctcggtgttgacccagggatggggctgggtagttggggtcccagaaagccgggggtaggggccaccctggaatggggcaggggaagggcacaccccctgcccatgcatggtagcccactgggtggtttctggaaagccctagaaactagggttcctctgccccttccacatcccacctgtctctctagcttgcttcctgctctcctgtgcggcgtctgatttctcggtgctaacctggcagctgtggggcccttaggagccccccaccgagggtggacacagtccctttccttcctgcagatgcctaggcaggaggagggcttcctgcctgtttggcaaagtcccaggcagaggccaaggatgaggcctgactcggctcctccctccacatcagccagggcatcagaagttgggccagggcggggtcttccctgctcgattttggacgaggcctaagtagaccccctatgccctgccccagccctggctctttcctaaccccctcaacggtgggaggaactggcagagggtgcgcctggccacagcctccccgcatctaaaggccccttcagttcttgaccaaaggtgctacgagaacctgccgtggaaacttccagttgtgcgtctgccccactcgctgtgtttgtccgtgggttcatacatgcattgggtgctaggccccaggctgccgggtggcaccctttacagttcctttgaacaggggcattgaaggcctggactgcctctcgcctcagtaggcctggggaccaggcttgggtctggaggtttgctgtggaagtcaccaggcctcccctcctggcccaggtgtgctgggggcaccgtgccccccacccccctgccctcctcagggtggtcagcccaacctgtcggaccttcacttcacatcatggtggggaccgagatagagagggagaccccattccaagctccctcttcctcccggtgtttggggaggatgctgaagaatccattcccgagggcctcccggcttgtcccagcccctcttttgcttctgaccacggaggctttctcacagcccagcctgcctgaagcaaaggaggctcccgtgtcctgggcagcttctgtttccctctgctgcctgggagctgaggcacccgtgccagtggcagaggccacagccccagccttaggccaggccctgggagggcaggcaggcaaaggggagaccagagggtctgtgttctccaggagaatgagggtgttggtcccagaattgggaccggggccccgctggccagccctgggccacttcccgggtctccattgtgcgtgggtggcgtgttccaggcgtggctggagctggcttcctggctgtgctgccatgggcccctccctcagaagcacgttggcaggaggccgatcagaaccctagcgcctttggtcctaagaatgggaggctgccttccttcccaatctccctgccagggcccacagcgtggccctagccctcccctccccgggatgtagaacggggaccctcgcagggttggggcgggggctgatactcctcggcccctccctaccctgccctgtgtgttggctttgtggccgtccaagtgccaattggcttttcgcccaaataagggctggtatttctcctctgtccttggaggtgatttccccctgaccccctcccccaggtgagtgaccacctgggtgccagttacaggtgtttccagagaccatagaaatgtgttttcctgagagttcgtgtcattcgtgacttttttgtaaagaagttgtgttttcagaggtgattttatgacaggaaagtgaaagaattagttttgcaaaaaaacaaaaacaaaaaaagaggaaaaaaaaaagaaatagaaaaaaatattgtgggattcctatgggggggtggcgggggagaaagagctatttaagaaaaaatagtaacgcagtgattgcacaggtgaggtggcaatgtcaggatggggcggaggcctgggcccagctggcaggtcccctggcatcgcaggcactgtggagagggcctggacccagatctccacacccgtgcttgctcaaagggaaggacaacagcgggcccccgggagctaacccaagctgcaggtcccggcaagctgaggtttgggagggtgggggttgtcactggtgattttctccagggggctggtgagtgggcagtttggtttcttgcccccttctgttcctttcccagttgttgggccatctggtccccaccaccgccaccctatgggggagacctccctccccacgggtcaccctaaagcccacaacctctctgagcctccctggcctgaaaggggatgcaggcttcaggaggcaagaagctgggcccctgggggtggctggggagagggaatgcatttcccttgccacaggtggtctgcttctgctggcctgagctccaagtggagcagcccgggccagccttggtgcatgaagaggcaccaggcacaccgccttgaggtgggcagtgcccatgggggcccgagtggatgggaccgagggtgagtggagcctccttcctcccctctctagtacccccgcctcccacacacttgcacggatcggcctcccttgggagatcagcctccatgggcccctcgtccacccttgctgctttccatttgcctaattaccaagcagaagttgcaatctggtttgctttatttttgtatgtgaaataacccccaaagcccaatctcctcctacgttcaatattggttggggcatccgtcatctccccttaagtgcgccccctccccacccaagtatcataggaaaccggtgaggtctggtgtctctggtttgagacggtaagttgggacccatccctgtctgggtgcccactctgacctttagtttgcccttctgtgaaatgggtgtattgggtagcaagccctcttcagaaagcgctgctggtgtcagagcagctgcccagtaccaggtggggggtcaaggttgctggtactggggcccccagctgcccacaacccctctttgttctcaccctgcaaaggggtcaaggtcaaaatgagcctcatccttcctatgatctgggaagaggtgatgatcaagtccccaacttcagtgtgaggtggacagagttggggggatggcccctttttgaagaggtgaaaatggttttggagaagcgcagctgcttcactgggggaatgcggcagggactggggcccaggatgctttggcctatggggaaaagccctttaaaaggcagggcccaggccctggagccagcacaagactggcctcgagcccctgagccaggaggtcctggaggagagccaggccggtgggcccgcccaaggctggagggtcagccccaacagggagctgggttggccagggggctggactgctaccagcctctctggcctatggggacccaagaggacacatcccccttttgcccactcttctgtgtcattttgttgttttggtttgtggtggtttttcttttttcttttgtttttcttttttctttctttctttttttttttttttttttttttttttgcacttcgcccacacaggacagtggagccccacctggtcagttccacttccgggctcccatgcacttgcccaaggcggcctctttgggacggggatggtttgaggaaacacttttaaagaaaaaaggaagacattgaaaggttttagtttcttccctatctgcatgtcctctcatatagaaagcccagaattaggggctagaactccaggagagggtctccccgactcatctcttgctgacggtcaccaggatgcagaaatagggagatggttagtgggggccaaagatgccccctcccaggccttcgtggttccctcctccgccccctgcaatctttggaggagtcagtgcctcactccagcagtgagtgcctactgtatgcaggtagtcagccaggcaaagagagactaacggtctcatgggggaaccctcttgcgggaggccaggtagctggagcgaagcgttccggctgcccttgctgctgggtggagtggagagggagacttctttttgttggttttaatttaaaaacacaaaggcctaaaaaaaaaaaaaaaaaaaaaaaaaaaaaaacacacacgaccaaacaccatcccaaaaaaaaaaaagagcgggcgacgtcaaacaaagaagaatcacccgcaggagaggggacacaataagagcgagacggaccccaccacaattagctggaaacacaaaagagaggcgacccaaaagaagacgcacgcgcatagaaaagcgaagagagccaggccacgacgaaataacacacggtggggccggggaaaac

SEQ ID NO: 420482 - DNA, 6023 bp, Homo sapiens
cgccgcgctcccgcccgccggggcctgggcgctgcggcgcgtgcgcgagcggtgccgcaccggccgcgggcgcagggagtattatgggctgtgggtgccgctgagcaagatggagctgtctgcagtgggcgagcgggtcttcgcggccgaatccatcatcaaacggcggatccgaaagggacgcatcgagtacctggtgaaatggaaggggtgggcgatcaagtacagcacttgggagcccgaggagaacatcctggactcgcggctcattgcagccttcgaacaaaaggagagggagcgtgagctgtatgggcccaagaagaggggacccaaacccaaaactttcctcctgaaggcgcgggcccaggccgaggccctccgcatcagtgatgtgcatttctctgtcaagccgagcgccagtgcctcctcgcccaagctgcactccagcgcagccgtgcaccggctcaagaaggacatccgccgctgccaccgtatgtcccgccgtcccctgccccgcccggacccgcaggggggcagccccggactgcgcccgcccatttcgcccttctcggagacggtgcgcatcatcaaccgcaaggtgaagccgcgggagcccaagcggaaccgcatcatcctgaacctgaaggtgatcgacaagggcgctggcggcgggggcgccgggcagggggccggggcgctggcccgccccaaagtcccctcgcggaaccgcgttataggcaagagcaagaagttcagcgagagcgtcctgcgtacacagatccgccacatgaagttcggcgcctttgcgctgtacaagcctccgcccgcccccctggtagccccgtcccccggcaaggctgaggcctcagccccgggccctgggctacttctggccgcccccgccgccccctacgacgcccgcagctctggctcctccggctgcccctcgcctacaccacagtcctctgaccccgacgacacgccccccaagctcctccccgagaccgtgagcccatccgcccccagctggcgcgagccggaggtgctcgacctgtccctccctcccgagtcggcagccaccagcaagcgggcaccgcctgaggtcacagctgctgccggcccggcacctcccacggcccctgagcccgccggtgcctcctccgagcccgaggctggggactggcgccccgagatgtcaccctgctccaatgtggtcgtcaccgatgtcaccagcaacctcctgacggtcacaatcaaggaattctgcaaccctgaggatttcgagaaggtggctgctggggtagcaggcgccgctgggggcggtggcagcattggggcgagcaagtgagggggctccaccaaggaggggggcttgggggggccctcctgcccgaagtcatactcttgctcccaccccacccttgcccccagccctctctccctgtgctttgcttgtctcaaatggctcggtgttgacccagggatggggctgggtagttggggtcccagaaagccgggggtaggggccaccctggaatggggcaggggaagggcacaccccctgcccatgcatggtagcccactgggtggtttctggaaagccctagaaactagggttcctctgccccttccacatcccacctgtctctctagcttgcttcctgctctcctgtgcggcgtctgatttctcggtgctaacctggcagctgtggggcccttaggagccccccaccgagggtggacacagtccctttccttcctgcagatgcctaggcaggaggagggcttcctgcctgtttggcaaagtcccaggcagaggccaaggatgaggcctgactcggctcctccctccacatcagccagggcatcagaagttgggccagggcggggtcttccctgctcgattttggacgaggcctaagtagaccccctatgccctgccccagccctggctctttcctaaccccctcaacggtgggaggaactggcagagggtgcgcctggccacagcctccccgcatctaaaggccccttcagttcttgaccaaaggtgctacgagaacctgccgtggaaacttccagttgtgcgtctgccccactcgctgtgtttgtccgtgggttcatacatgcattgggtctggaggtttgctgtggaagtcaccaggcctcccctcctggcccaggtgtgctgggggcaccgtgccccccacccccctgccctcctcagggtggtcagcccaacctgtcggaccttcacttcacatcatggtggggaccgagatagagagggagaccccattccaagctccctcttcctcccggtgtttggggaggatgctgaagaatccattcccgagggcctcccggcttgtcccagcccctcttttgcttctgaccacggaggctttctcacagcccagcctgcctgaagcaaaggaggctcccgtgtcctgggcagcttctgtttccctctgctgcctgggagctgaggcacccgtgccagtggcagaggccacagccccagccttaggccaggccctgggagggcaggcaggcaaaggggagaccagagggtctgtgttctccaggagaatgagggtgttggtcccagaattgggaccggggccccgctggccagccctgggccacttcccgggtctccattgtgcgtgggtggcgtgttccaggcgtggctggagctggcttcctggctgtgctgccatgggcccctccctcagaagcacgttggcaggaggccgatcagaaccctagcgcctttggtcctaagaatgggaggctgccttccttcccaatctccctgccagggcccacagcgtggccctagccctcccctccccgggatgtagaacggggaccctcgcagggttggggcgggggctgatactcctcggcccctccctaccctgccctgtgtgttggctttgtggccgtccaagtgccaattggcttttcgcccaaataagggctggtatttctcctctgtccttggaggtgatttccccctgaccccctcccccaggtgagtgaccacctgggtgccagttacaggtgtttccagagaccatagaaatgtgttttcctgagagttcgtgtcattcgtgacttttttgtaaagaagttgtgttttcagaggtgattttatgacaggaaagtgaaagaattagttttgcaaaaaaacaaaaacaaaaaaagaggaaaaaaaaaagaaatagaaaaaaatattgtgggattcctatgggggggtggcgggggagaaagagctatttaagaaaaaatagtaacgcagtgattgcacaggtgaggtggcaatgtcaggatggggcggaggcctgggcccagctggcaggtcccctggcatcgcaggcactgtggagagggcctggacccagatctccacacccgtgcttgctcaaagggaaggacaacagcgggcccccgggagctaacccaagctgcaggtcccggcaagctgaggtttgggagggtgggggttgtcactggtgattttctccagggggctggtgagtgggcagtttggtttcttgcccccttctgttcctttcccagttgttgggccatctggtccccaccaccgccaccctatgggggagacctccctccccacgggtcaccctaaagcccacaacctctctgagcctccctggcctgaaaggggatgcaggcttcaggaggcaagaagctgggcccctgggggtggctggggagagggaatgcatttcccttgccacaggtggtctgcttctgctggcctgagctccaagtggagcagcccgggccagccttggtgcatgaagaggcaccaggcacaccgccttgaggtgggcagtgcccatgggggcccgagtggatgggaccgagggtgagtggagcctccttcctcccctctctagtacccccgcctcccacacacttgcacggatcggcctcccttgggagatcagcctccatgggcccctcgtccacccttgctgctttccatttgcctaattaccaagcagaagttgcaatctggtttgctttatttttgtatgtgaaataacccccaaagcccaatctcctcctacgttcaatattggttggggcatccgtcatctccccttaagtgcgccccctccccacccaagtatcataggaaaccggtgaggtctggtgtctctggtttgagacggtaagttgggacccatccctgtctgggtgcccactctgacctttagtttgcccttctgtgaaatgggtgtattgggtagcaagccctcttcagaaagcgctgctggtgtcagagcagctgcccagtaccaggtggggggtcaaggttgctggtactggggcccccagctgcccacaacccctctttgttctcaccctgcaaaggggtcaaggtcaaaatgagcctcatccttcctatgatctgggaagaggtgatgatcaagtccccaacttcagtgtgaggtggacagagttggggggatggcccctttttgaagaggtgaaaatggttttggagaagcgcagctgcttcactgggggaatgcggcagggactggggcccaggatgctttggcctatggggaaaagccctttaaaaggcagggcccaggccctggagccagcacaagactggcctcgagcccctgagccaggaggtcctggaggagagccaggccggtgggcccgcccaaggctggagggtcagccccaacagggagctgggttggccagggggctggactgctaccagcctctctggcctatggggacccaagaggacacatcccccttttgcccactcttctgtgtcattttgttgttttggtttgtggtggtttttcttttttcttttgtttttcttttttctttctttctttttttttttttttttttttttttttgcacttcgcccacacaggacagtggagccccacctggtcagttccacttccgggctcccatgcacttgcccaaggcggcctctttgggacggggatggtttgaggaaacacttttaaagaaaaaaggaagacattgaaaggttttagtttcttccctatctgcatgtcctctcatatagaaagcccagaattaggggctagaactccaggagagggtctccccgactcatctcttgctgacggtcaccaggatgcagaaatagggagatggttagtgggggccaaagatgccccctcccaggccttcgtggttccctcctccgccccctgcaatctttggaggagtcagtgcctcactccagcagtgagtgcctactgtatgcaggtagtcagccaggcaaagagagactaacggtctcatgggggaaccctcttgcgggaggccaggtagctggagcgaagcgttccggctgcccttgctgctgggtggagtggagagggagacttctttttgttggttttaatttaaaaacacaaaggcctaaagaaatacgtatcttataatttttttaatttttgagacgttcatttaatgaattgtgcacgaatgaattctatatatataaaatatacatatatagctctatatttggggaggggcactgtctcttttttctctcatttttaaaatgaagtgttgttgcctttgtatgtggttcaaccatccagctcccagctggctaaactttgcctccagtggtcaaagatgggaaaagagtggggttggcaggagatggaaaacggaggtgccgccccagcatggggggcaggtcccccagtccaccctgcccctccccctgtggagaagacgcttagttgggggtgtgggtttgggctccattctggattcggcggttccgggggaggggtgggtctgtgccgattactctgtcttgtacgtttgttctgctgctcttcaatattgtatcaacgccaggaaaggggggtgaaaagcctcttttaccccccaaataaattgtcacattccgaagctgaggcctagcccctaggttggggtgtgtctgtgtcttc

SEQ ID NO: 420483 - DNA, 4540 bp, Homo sapiens
aaaacattagctagtacgagctggttctgaattcggcgagctccgtgcgcactgtctctctagcttgcttcctgctctcctgtgcggcgtctgatttctcggtgctaacctggcagctgtggggcccttaggagccccccaccgagggtggacacagtccctttccttcctgcagatgcctaggcaggaggagggcttcctgcctgtttggcaaagtcccaggcagaggccaaggatgaggcctgactcggctcctccctccacatcagccagggcatcagaagttgggccagggcggggtcttccctgctcgattttggacgaggcctaagtagaccccctatgccctgccccagccctggctctttcctaaccccctcaacggtgggaggaactggcagagggtgcgcctggccacagcctccccgcatctaaaggccccttcagttcttgaccaaaggtgctacgagaacctgccgtggaaacttccagttgtgcgtctgccccactcgctgtgtttgtccgtgggttcatacatgcattgggtgctaggccccaggctgccgggtggcaccctttacagttcctttgaacaggggcattgaaggcctggactgcctctcgcctcagtaggcctggggaccaggcttgggtctggaggtttgctgtggaagtcaccaggcctcccctcctggcccaggtgtgctgggggcaccgtgccccccacccccctgccctcctcagggtggtcagcccaacctgtcggaccttcacttcacatcatggtggggaccgagatagagagggagaccccattccaagctccctcttcctcccggtgtttggggaggatgctgaagaatccattcccgagggcctcccggcttgtcccagcccctcttttgcttctgaccacggaggctttctcacagcccagcctgcctgaagcaaaggaggctcccgtgtcctgggcagcttctgtttccctctgctgcctgggagctgaggcacccgtgccagtggcagaggccacagccccagccttaggccaggccctgggagggcaggcaggcaaaggggagaccagagggtctgtgttctccaggagaatgagggtgttggtcccagaattgggaccggggccccgctggccagccctgggccacttcccgggtctccattgtgcgtgggtggcgtgttccaggcgtggctggagctggcttcctggctgtgctgccatgggcccctccctcagaagcacgttggcaggaggccgatcagaaccctagcgcctttggtcctaagaatgggaggctgccttccttcccaatctccctgccagggcccacagcgtggccctagccctcccctccccgggatgtagaacggggaccctcgcagggttggggcgggggctgatactcctcggcccctccctaccctgccctgtgtgttggctttgtggccgtccaagtgccaattggcttttcgcccaaataagggctggtatttctcctctgtccttggaggtgatttccccctgaccccctcccccaggtgagtgaccacctgggtgccagttacaggtgtttccagagaccatagaaatgtgttttcctgagagttcgtgtcattcgtgacttttttgtaaagaagttgtgttttcagaggtgattttatgacaggaaagtgaaagaattagttttgcaaaaaaacaaaaacaaaaaaagaggaaaaaaaaaagaaatagaaaaaaatattgtgggattcctatgggggggtggcgggggagaaagagctatttaagaaaaaatagtaacgcagtgattgcacaggtgaggtggcaatgtcaggatggggcggaggcctgggcccagctggcaggtcccctggcatcgcaggcactgtggagagggcctggacccagatctccacacccgtgcttgctcaaagggaaggacaacagcgggcccccgggagctaacccaagctgcaggtcccggcaagctgaggtttgggagggtgggggttgtcactggtgattttctccagggggctggtgagtgggcagtttggtttcttgcccccttctgttcctttcccagttgttgggccatctggtccccaccaccgccaccctatgggggagacctccctccccacgggtcaccctaaagcccacaacctctctgagcctccctggcctgaaaggggatgcaggcttcaggaggcaagaagctgggcccctgggggtggctggggagagggaatgcatttcccttgccacaggtggtctgcttctgctggcctgagctccaagtggagcagcccgggccagccttggtgcatgaagaggcaccaggcacaccgccttgaggtgggcagtgcccatgggggcccgagtggatgggaccgagggtgagtggagcctccttcctcccctctctagtacccccgcctcccacacacttgcacggatcggcctcccttgggagatcagcctccatgggcccctcgtccacccttgctgctttccatttgcctaattaccaagcagaagttgcaatctggtttgctttatttttgtatgtgaaataacccccaaagcccaatctcctcctacgttcaatattggttggggcatccgtcatctccccttaagtgcgccccctccccacccaagtatcataggaaaccggtgaggtctggtgtctctggtttgagacggtaagttgggacccatccctgtctgggtgcccactctgacctttagtttgcccttctgtgaaatgggtgtattgggtagcaagccctcttcagaaagcgctgctggtgtcagagcagctgcccagtaccaggtggggggtcaaggttgctggtactggggcccccagctgcccacaacccctctttgttctcaccctgcaaaggggtcaaggtcaaaatgagcctcatccttcctatgatctgggaagaggtgatgatcaagtccccaacttcagtgtgaggtggacagagttggggggatggcccctttttgaagaggtgaaaatggttttggagaagcgcagctgcttcactgggggaatgcggcagggactggggcccaggatgctttggcctatggggaaaagccctttaaaaggcagggcccaggccctggagccagcacaagactggcctcgagcccctgagccaggaggtcctggaggagagccaggccggtgggcccgcccaaggctggagggtcagccccaacagggagctgggttggccagggggctggactgctaccagcctctctggcctatggggacccaagaggacacatcccccttttgcccactcttctgtgtcattttgttgttttggtttgtggtggtttttcttttttcttttgtttttcttttttctttctttctttttttttttttttttttttttttttgcacttcgcccacacaggacagtggagccccacctggtcagttccacttccgggctcccatgcacttgcccaaggcggcctctttgggacggggatggtttgaggaaacacttttaaagaaaaaaggaagacattgaaaggttttagtttcttccctatctgcatgtcctctcatatagaaagcccagaattaggggctagaactccaggagagggtctccccgactcatctcttgctgacggtcaccaggatgcagaaatagggagatggttagtgggggccaaagatgccccctcccaggccttcgtggttccctcctccgccccctgcaatctttggaggagtcagtgcctcactccagcagtgagtgcctactgtatgcaggtagtcagccaggcaaagagagactaacggtctcatgggggaaccctcttgcgggaggccaggtagctggagcgaagcgttccggctgcccttgctgctgggtggagtggagagggagacttctttttgttggttttaatttaaaaacacaaaggcctaaagaaatacgtatcttataatttttttaatttttgagacgttcatttaatgaattgtgcacgaatgaattctatatatataaaatatacatatatagctctatatttggggaggggcactgtctcttttttctctcatttttaaaatgaagtgttgttgcctttgtatgtggttcaaccatccagctcccagctggctaaactttgcctccagtggtcaaagatgggaaaagagtggggttggcaggagatggaaaacggaggtgccgccccagcatggggggcaggtcccccagtccaccctgcccctccccctgtggagaagacgcttagttgggggtgtgggtttgggctccattctggattcggcggttccgggggaggggtgggtctgtgccgattactctgtcttgtacgtttgttctgctgctcttcaatattgtatcaacgccaggaaaggggggtgaaaagcctcttttaccccccaaataaattgtcacattccgaagctgaggcctagcccctaggttggggtgtgtctgtgtcttc

SEQ ID NO: 420484 - DNA, 3864 bp, Homo sapiens
cgccgcgctcccgcccgccggggcctgggcgctgcggcgcgtgcgcgagcggtgccgcaccggccgcgggcgcagggagtattatgggctgtgggtgccgctgagcaagatggagctgtctgcagtgggcgagcgggtcttcgcggccgaatccatcatcaaacggcggatccgaaagggacgcatcgagtacctggtgaaatggaaggggtgggcgatcaagtacagcacttgggagcccgaggagaacatcctggactcgcggctcattgcagccttcgaacaaaaggagagggagcgtgagctgtatgggcccaagaagaggggacccaaacccaaaactttcctcctgaaggcgcgggcccaggccgaggccctccgcatcagtgatgtgcatttctctgtcaagccgagcgccagtgcctcctcgcccaagctgcactccagcgcagccgtgcaccggctcaagaaggacatccgccgctgccacttcccgggtctccattgtgcgtgggtggcgtgttccaggcgtggctggagctggcttcctggctgtgctgccatgggcccctccctcagaagcacgttggcaggaggccgatcagaaccctagcgcctttggtcctaagaatgggaggctgccttccttcccaatctccctgccagggcccacagcgtggccctagccctcccctccccgggatgtagaacggggaccctcgcagggttggggcgggggctgatactcctcggcccctccctaccctgccctgtgtgttggctttgtggccgtccaagtgccaattggcttttcgcccaaataagggctggtatttctcctctgtccttggaggtgatttccccctgaccccctcccccaggtgagtgaccacctgggtgccagttacaggtgtttccagagaccatagaaatgtgttttcctgagagttcgtgtcattcgtgacttttttgtaaagaagttgtgttttcagaggtgattttatgacaggaaagtgaaagaattagttttgcaaaaaaacaaaaacaaaaaaagaggaaaaaaaaaagaaatagaaaaaaatattgtgggattcctatgggggggtggcgggggagaaagagctatttaagaaaaaatagtaacgcagtgattgcacaggtgaggtggcaatgtcaggatggggcggaggcctgggcccagctggcaggtcccctggcatcgcaggcactgtggagagggcctggacccagatctccacacccgtgcttgctcaaagggaaggacaacagcgggcccccgggagctaacccaagctgcaggtcccggcaagctgaggtttgggagggtgggggttgtcactggtgattttctccagggggctggtgagtgggcagtttggtttcttgcccccttctgttcctttcccagttgttgggccatctggtccccaccaccgccaccctatgggggagacctccctccccacgggtcaccctaaagcccacaacctctctgagcctccctggcctgaaaggggatgcaggcttcaggaggcaagaagctgggcccctgggggtggctggggagagggaatgcatttcccttgccacaggtggtctgcttctgctggcctgagctccaagtggagcagcccgggccagccttggtgcatgaagaggcaccaggcacaccgccttgaggtgggcagtgcccatgggggcccgagtggatgggaccgagggtgagtggagcctccttcctcccctctctagtacccccgcctcccacacacttgcacggatcggcctcccttgggagatcagcctccatgggcccctcgtccacccttgctgctttccatttgcctaattaccaagcagaagttgcaatctggtttgctttatttttgtatgtgaaataacccccaaagcccaatctcctcctacgttcaatattggttggggcatccgtcatctccccttaagtgcgccccctccccacccaagtatcataggaaaccggtgaggtctggtgtctctggtttgagacggtaagttgggacccatccctgtctgggtgcccactctgacctttagtttgcccttctgtgaaatgggtgtattgggtagcaagccctcttcagaaagcgctgctggtgtcagagcagctgcccagtaccaggtggggggtcaaggttgctggtactggggcccccagctgcccacaacccctctttgttctcaccctgcaaaggggtcaaggtcaaaatgagcctcatccttcctatgatctgggaagaggtgatgatcaagtccccaacttcagtgtgaggtggacagagttggggggatggcccctttttgaagaggtgaaaatggttttggagaagcgcagctgcttcactgggggaatgcggcagggactggggcccaggatgctttggcctatggggaaaagccctttaaaaggcagggcccaggccctggagccagcacaagactggcctcgagcccctgagccaggaggtcctggaggagagccaggccggtgggcccgcccaaggctggagggtcagccccaacagggagctgggttggccagggggctggactgctaccagcctctctggcctatggggacccaagaggacacatcccccttttgcccactcttctgtgtcattttgttgttttggtttgtggtggtttttcttttttcttttgtttttcttttttctttctttctttttttttttttttttttttttttttgcacttcgcccacacaggacagtggagccccacctggtcagttccacttccgggctcccatgcacttgcccaaggcggcctctttgggacggggatggtttgaggaaacacttttaaagaaaaaaggaagacattgaaaggttttagtttcttccctatctgcatgtcctctcatatagaaagcccagaattaggggctagaactccaggagagggtctccccgactcatctcttgctgacggtcaccaggatgcagaaatagggagatggttagtgggggccaaagatgccccctcccaggccttcgtggttccctcctccgccccctgcaatctttggaggagtcagtgcctcactccagcagtgagtgcctactgtatgcaggtagtcagccaggcaaagagagactaacggtctcatgggggaaccctcttgcgggaggccaggtagctggagcgaagcgttccggctgcccttgctgctgggtggagtggagagggagacttctttttgttggttttaatttaaaaacacaaaggcctaaagaaatacgtatcttataatttttttaatttttgagacgttcatttaatgaattgtgcacgaatgaattctatatatataaaatatacatatatagctctatatttggggaggggcactgtctcttttttctctcatttttaaaatgaagtgttgttgcctttgtatgtggttcaaccatccagctcccagctggctaaactttgcctccagtggtcaaagatgggaaaagagtggggttggcaggagatggaaaacggaggtgccgccccagcatggggggcaggtcccccagtccaccctgcccctccccctgtggagaagacgcttagttgggggtgtgggtttgggctccattctggattcggcggttccgggggaggggtgggtctgtgccgattactctgtcttgtacgtttgttctgctgctcttcaatattgtatcaacgccaggaaaggggggtgaaaagcctcttttaccccccaaataaattgtcacattccgaagctgaggcctagcccctaggttggggtgtgtctgtgtcttc

SEQ ID NO: 420485 - DNA, 952 bp, Homo sapiens
tggacagcacagaggaggtggacagcacagaggaggtggacagcacagtggagggggctagaactccaggagagggtctccccgactcatctcttgctgacggtcaccaggatgcagaaatagggagatggttagtgggggccaaagatgccccctcccaggccttcgtggttccctcctccgccccctgcaatctttggaggagtcagtgcctcactccagcagtgagtgcctactgtatgcaggtagtcagccaggcaaagagagactaacggtctcatgggggaaccctcttgcgggaggccaggtagctggagcgaagcgttccggctgcccttgctgctgggtggagtggagagggagacttctttttgttggttttaatttaaaaacacaaaggcctaaagaaatacgtatcttataatttttttaatttttgagacgttcatttaatgaattgtgcacgaatgaattctatatatataaaatatacatatatagctctatatttggggaggggcactgtctcttttttctctcatttttaaaatgaagtgttgttgcctttgtatgtggttcaaccatccagctcccagctggctaaactttgcctccagtggtcaaagatgggaaaagagtggggttggcaggagatggaaaacggaggtgccgccccagcatggggggcaggtcccccagtccaccctgcccctccccctgtggagaagacgcttagttgggggtgtgggtttgggctccattctggattcggcggttccgggggaggggtgggtctgtgccgattactctgtcttgtacgtttgttctgctgctcttcaatattgtatcaacgccaggaaaggggggtgaaaagcctcttttaccccccaaataaattgtcacattccgaagctgaggcctagcccctaggttggggtgtgtctgtgtcttc

SEQ ID NO: 420486 - DNA, 3929 bp, Homo sapiens
  misc_feature (45)..(45): n is a, c, g, or t
  misc_feature (83)..(83): n is a, c, g, or t
  misc_feature (98)..(98): n is a, c, g, or t
gcccgggcgctctcagcaggatggccaacaccttccctccatccntacaccccgccgccccctggcccgtggccgcgctcggntcccgcactgctcantccaccccctacatcccagcccgctgccagagccggggagagggcgggggccgcgtgggcgaggccgtgaacagcggctgtcacgtgggccgcccaggccaataggggtgaggctttgggtcgagctcagtcctcccccggcgcctccgactggcagtgggactcagcgggcgtggaggtcgcggctgagcgagcgagccctgggcgagtgaattgtggctgtgggttgacggtggagacaccccccggagggaggcggagggaagggaggcgaggcctgcacctgcatgcttcccgcctcccactccccagcgcccccggaccgtgcagttctctgcaggaccaggccatggagctcgaagtccggcgggtccgacaggcgttcctgtccggccggtcgcgacctctgcggtttcggctgcagcagctggaggccctgcggaggatggtgcaggagcgcgagaaggatatcctgacggccatcgccgccgacctgtgcaagagtgaattcaatgtgtacagtcaggaagtcattactgtccttggggaaattgattttatgcttgagaatcttcctgaatgggttactgctaaaccagttaagaagaacgtgctcaccatgctggatgaggcctatattcagccacagcctctgggagtggtgctgataatcggagcttggaattaccccttcgttctcaccattcagccactgataggagccatcgctgcaggaaatgctgtgattataaagccttctgaactgagtgaaaatacagccaagatcttggcaaagcttctccctcagtatttagaccaggatctctatattgttattaatggtggtgttgaggaaaccacggagctcctgaagcagcgatttgaccacattttctatacgggaaacactgcggttggcaaaattgtcatggaagctgctgccaagcatctgacccctgtgactcttgaactgggagggaaaagtccatgttatattgataaagattgtgacctggacattgtttgcagacgcataacctggggaaaatacatgaattgtggccaaacctgcattgcacccgactatattctctgtgaagcatccctccaaaatcaaattgtatggaagattaaggaaacagtgaaggaattttatggagaaaatataaaagagtctcctgattatgaaaggatcatcaatcttcgtcattttaagaggatactaagtttgcttgaaggacaaaagatagcttttggtggggagactgatgaggccacacgctacatagccccaacagtacttaccgatgttgatcctaaaaccaaggtgatgcaagaagaaatttttggaccaattcttccaatagtgcctgtgaaaaatgtagatgaggccataaatttcataaatgaacgtgaaaagcctctggctctttatgtattttcgcataaccataagctcatcaaacggatgattgatgagacatccagtggaggtgtcacaggcaatgacgtcattatgcacttcacgctcaactctttcccatttggaggagtgggttccagtgggatgggagcttatcacggaaaacatagttttgatactttttctcatcagcgtccctgtttattaaaaagtttaaagagagaaggtgctaacaaactcagatatcctcccaacagccagtcaaaggtggattggggaaaattttttctcttgaaacggttcaacaaagaaaaactcggtctcctgttgctcactttcctgggtattgtagccgctgtgcttgtcaaggctgaatattactgaagaatgatcctgttcaacctcctagtgcctctactgaattattcctcttttaaatggttaatgaaccaataatttttaaatcataccaaaaatagtaagaaaatatgcaaacactctgtgatcaaacttaaaagtcattgccattcatcattaataaaagttgccatttcaactacgtcccaacattccctaatagggtattcagggaacctgtcttaaattgtgcttatctaaatcttggaactttgagctaggggaggagaatgtattagactaaatacaaactgcggggttgtaagggagtctcagaacctcactgaatccttcactccagttaatggcactgctcacttcctgcctctgctgccaccatcactgtgtgaagctttcaagagcttggtacttcccagggctaccggcagtcctctgtagtccagagaggtgagattagatcttcttggttccctgtgaggtttcaggcactaaaactctatgtggggaagggaggggttactcctcctccaatgggactcaaggacttgacctccaggagtaggcccctggtcagaagtgccatctcaccagtggtcttcattcttcctcattcattctttatcatcctgtgttctgtttagttgcaacaatctcttgtgactaatgtcactcaaagcatcttgtaaatcctagggcttcctggaagttagttgccaaagtcatgcaagcatcacctgtcattcttgtgttggagttatagaattctacatcttataaaacctaactggcatttaaaaaatactgtggccgggcgtggtggctcatgcctgtaatcccagcactttgggaggccgaggtgggaggattgcttgagtccaggaatttgagaccagcctggacaacacagtgagacctcatctctatcaaaaaataaaaattagctagatgtggtggcatgagcctgtgttcccagctgcttaggaggctgaagcaggaggattgattgagcctgcgaggccaaggctgcagcaggctgtgattgcaccactgcacttcagcttgggcaacagagcaagaccctgtctccgaaacaaataaaaaatactgtaataaaagtacttataaacatactaatcctctttcaggaccctaaagttgcaggttagtaggtcttcaaggacaaatctgtaagtttcttatttctgtagtgcaagtaaaatttcactttttgaaactatagagagatccctttctgattagcctacagaacttaaagtgagggaaccatttcctctcacagacaaagaggcctgggatattaggactttggggtttgagagcatcatggggcagacagatggtggatggtctggacaagaagcgagtaagccactgcggttggtcatactgaagggaattgatggcaagaggatcccctgagcaagtcagaagttactctcatcagtcgttcatggtcacaacctgaggtactctgctgagtgggcaaggctgaagaagaggcctgtggaatgcagcattacctgctggacagagcagggcaggcagttctatgccttggagctcctgactgcagggactctgtccccacactcagaaagactcagctcactcaatgagagaatgtgatttactttatagaacgtataatcaactttgttgaataatttgttctattaaggctgtctaaagtatgtgatgtcttcatcatagtatgaagtgttgaaaattaataacgagcctagtttaggaaaaagctgcttaaaactgtggctctaagagagtaatcataaaataccttagataaaattgcactatggaattttcattgagtatgtttaaattattggcttgtctactaatacacatctgcttcaaaatgaacatatttcataaaattggcatcaattttaatgacgctcctggtatggaacctcagatataccctattggagacaatcctttgatcataaattctccccaactataaatcattttatgtctttatcata

SEQ ID NO: 420487 - DNA, 1021 bp, Homo sapiens
aggaagttatgatgccgcgaagaaattggcactgctgagttctacatgcagttgctacagggaggagtcttcatttagctttaagcgaaatacagcttaaaaatatcttacctgtattctgtacatcaacttgtgatggattgaggccagttctggttcttggaatgatatttttctctttgttagagccattttgttctaatagctgtgatgatccaatcaagaaagatgaaatggaagacagtgagatgtcaaggattgaataggacgtagaaccagaagatagaggttgaaggtaccgctttgcccctgaccaggggtaaattcttcaataactgactctgtccggataaggaggataataatgctctaccagcttcagttaccgtgttaggggatcaataatatatgctatgtagattaagccatagttaattcgccttcaagtggaaacatgagatccacaagccagcttttacttcacacttccaccttggagtcttgaatacctctctgtcttccttgcttgccatctgttctcttacttttgatgctgttattgtccaagatgttctctcttagaatagctggtaatgatagcacaatgcatagatgggctcagtccacagaagctacgtgaattctcccagtaacagatgaggaaattgaggctcagagatgttcagtagcttgcctaaggttgcataagctagtgagtggcagagcccagattcaaaccagatacacttcaaaagcaagcgctctcagctactgtgccggatataccattcattcagaatagcgtgggctaagcccactctgtgttgtgagacagagaacattcagactaagacatgcatgacctgtcctgtgggagccactcttcaccagaggcacttctgcacacacccgcgtctcatgcattttccctggtcaaattcaaccatttgttctccttagtgtctttgttgctgagctcatgtaaaaaaacactggagtctccagattagttctatgtggg

SEQ ID NO: 420488 - DNA, 3738 bp, Homo sapiens
  misc_feature (45)..(45): n is a, c, g, or t
  misc_feature (83)..(83): n is a, c, g, or t
  misc_feature (98)..(98): n is a, c, g, or t
gcccgggcgctctcagcaggatggccaacaccttccctccatccntacaccccgccgccccctggcccgtggccgcgctcggntcccgcactgctcantccaccccctacatcccagcccgctgccagagccggggagagggcgggggccgcgtgggcgaggccgtgaacagcggctgtcacgtgggccgcccaggccaataggggtgaggctttgggtcgagctcagtcctcccccggcgcctccgactggcagtgggactcagcgggcgtggaggtcgcggctgagcgagcgagccctgggcgagtgaattgtggctgtgggttgacggtggagacaccccccggagggaggcggagggaagggaggcgaggcctgcacctgcatgcttcccgcctcccactccccagcgcccccggaccgtgcagttctctgcaggaccaggccatggagctcgaagtccggcgggtccgacaggcgttcctgtccggccggtcgcgacctctgcggtttcggctgcagcagctggaggccctgcggaggatggtgcaggagcgcgagaaggatatcctgacggccatcgccgccgacctgtgcaagagtgaattcaatgtgtacagtcaggaagtcattactgtccttggggaaattgattttatgcttgagaatcttcctgaatgggttactgctaaaccagttaagaagaacgtgctcaccatgctggatgaggcctatattcagccacagcctctgggagtggtgctgataatcggagcttggaattaccccttcgttctcaccattcagccactgataggagccatcgctgcaggaaatgctgtgattataaagccttctgaactgagtgaaaatacagccaagatcttggcaaagcttctccctcagtatttagaccaggatctctatattgttattaatggtggtgttgaggaaaccacggagctcctgaagcagcgatttgaccacattttctatacgggaaacactgcggttggcaaaattgtcatggaagctgctgccaagcatctgacccctgtgactcttgaactgggagggaaaagtccatgttatattgataaagattgtgacctggacattgtttgcagacgcataacctggggaaaatacatgaattgtggccaaacctgcattgcacccgactatattctctgtgaagcatccctccaaaatcaaattgtatggaagattaaggaaacagtgaaggaattttatggagaaaatataaaagagtctcctgattatgaaaggatcatcaatcttcgtcattttaagaggatactaagtttgcttgaaggacaaaagatagcttttggtggggagactgatgaggccacacgctacatagccccaacagtacttaccgatgttgatcctaaaaccaaggtgatgcaagaagaaatttttggaccaattcttccaatagtgcctgtgaaaaatgtagatgaggccataaatttcataaatgaacgtgaaaagcctctggctctttatgtattttcgcataaccataagctcatcaaacggatgattgatgagacatccagtggaggtgtcacaggcaatgacgtcattatgcacttcacgctcaactctttcccatttggaggagtgggttccagtgggatgggagcttatcacggaaaacatagttttgatactttttctcatcagcgtccctgtttattaaaaagtttaaagagagaaggtgctaacaaactcagatatcctcccaacagccagtcaaaggtggattggggaaaattttttctcttgaaacggttcaacaaagaaaaactcggtctcctgttgctcactttcctgggtattgtagccgctgtgcttgtcaaggctgaatattactgaagaatgatcctgttcaacctcctagtgcctctactgaattattcctcttttaaatggttaatgaaccaataatttttaaatcataccaaaaatagtaagaaaatatgcaaacactctgtgatcaaacttaaaagtcattgccattcatcattaataaaagttgccatttcaactacgtcccaacattccctaatagggtattcagggaacctgtcttaaattgtgcttatctaaatcttggaactttgagctaggggaggagaatgtattagactaaatacaaactgcggggttgtaagggagtctcagaacctcactgaatccttcactccagttaatggcactgctcacttcctgcctctgctgccaccatcactgtgtgaagctttcaagagcttggtacttcccagggctaccggcagtcctctgtagtccagagaggtgagattagatcttcttggttccctgtgaggtttcaggcactaaaactctatgtggggaagggaggggttactcctcctccaatgggactcaaggacttgacctccaggagtaggcccctggtcagaagtgccatctcaccagtggtcttcattcttcctcattcattctttatcatcctgtgttctgtttagttgcaacaatctcttgtgactaatgtcactcaaagcatcttgtaaatcctagggcttcctggaagttagttgccaaagtcatgcaagcatcacctgtcattcttgtgttggagttatagaattctacatcttataaaacctaactggcatttaaaaaatactgtggccgggcgtggtggctcatgcctgtaatcccagcactttgggaggccgaggtgggaggattgcttgagtccaggaatttgagaccagcctggacaacacagtgagacctcatctctatcaaaaaataaaaattagctagatgtggtggcatgagcctgtgttcccagctgcttaggaggctgaagcaggaggattgattgagcctgcgaggccaaggctgcagcaggctgtgattgcaccactgcacttcagcttgggcaacagagcaagaccctgtctccgaaacaaataaaaaatactgtaataaaagtacttataaacatactaatcctctttcaggaccctaaagttgcaggttagtaggtcttcaaggacaaatctgtaagtttcttatttctgtagtgcaagtaaaatttcactttttgaaactatagagagatccctttctgattagcctacagaacttaaagtgagggaaccatttcctctcacagacaaagaggcctgggatattaggactttggggtttgagagcatcatggggcagacagatggtggatggtctggacaagaagcgagtaagccactgcggttggtcatactgaagggaattgatggcaagaggatcccctgagcaagtcagaagttactctcatcagtcgttcatggtcacaacctgaggtactctgctgagtgggcaaggctgaagaagaggcctgtggaatgcagcattacctgctggacagagcagggcaggcagttctatgccttggagctcctgactgcagggactctgtccccacactcagaaagactcagctcactcaatgagagaatgtgatttactttatagaacgtataatcaactttgttgaataatttgttctattaaggctgtctaaagtatgtgatgtcttcatcatagtatgaagtgttgaaaattaataacgagcctagtttaggaaaaagctgcttaaaactgtggctctaagagagtaatcataaaataccttagataaaattgcactatgga

SEQ ID NO: 420489 - DNA, 4036 bp, Homo sapiens
  misc_feature (45)..(45): n is a, c, g, or t
  misc_feature (83)..(83): n is a, c, g, or t
  misc_feature (98)..(98): n is a, c, g, or t
gcccgggcgctctcagcaggatggccaacaccttccctccatccntacaccccgccgccccctggcccgtggccgcgctcggntcccgcactgctcantccaccccctacatcccagcccgctgccagagccggggagagggcgggggccgcgtgggcgaggccgtgaacagcggctgtcacgtgggccgcccaggccaataggggtgaggctttgggtcgagctcagtcctcccccggcgcctccgactggcagtgggactcagcgggcgtggaggtcgcggctgagcgagcgagccctgggcgagtgaattgtggctgtgggttgacggtggagacaccccccggagggaggcggagggaagggaggcgaggcctgcacctgcatgcttcccgcctcccactccccagcgcccccggaccgtgcagttctctgcaggaccaggccatggagctcgaagtccggcgggtccgacaggcgttcctgtccggccggtcgcgacctctgcggtttcggctgcagcagctggaggccctgcggaggatggtgcaggagcgcgagaaggatatcctgacggccatcgccgccgacctgtgcaagagtgaattcaatgtgtacagtcaggaagtcattactgtccttggggaaattgattttatgcttgagaatcttcctgaatgggttactgctaaaccagttaagaagaacgtgctcaccatgctggatgaggcctatattcagccacagcctctgggagtggtgctgataatcggagcttggaattaccccttcgttctcaccattcagccactgataggagccatcgctgcaggaaatgctgtgattataaagccttctgaactgagtgaaaatacagccaagatcttggcaaagcttctccctcagtatttagaccagccattttgttctaatagctgtgatgatccaatcaagaaagatgaaatggaagacagtgagatgtcaaggattgaataggacgtagaaccagaagatagaggttgaaggatctctatattgttattaatggtggtgttgaggaaaccacggagctcctgaagcagcgatttgaccacattttctatacgggaaacactgcggttggcaaaattgtcatggaagctgctgccaagcatctgacccctgtgactcttgaactgggagggaaaagtccatgttatattgataaagattgtgacctggacattgtttgcagacgcataacctggggaaaatacatgaattgtggccaaacctgcattgcacccgactatattctctgtgaagcatccctccaaaatcaaattgtatggaagattaaggaaacagtgaaggaattttatggagaaaatataaaagagtctcctgattatgaaaggatcatcaatcttcgtcattttaagaggatactaagtttgcttgaaggacaaaagatagcttttggtggggagactgatgaggccacacgctacatagccccaacagtacttaccgatgttgatcctaaaaccaaggtgatgcaagaagaaatttttggaccaattcttccaatagtgcctgtgaaaaatgtagatgaggccataaatttcataaatgaacgtgaaaagcctctggctctttatgtattttcgcataaccataagctcatcaaacggatgattgatgagacatccagtggaggtgtcacaggcaatgacgtcattatgcacttcacgctcaactctttcccatttggaggagtgggttccagtgggatgggagcttatcacggaaaacatagttttgatactttttctcatcagcgtccctgtttattaaaaagtttaaagagagaaggtgctaacaaactcagatatcctcccaacagccagtcaaaggtggattggggaaaattttttctcttgaaacggttcaacaaagaaaaactcggtctcctgttgctcactttcctgggtattgtagccgctgtgcttgtcaaggctgaatattactgaagaatgatcctgttcaacctcctagtgcctctactgaattattcctcttttaaatggttaatgaaccaataatttttaaatcataccaaaaatagtaagaaaatatgcaaacactctgtgatcaaacttaaaagtcattgccattcatcattaataaaagttgccatttcaactacgtcccaacattccctaatagggtattcagggaacctgtcttaaattgtgcttatctaaatcttggaactttgagctaggggaggagaatgtattagactaaatacaaactgcggggttgtaagggagtctcagaacctcactgaatccttcactccagttaatggcactgctcacttcctgcctctgctgccaccatcactgtgtgaagctttcaagagcttggtacttcccagggctaccggcagtcctctgtagtccagagaggtgagattagatcttcttggttccctgtgaggtttcaggcactaaaactctatgtggggaagggaggggttactcctcctccaatgggactcaaggacttgacctccaggagtaggcccctggtcagaagtgccatctcaccagtggtcttcattcttcctcattcattctttatcatcctgtgttctgtttagttgcaacaatctcttgtgactaatgtcactcaaagcatcttgtaaatcctagggcttcctggaagttagttgccaaagtcatgcaagcatcacctgtcattcttgtgttggagttatagaattctacatcttataaaacctaactggcatttaaaaaatactgtggccgggcgtggtggctcatgcctgtaatcccagcactttgggaggccgaggtgggaggattgcttgagtccaggaatttgagaccagcctggacaacacagtgagacctcatctctatcaaaaaataaaaattagctagatgtggtggcatgagcctgtgttcccagctgcttaggaggctgaagcaggaggattgattgagcctgcgaggccaaggctgcagcaggctgtgattgcaccactgcacttcagcttgggcaacagagcaagaccctgtctccgaaacaaataaaaaatactgtaataaaagtacttataaacatactaatcctctttcaggaccctaaagttgcaggttagtaggtcttcaaggacaaatctgtaagtttcttatttctgtagtgcaagtaaaatttcactttttgaaactatagagagatccctttctgattagcctacagaacttaaagtgagggaaccatttcctctcacagacaaagaggcctgggatattaggactttggggtttgagagcatcatggggcagacagatggtggatggtctggacaagaagcgagtaagccactgcggttggtcatactgaagggaattgatggcaagaggatcccctgagcaagtcagaagttactctcatcagtcgttcatggtcacaacctgaggtactctgctgagtgggcaaggctgaagaagaggcctgtggaatgcagcattacctgctggacagagcagggcaggcagttctatgccttggagctcctgactgcagggactctgtccccacactcagaaagactcagctcactcaatgagagaatgtgatttactttatagaacgtataatcaactttgttgaataatttgttctattaaggctgtctaaagtatgtgatgtcttcatcatagtatgaagtgttgaaaattaataacgagcctagtttaggaaaaagctgcttaaaactgtggctctaagagagtaatcataaaataccttagataaaattgcactatggaattttcattgagtatgtttaaattattggcttgtctactaatacacatctgcttcaaaatgaacatatttcataaaattggcatcaattttaatgacgctcctggtatggaacctcagatataccctattggagacaatcctttgatcataaattctccccaactataaatcattttatgtctttatcata

SEQ ID NO: 420490 - DNA, 3838 bp, Homo sapiens
  misc_feature (45)..(45): n is a, c, g, or t
  misc_feature (83)..(83): n is a, c, g, or t
  misc_feature (98)..(98): n is a, c, g, or t
gcccgggcgctctcagcaggatggccaacaccttccctccatccntacaccccgccgccccctggcccgtggccgcgctcggntcccgcactgctcantccaccccctacatcccagcccgctgccagagccggggagagggcgggggccgcgtgggcgaggccgtgaacagcggctgtcacgtgggccgcccaggccaataggggtgaggctttgggtcgagctcagtcctcccccggcgcctccgactggcagtgggactcagcgggcgtggaggtcgcggctgagcgagcgagccctgggcgagtgaattgtggctcgcccccggaccgtgcagttctctgcaggaccaggccatggagctcgaagtccggcgggtccgacaggcgttcctgtccggccggtcgcgacctctgcggtttcggctgcagcagctggaggccctgcggaggatggtgcaggagcgcgagaaggatatcctgacggccatcgccgccgacctgtgcaagagtgaattcaatgtgtacagtcaggaagtcattactgtccttggggaaattgattttatgcttgagaatcttcctgaatgggttactgctaaaccagttaagaagaacgtgctcaccatgctggatgaggcctatattcagccacagcctctgggagtggtgctgataatcggagcttggaattaccccttcgttctcaccattcagccactgataggagccatcgctgcaggaaatgctgtgattataaagccttctgaactgagtgaaaatacagccaagatcttggcaaagcttctccctcagtatttagaccaggatctctatattgttattaatggtggtgttgaggaaaccacggagctcctgaagcagcgatttgaccacattttctatacgggaaacactgcggttggcaaaattgtcatggaagctgctgccaagcatctgacccctgtgactcttgaactgggagggaaaagtccatgttatattgataaagattgtgacctggacattgtttgcagacgcataacctggggaaaatacatgaattgtggccaaacctgcattgcacccgactatattctctgtgaagcatccctccaaaatcaaattgtatggaagattaaggaaacagtgaaggaattttatggagaaaatataaaagagtctcctgattatgaaaggatcatcaatcttcgtcattttaagaggatactaagtttgcttgaaggacaaaagatagcttttggtggggagactgatgaggccacacgctacatagccccaacagtacttaccgatgttgatcctaaaaccaaggtgatgcaagaagaaatttttggaccaattcttccaatagtgcctgtgaaaaatgtagatgaggccataaatttcataaatgaacgtgaaaagcctctggctctttatgtattttcgcataaccataagctcatcaaacggatgattgatgagacatccagtggaggtgtcacaggcaatgacgtcattatgcacttcacgctcaactctttcccatttggaggagtgggttccagtgggatgggagcttatcacggaaaacatagttttgatactttttctcatcagcgtccctgtttattaaaaagtttaaagagagaaggtgctaacaaactcagatatcctcccaacagccagtcaaaggtggattggggaaaattttttctcttgaaacggttcaacaaagaaaaactcggtctcctgttgctcactttcctgggtattgtagccgctgtgcttgtcaaggctgaatattactgaagaatgatcctgttcaacctcctagtgcctctactgaattattcctcttttaaatggttaatgaaccaataatttttaaatcataccaaaaatagtaagaaaatatgcaaacactctgtgatcaaacttaaaagtcattgccattcatcattaataaaagttgccatttcaactacgtcccaacattccctaatagggtattcagggaacctgtcttaaattgtgcttatctaaatcttggaactttgagctaggggaggagaatgtattagactaaatacaaactgcggggttgtaagggagtctcagaacctcactgaatccttcactccagttaatggcactgctcacttcctgcctctgctgccaccatcactgtgtgaagctttcaagagcttggtacttcccagggctaccggcagtcctctgtagtccagagaggtgagattagatcttcttggttccctgtgaggtttcaggcactaaaactctatgtggggaagggaggggttactcctcctccaatgggactcaaggacttgacctccaggagtaggcccctggtcagaagtgccatctcaccagtggtcttcattcttcctcattcattctttatcatcctgtgttctgtttagttgcaacaatctcttgtgactaatgtcactcaaagcatcttgtaaatcctagggcttcctggaagttagttgccaaagtcatgcaagcatcacctgtcattcttgtgttggagttatagaattctacatcttataaaacctaactggcatttaaaaaatactgtggccgggcgtggtggctcatgcctgtaatcccagcactttgggaggccgaggtgggaggattgcttgagtccaggaatttgagaccagcctggacaacacagtgagacctcatctctatcaaaaaataaaaattagctagatgtggtggcatgagcctgtgttcccagctgcttaggaggctgaagcaggaggattgattgagcctgcgaggccaaggctgcagcaggctgtgattgcaccactgcacttcagcttgggcaacagagcaagaccctgtctccgaaacaaataaaaaatactgtaataaaagtacttataaacatactaatcctctttcaggaccctaaagttgcaggttagtaggtcttcaaggacaaatctgtaagtttcttatttctgtagtgcaagtaaaatttcactttttgaaactatagagagatccctttctgattagcctacagaacttaaagtgagggaaccatttcctctcacagacaaagaggcctgggatattaggactttggggtttgagagcatcatggggcagacagatggtggatggtctggacaagaagcgagtaagccactgcggttggtcatactgaagggaattgatggcaagaggatcccctgagcaagtcagaagttactctcatcagtcgttcatggtcacaacctgaggtactctgctgagtgggcaaggctgaagaagaggcctgtggaatgcagcattacctgctggacagagcagggcaggcagttctatgccttggagctcctgactgcagggactctgtccccacactcagaaagactcagctcactcaatgagagaatgtgatttactttatagaacgtataatcaactttgttgaataatttgttctattaaggctgtctaaagtatgtgatgtcttcatcatagtatgaagtgttgaaaattaataacgagcctagtttaggaaaaagctgcttaaaactgtggctctaagagagtaatcataaaataccttagataaaattgcactatggaattttcattgagtatgtttaaattattggcttgtctactaatacacatctgcttcaaaatgaacatatttcataaaattggcatcaattttaatgacgctcctggtatggaacctcagatataccctattggagacaatcctttgatcataaattctccccaactataaatcattttatgtctttatcata

SEQ ID NO: 420491 - DNA, 3986 bp, Homo sapiens
  misc_feature (45)..(45): n is a, c, g, or t
  misc_feature (83)..(83): n is a, c, g, or t
  misc_feature (98)..(98): n is a, c, g, or t
  misc_feature (3684)..(3684): n is a, c, g, or t
  misc_feature (3810)..(3810): n is a, c, g, or t
  misc_feature (3850)..(3850): n is a, c, g, or t
  misc_feature (3864)..(3864): n is a, c, g, or t
gcccgggcgctctcagcaggatggccaacaccttccctccatccntacaccccgccgccccctggcccgtggccgcgctcggntcccgcactgctcantccaccccctacatcccagcccgctgccagagccggggagagggcgggggccgcgtgggcgaggccgtgaacagcggctgtcacgtgggccgcccaggccaataggggtgaggctttgggtcgagctcagtcctcccccggcgcctccgactggcagtgggactcagcgggcgtggaggtcgcggctgagcgagcgagccctgggcgagtgaattgtggctgtgggttgacggtggagacaccccccggagggaggcggagggaagggaggcgaggcctgcacctgcatgcttcccgcctcccactccccagcgcccccggaccgtgcagttctctgcaggaccaggccatggagctcgaagtccggcgggtccgacaggcgttcctgtccggccggtcgcgacctctgcggtttcggctgcagcagctggaggccctgcggaggatggtgcaggagcgcgagaaggatatcctgacggccatcgccgccgacctgtgcaagagtgaattcaatgtgtacagtcaggaagtcattactgtccttggggaaattgattttatgcttgagaatcttcctgaatgggttactgctaaaccagttaagaagaacgtgctcaccatgctggatgaggcctatattcagccacagcctctgggagtggtgctgataatcggagcttggaattaccccttcgttctcaccattcagccactgataggagccatcgctgcaggaaatgctgtgattataaagccttctgaactgagtgaaaatacagccaagatcttggcaaagcttctccctcagtatttagaccaggatctctatattgttattaatggtggtgttgaggaaaccacggagctcctgaagcagcgatttgaccacattttctatacgggaaacactgcggttggcaaaattgtcatggaagctgctgccaagcatctgacccctgtgactcttgaactgggagggaaaagtccatgttatattgataaagattgtgacctggacattgtttgcagacgcataacctggggaaaatacatgaattgtggccaaacctgcattgcacccgactatattctctgtgaagcatccctccaaaatcaaattgtatggaagattaaggaaacagtgaaggaattttatggagaaaatataaaagagtctcctgattatgaaaggatcatcaatcttcgtcattttaagaggatactaagtttgcttgaaggacaaaagatagcttttggtggggagactgatgaggccacacgctacatagccccaacagtacttaccgatgttgatcctaaaaccaaggtgatgcaagaagaaatttttggaccaattcttccaatagtgcctgtgaaaaatgtagatgaggccataaatttcataaatgaacgtgaaaagcctctggctctttatgtattttcgcataaccataagctcatcaaacggatgattgatgagacatccagtggaggtgtcacaggcaatgacgtcattatgcacttcacgctcaactctttcccatttggaggagtgggttccagtgggatgggagcttatcacggaaaacatagttttgatactttttctcatcagcgtccctgtttattaaaaagtttaaagagagaaggtgctaacaaactcagatatcctcccaacagccagtcaaaggtggattggggaaaattttttctcttgaaacggttcaacaaagaaaaactcggtctcctgttgctcactttcctgggtattgtagccgctgtgcttgtcaaggctgaatattactgaagaatgatcctgttcaacctcctagtgcctctactgaattattcctcttttaaatggttaatgaaccaataatttttaaatcataccaaaaatagtaagaaaatatgcaaacactctgtgatcaaacttaaaagtcattgccattcatcattaataaaagttgccatttcaactacgtcccaacattccctaatagggtattcagggaacctgtcttaaattgtgcttatctaaatcttggaactttgagctaggggaggagaatgtattagactaaatacaaactgcggggttgtaagggagtctcagaacctcactgaatccttcactccagttaatggcactgctcacttcctgcctctgctgccaccatcactgtgtgaagctttcaagagcttggtacttcccagggctaccggcagtcctctgtagtccagagaggtgagattagatcttcttggttccctgtgaggtttcaggcactaaaactctatgtggggaagggaggggttactcctcctccaatgggactcaaggacttgacctccaggagtaggcccctggtcagaagtgccatctcaccagtggtcttcattcttcctcattcattctttatcatcctgtgttctgtttagttgcaacaatctcttgtgactaatgtcactcaaagcatcttgtaaatcctagggcttcctggaagttagttgccaaagtcatgcaagcatcacctgtcattcttgtgttggagttatagaattctacatcttataaaacctaactggcatttaaaaaatactgtggccgggcgtggtggctcatgcctgtaatcccagcactttgggaggccgaggtgggaggattgcttgagtccaggaatttgagaccagcctggacaacacagtgagacctcatctctatcaaaaaataaaaattagctagatgtggtggcatgagcctgtgttcccagctgcttaggaggctgaagcaggaggattgattgagcctgcgaggccaaggctgcagcaggctgtgattgcaccactgcacttcagcttgggcaacagagcaagaccctgtctccgaaacaaataaaaaatactgtaataaaagtacttataaacatactaatcctctttcaggaccctaaagttgcaggttagtaggtcttcaaggacaaatctgtaagtttcttatttctgtagtgcaagtaaaatttcactttttgaaactatagagagatccctttctgattagcctacagaacttaaagtgagggaaccatttcctctcacagacaaagaggcctgggatattaggactttggggtttgagagcatcatggggcagacagatggtggatggtctggacaagaagcgagtaagccactgcggttggtcatactgaagggaattgatggcaagaggatcccctgagcaagtcagaagttactctcatcagtcgttcatggtcacaacctgaggtactctgctgagtgggcaaggctgaagaagaggcctgtggaatgcagcattacctgctggacagagcagggcaggcagttctatgccttggagctcctgactgcagggactctgtccccacactcagaaagactcagctcactcaatgagagaatgtgatttactttatagaacgtataatcaactttgttgaataatttgttctattaaggctgtctaaagtatgtgatgtcttcatcatagtatgaagtgttgaaaattaataacgagcctagtttaggaaaaagctgtaactgngtctaagagatctaatactaataaatgctatgattcatgagtgtaatatggtgtacatcattgtcaagactatataatggtcatatgactcgatgactaaatccttgacaactgctatctcactanattagttattaaaaaaaaaaaaaaaaaaacggggcgcatnctatggtatatcgntaacgtgaacggcacagtggacctctggtgagacatctcagccggggaggtttattattgtttattttcgcttttaaaaagggtggacaataaccaagatggccacttgtgaaacctcggca

SEQ ID NO: 420492 - DNA, 3870 bp, Homo sapiens
  misc_feature (45)..(45): n is a, c, g, or t
  misc_feature (83)..(83): n is a, c, g, or t
  misc_feature (98)..(98): n is a, c, g, or t
gcccgggcgctctcagcaggatggccaacaccttccctccatccntacaccccgccgccccctggcccgtggccgcgctcggntcccgcactgctcantccaccccctacatcccagcccgctgccagagccggggagagggcgggggccgcgtgggcgaggccgtgaacagcggctgtcacgtgggccgcccaggccaataggggtgaggctttgggtcgagctcagtcctcccccggcgcctccgactggcagtgggactcagcgggcgtggaggtcgcggctgagcgagcgagccctgggcgagtgaattgtggctgtgggttgacggtggagacaccccccggagggaggcggagggaagggaggcgaggcctgcacctgcatgcttcccgcctcccactccccagcgcccccggaccgtgcagttctctgcaggaccaggccatggagctcgaagtccggcgggtccgacaggcgttcctgtccggccggtcgcgacctctgcggtttcggctgcagcagctggaggccctgcggaggatggtgcaggagcgcgagaaggatatcctgacggccatcgccgccgacctgtgcaagagtgaattcaatgtgtacagtcaggaagtcattactgtccttggggaaattgattttatgcttgagaatcttcctgaatgggttactgctaaaccagttaagaagaacgtgctcaccatgctggatgaggcctatattcagccacagcctctgggagtggtgctgataatcggagcttggaattaccccttcgttctcaccattcagccactgataggagccatcgctgcaggaaatgctgtgattataaagccttctgaactgagtgaaaatacagccaagatcttggcaaagcttctccctcagtatttagaccaggatctctatattgttattaatggtggtgttgaggaaaccacggagctcctgaagcagcgatttgaccacattttctatacgggaaacactgcggttggcaaaattgtcatggaagctgctgccaagcatctgacccctgtgactcttgaactgggagggaaaagtccatgttatattgataaagattgtgacctggacattgtttgcagacgcataacctggggaaaatacatgaattgtggccaaacctgcattgcacccgactatattctctgtgaagcatccctccaaaatcaaattgtatggaagattaaggaaacagtgaaggaattttatggagaaaatataaaagagtctcctgattatgaaaggatcatcaatcttcgtcattttaagaggatactaagtttgcttgaaggacaaaagatagcttttggtggggagactgatgaggccacacgctacatagccccaacagtacttaccgatgttgatcctaaaaccaaggtgatgcaagaagaaatttttggaccaattcttccaatagtgcctgtgaaaaatgtagatgaggccataaatttcataaatgaacgtgaaaagcctctggctctttatgtattttcgcataaccataagctcatcaaacggatgattgatgagacatccagtggaggtgtcacaggcaatgacgtcattatgcacttcacgctcaactctttcccatttggaggagtgggttccagtgggatgggagcttatcacggaaaacatagttttgatactttttctcatcagcgtccctgtttattaaaaagtttaaagagagaaggtgctaacaaactcagatatcctcccaacagccagtcaaaggtggattggggaaaattttttctcttgaaacggttcaacaaagaaaaactcggtctcctgttgctcactttcctgggtattgtagccgctgtgcttgtcaaggctgaatattactgaagaatgatcctgttcaacctcctagtgcctctactgaattattcctcttttaaatggttaatgaaccaataatttttaaatcataccaaaaatagtaagaaaatatgcaaacactctgtgatcaaacttaaaagtcattgccattcatcattaataaaagttgccatttcaactacgtcccaacattccctaatagggtattcagggaacctgtcttaaattgtgcttatctaaatcttggaactttgagctaggggaggagaatgtattagactaaatacaaactgcggggttgtaagggagtctcagaacctcactgaatccttcactccagttaatggcactgctcacttcctgcctctgctgccaccatcactgtgtgaagctttcaagagcttggtacttcccagggctaccggcagtcctctgtagtccagagaggtgagattagatcttcttggttccctgtgaggtttcaggcactaaaactctatgtggggaagggaggggttactcctcctccaatgggactcaaggacttgacctccaggagtaggcccctggtcagaagtgccatctcaccagtggtcttcattcttcctcattcattctttatcatcctgtgttctgtttagttgcaacaatctcttgtgactaatgtcactcaaagcatcttgtaaatcctagggcttcctggaagttagttgccaaagtcatgcaagcatcacctgtcattcttgtgttggagttatagaattctacatcttataaaacctaactggcatttaaaaaatactgtggccgggcgtggtggctcatgcctgtaatcccagcactttgggaggccgaggtgggaggattgcttgagtccaggaatttgagaccagcctggacaacacagtgagacctcatctctatcaaaaaataaaaattagctagatgtggtggcatgagcctgtgttcccagctgcttaggaggctgaagcaggaggattgattgagcctgcgaggccaaggctgcagcaggctgtgattgcaccactgcacttcagcttgggcaacagagcaagaccctgtctccgaaacaaataaaaaatactgtaataaaagtacttataaacatactaatcctctttcaggaccctaaagttgcaggttagtaggtcttcaaggacaaatctgtaagtttcttatttctgtagtgcaagtaaaatttcactttttgaaactatagagagatccctttctgattagcctacagaacttaaagtgagggaaccatttcctctcacagacaaagaggcctgggatattaggactttggggtttgagagcatcatggggcagacagatggtggatggtctggacaagaagcgagtaagccactgcggttggtcatactgaagggaattgatggcaagaggatcccctgagcaagtcagaagttactctcatcagtcgttcatggtcacaacctgaggtactctgctgagtgggcaaggctgaagaagaggcctgtggaatgcagcattacctgctggacagagcagggcaggcagttctatgccttggagctcctgactgcagggactctgtccccacactcagaaagactcagctcactcaatgagagaatgtgatttactttatagaacgtataatcaactttgttgaataatttgttctattaaggctgtctaaatgcaatcatgattgcatttagacatcacacgacaagttaatgataagtgatcaagaatatagaagactgtaaagataatgctgacagtgaagtattcctgggcatttcttgctccaagcccgagagagggtcagagactatataaattattgctggtccagggctatggctttgggggatcatggtggtggtggaagattcaggggtgataagagctgactgtagggatttagtactggggctcggtcataacgtgtcctcc

SEQ ID NO: 420493 - DNA, 3953 bp, Homo sapiens
  misc_feature (45)..(45): n is a, c, g, or t
  misc_feature (83)..(83): n is a, c, g, or t
  misc_feature (98)..(98): n is a, c, g, or t
gcccgggcgctctcagcaggatggccaacaccttccctccatccntacaccccgccgccccctggcccgtggccgcgctcggntcccgcactgctcantccaccccctacatcccagcccgctgccagagccggggagagggcgggggccgcgtgggcgaggccgtgaacagcggctgtcacgtgggccgcccaggccaataggggtgaggctttgggtcgagctcagtcctcccccggcgcctccgactggcagtgggactcagcgggcgtggaggtcgcggctgagcgagcgagccctgggcgagtgaattgtggctgtgggttgacggtggagacaccccccggagggaggcggagggaagggaggcgaggcctgcacctgcatgcttcccgcctcccactccccagcgcccccggaccgtgcagttctctgcaggaccaggccatggagctcgaagtccggcgggtccgacaggcgttcctgtccggccggtcgcgacctctgcggtttcggctgcagcagctggaggccctgcggaggatggtgcaggagcgcgagaaggatatcctgacggccatcgccgccgacctgtgcaagagtgaattcaatgtgtacagtcaggaagtcattactgtccttggggaaattgattttatgcttgagaatcttcctgaatgggttactgctaaaccagttaagaagaacgtgctcaccatgctggatgaggcctatattcagccacagcctctgggagtggtgctgataatcggagcttggaattaccccttcgttctcaccattcagccactgataggagccatcgctgcaggaaatgctgtgattataaagccttctgaactgagtgaaaatacagccaagatcttggcaaagcttctccctcagtatttagaccaggatctctatattgttattaatggtggtgttgaggaaaccacggagctcctgaagcagcgatttgaccacattttctatacgggaaacactgcggttggcaaaattgtcatggaagctgctgccaagcatctgacccctgtgactcttgaactgggagggaaaagtccatgttatattgataaagattgtgacctggacattgtttgcagctgttctggatgttttcccctcagacgcataacctggggaaaatacatgaattgtggccaaacctgcattgcacccgactatattctctgtgaagcatccctccaaaatcaaattgtatggaagattaaggaaacagtgaaggaattttatggagaaaatataaaagagtctcctgattatgaaaggatcatcaatcttcgtcattttaagaggatactaagtttgcttgaaggacaaaagatagcttttggtggggagactgatgaggccacacgctacatagccccaacagtacttaccgatgttgatcctaaaaccaaggtgatgcaagaagaaatttttggaccaattcttccaatagtgcctgtgaaaaatgtagatgaggccataaatttcataaatgaacgtgaaaagcctctggctctttatgtattttcgcataaccataagctcatcaaacggatgattgatgagacatccagtggaggtgtcacaggcaatgacgtcattatgcacttcacgctcaactctttcccatttggaggagtgggttccagtgggatgggagcttatcacggaaaacatagttttgatactttttctcatcagcgtccctgtttattaaaaagtttaaagagagaaggtgctaacaaactcagatatcctcccaacagccagtcaaaggtggattggggaaaattttttctcttgaaacggttcaacaaagaaaaactcggtctcctgttgctcactttcctgggtattgtagccgctgtgcttgtcaaggctgaatattactgaagaatgatcctgttcaacctcctagtgcctctactgaattattcctcttttaaatggttaatgaaccaataatttttaaatcataccaaaaatagtaagaaaatatgcaaacactctgtgatcaaacttaaaagtcattgccattcatcattaataaaagttgccatttcaactacgtcccaacattccctaatagggtattcagggaacctgtcttaaattgtgcttatctaaatcttggaactttgagctaggggaggagaatgtattagactaaatacaaactgcggggttgtaagggagtctcagaacctcactgaatccttcactccagttaatggcactgctcacttcctgcctctgctgccaccatcactgtgtgaagctttcaagagcttggtacttcccagggctaccggcagtcctctgtagtccagagaggtgagattagatcttcttggttccctgtgaggtttcaggcactaaaactctatgtggggaagggaggggttactcctcctccaatgggactcaaggacttgacctccaggagtaggcccctggtcagaagtgccatctcaccagtggtcttcattcttcctcattcattctttatcatcctgtgttctgtttagttgcaacaatctcttgtgactaatgtcactcaaagcatcttgtaaatcctagggcttcctggaagttagttgccaaagtcatgcaagcatcacctgtcattcttgtgttggagttatagaattctacatcttataaaacctaactggcatttaaaaaatactgtggccgggcgtggtggctcatgcctgtaatcccagcactttgggaggccgaggtgggaggattgcttgagtccaggaatttgagaccagcctggacaacacagtgagacctcatctctatcaaaaaataaaaattagctagatgtggtggcatgagcctgtgttcccagctgcttaggaggctgaagcaggaggattgattgagcctgcgaggccaaggctgcagcaggctgtgattgcaccactgcacttcagcttgggcaacagagcaagaccctgtctccgaaacaaataaaaaatactgtaataaaagtacttataaacatactaatcctctttcaggaccctaaagttgcaggttagtaggtcttcaaggacaaatctgtaagtttcttatttctgtagtgcaagtaaaatttcactttttgaaactatagagagatccctttctgattagcctacagaacttaaagtgagggaaccatttcctctcacagacaaagaggcctgggatattaggactttggggtttgagagcatcatggggcagacagatggtggatggtctggacaagaagcgagtaagccactgcggttggtcatactgaagggaattgatggcaagaggatcccctgagcaagtcagaagttactctcatcagtcgttcatggtcacaacctgaggtactctgctgagtgggcaaggctgaagaagaggcctgtggaatgcagcattacctgctggacagagcagggcaggcagttctatgccttggagctcctgactgcagggactctgtccccacactcagaaagactcagctcactcaatgagagaatgtgatttactttatagaacgtataatcaactttgttgaataatttgttctattaaggctgtctaaagtatgtgatgtcttcatcatagtatgaagtgttgaaaattaataacgagcctagtttaggaaaaagctgcttaaaactgtggctctaagagagtaatcataaaataccttagataaaattgcactatggaattttcattgagtatgtttaaattattggcttgtctactaatacacatctgcttcaaaatgaacatatttcataaaattggcatcaattttaatgacgctcctggtatggaacctcagatataccctattggagacaatcctttgatcataaattctccccaactataaatcattttatgtctttatcata

SEQ ID NO: 420494 - DNA, 4005 bp, Homo sapiens
  misc_feature (45)..(45): n is a, c, g, or t
  misc_feature (83)..(83): n is a, c, g, or t
  misc_feature (98)..(98): n is a, c, g, or t
gcccgggcgctctcagcaggatggccaacaccttccctccatccntacaccccgccgccccctggcccgtggccgcgctcggntcccgcactgctcantccaccccctacatcccagcccgctgccagagccggggagagggcgggggccgcgtgggcgaggccgtgaacagcggctgtcacgtgggccgcccaggccaataggggtgaggctttgggtcgagctcagtcctcccccggcgcctccgactggcagtgggactcagcgggcgtggaggtcgcggctgagcgagcgagccctgggcgagtgaattgtggctgtgggttgacggtggagacaccccccggagggaggcggagggaagggaggcgaggcctgcacctgcatgcttcccgcctcccactccccagcgcccccggaccgtgcagttctctgcaggaccaggccatggagctcgaagtccggcgggtccgacaggcgttcctgtccggccggtcgcgacctctgcggtttcggctgcagcagctggaggccctgcggaggatggtgcaggagcgcgagaaggatatcctgacggccatcgccgccgacctgtgcaagagtgaattcaatgtgtacagtcaggaagtcattactgtccttggggaaattgattttatgcttgagaatcttcctgaatgggttactgctaaaccagttaagaagaacgtgctcaccatgctggatgaggcctatattcagccacagcctctgggagtggtgctgataatcggagcttggaattaccccttcgttctcaccattcagccactgataggagccatcgctgcaggaaatgctgtgattataaagccttctgaactgagtgaaaatacagccaagatcttggcaaagcttctccctcagtatttagaccaggatctctatattgttattaatggtggtgttgaggaaaccacggagctcctgaagcagcgatttgaccacattttctatacgggaaacactgcggttggcaaaattgtcatggaagctgctgccaagcatctgacccctgtgactcttgaactgggagggaaaagtccatgttatattgataaagattgtgacctggacattgtttgcagacgcataacctggggaaaatacatgaattgtggccaaacctgcattgcacccgactatattctctgtgaagcatccctccaaaatcaaattgtatggaagattaaggaaacagtgaaggaattttatggagaaaatataaaagagtctcctgattatgaaaggatcatcaatcttcgtcattttaagaggatactaagtttgcttgaaggacaaaagatagcttttggtggggagactgatgaggccacacgctacatagccccaacagtacttaccgatgttgatcctaaaaccaaggtgatgcaagaagaaatttttggaccaattcttccaatagtgcctgtgaaaaatgtagatgaggccataaatttcataaatgaacgtgaaaagcctctggctctttatgtattttcgcataaccataagctcatcaaacggatgattgatgagacatccagtggaggtgtcacaggcaatgacgtcattatgcacttcacgctcaactctttcccatttggaggagtgggttccagtgggatgggagcttatcacggaaaacatagttttgatactttttctcatcagcgtccctgtttattaaaaagtttaaagagagaaggtgctaacaaactcagatatcctcccaacagccagtcaaaggtggattggggaaaattttttctcttgaaacggttcaacaaagaaaaactcggtctcctgttgctcactttcctgggtattgtagccgctgtgcttgtcaagttcacagactgcgttggtccagtaagcagagatgaacaccagatttcaaaacccagccctgtctgttaagagtgaggctgaatattactgaagaatgatcctgttcaacctcctagtgcctctactgaattattcctcttttaaatggttaatgaaccaataatttttaaatcataccaaaaatagtaagaaaatatgcaaacactctgtgatcaaacttaaaagtcattgccattcatcattaataaaagttgccatttcaactacgtcccaacattccctaatagggtattcagggaacctgtcttaaattgtgcttatctaaatcttggaactttgagctaggggaggagaatgtattagactaaatacaaactgcggggttgtaagggagtctcagaacctcactgaatccttcactccagttaatggcactgctcacttcctgcctctgctgccaccatcactgtgtgaagctttcaagagcttggtacttcccagggctaccggcagtcctctgtagtccagagaggtgagattagatcttcttggttccctgtgaggtttcaggcactaaaactctatgtggggaagggaggggttactcctcctccaatgggactcaaggacttgacctccaggagtaggcccctggtcagaagtgccatctcaccagtggtcttcattcttcctcattcattctttatcatcctgtgttctgtttagttgcaacaatctcttgtgactaatgtcactcaaagcatcttgtaaatcctagggcttcctggaagttagttgccaaagtcatgcaagcatcacctgtcattcttgtgttggagttatagaattctacatcttataaaacctaactggcatttaaaaaatactgtggccgggcgtggtggctcatgcctgtaatcccagcactttgggaggccgaggtgggaggattgcttgagtccaggaatttgagaccagcctggacaacacagtgagacctcatctctatcaaaaaataaaaattagctagatgtggtggcatgagcctgtgttcccagctgcttaggaggctgaagcaggaggattgattgagcctgcgaggccaaggctgcagcaggctgtgattgcaccactgcacttcagcttgggcaacagagcaagaccctgtctccgaaacaaataaaaaatactgtaataaaagtacttataaacatactaatcctctttcaggaccctaaagttgcaggttagtaggtcttcaaggacaaatctgtaagtttcttatttctgtagtgcaagtaaaatttcactttttgaaactatagagagatccctttctgattagcctacagaacttaaagtgagggaaccatttcctctcacagacaaagaggcctgggatattaggactttggggtttgagagcatcatggggcagacagatggtggatggtctggacaagaagcgagtaagccactgcggttggtcatactgaagggaattgatggcaagaggatcccctgagcaagtcagaagttactctcatcagtcgttcatggtcacaacctgaggtactctgctgagtgggcaaggctgaagaagaggcctgtggaatgcagcattacctgctggacagagcagggcaggcagttctatgccttggagctcctgactgcagggactctgtccccacactcagaaagactcagctcactcaatgagagaatgtgatttactttatagaacgtataatcaactttgttgaataatttgttctattaaggctgtctaaagtatgtgatgtcttcatcatagtatgaagtgttgaaaattaataacgagcctagtttaggaaaaagctgcttaaaactgtggctctaagagagtaatcataaaataccttagataaaattgcactatggaattttcattgagtatgtttaaattattggcttgtctactaatacacatctgcttcaaaatgaacatatttcataaaattggcatcaattttaatgacgctcctggtatggaacctcagatataccctattggagacaatcctttgatcataaattctccccaactataaatcattttatgtctttatcata

SEQ ID NO: 420495 - DNA, 2705 bp, Homo sapiens
tgttacactcttggattttattttattaattaccttactagaattagaagggatttagagcagaagtattgtacacaaagtaaagttccaataaagcttataagctacagaaggcattgtgggagatgtgggttttaaaaggtcgagaaacataagaggttaatgttgataaatttcattaggcctttgacaactaaatatgacatttgaaccttgagattgcagcagcccttcctcagtcttcaataggaaggattaaattcagtactacttttgaattttagaaacaaaattgtataccagtttttgaattccatgtagagacttcagcttcctactgaaaatgctaggataataagttagtactctcatcttctgtctctactctgacattagctagttgacagtggacagaatatagccttcattatcacgttgtcttactcttattgttattgttgttttttgaggaagggcataatcctttggcctaaaccgtgcttcctaggcttcctagggatatgtagtccttttttgtacaatgcatgtagagtctcttcagacaggaggtgtctgagtcccagtgctgagcttgtgttgcaaggctggttgtgggtaggtttttaaagcagctgagtaaactgaatccttttttcctctctccaggctgaatattactgaagaatgatcctgttcaacctcctagtgcctctactgaattattcctcttttaaatggttaatgaaccaataatttttaaatcataccaaaaatagtaagaaaatatgcaaacactctgtgatcaaacttaaaagtcattgccattcatcattaataaaagttgccatttcaactacgtcccaacattccctaatagggtattcagggaacctgtcttaaattgtgcttatctaaatcttggaactttgagctaggggaggagaatgtattagactaaatacaaactgcggggttgtaagggagtctcagaacctcactgaatccttcactccagttaatggcactgctcacttcctgcctctgctgccaccatcactgtgtgaagctttcaagagcttggtacttcccagggctaccggcagtcctctgtagtccagagaggtgagattagatcttcttggttccctgtgaggtttcaggcactaaaactctatgtggggaagggaggggttactcctcctccaatgggactcaaggacttgacctccaggagtaggcccctggtcagaagtgccatctcaccagtggtcttcattcttcctcattcattctttatcatcctgtgttctgtttagttgcaacaatctcttgtgactaatgtcactcaaagcatcttgtaaatcctagggcttcctggaagttagttgccaaagtcatgcaagcatcacctgtcattcttgtgttggagttatagaattctacatcttataaaacctaactggcatttaaaaaatactgtggccgggcgtggtggctcatgcctgtaatcccagcactttgggaggccgaggtgggaggattgcttgagtccaggaatttgagaccagcctggacaacacagtgagacctcatctctatcaaaaaataaaaattagctagatgtggtggcatgagcctgtgttcccagctgcttaggaggctgaagcaggaggattgattgagcctgcgaggccaaggctgcagcaggctgtgattgcaccactgcacttcagcttgggcaacagagcaagaccctgtctccgaaacaaataaaaaatactgtaataaaagtacttataaacatactaatcctctttcaggaccctaaagttgcaggttagtaggtcttcaaggacaaatctgtaagtttcttatttctgtagtgcaagtaaaatttcactttttgaaactatagagagatccctttctgattagcctacagaacttaaagtgagggaaccatttcctctcacagacaaagaggcctgggatattaggactttggggtttgagagcatcatggggcagacagatggtggatggtctggacaagaagcgagtaagccactgcggttggtcatactgaagggaattgatggcaagaggatcccctgagcaagtcagaagttactctcatcagtcgttcatggtcacaacctgaggtactctgctgagtgggcaaggctgaagaagaggcctgtggaatgcagcattacctgctggacagagcagggcaggcagttctatgccttggagctcctgactgcagggactctgtccccacactcagaaagactcagctcactcaatgagagaatgtgatttactttatagaacgtataatcaactttgttgaataatttgttctattaaggctgtctaaagtatgtgatgtcttcatcatagtatgaagtgttgaaaattaataacgagcctagtttaggaaaaagctgcttaaaactgtggctctaagagagtaatcataaaataccttagataaaattgcactatggaattttcattgagtatgtttaaattattggcttgtctactaatacacatctgcttcaaaatgaacatatttcataaaattggcatcaattttaatgacgctcctggtatggaacctcagatataccctattggagacaatcctttgatcataaattctccccaactataaatcattttatgtctttatcata

SEQ ID NO: 420496 - DNA, 1174 bp, Homo sapiens
gtgggtggatcacttgaggtcaggagttccagaccagcctggccaacatggtgaaaccccatctctactaaaaatacaaatgttagctgggtgtggtggtgcgtgcctgtagtcccagctaccagggaggctgaggcaggagaattgcttgaaccagggaggtggaggttgcagtgagctgagattgcgccatgcacttcagcttgggcaacagagcaagaccctgtctccgaaacaaataaaaaatactgtaataaaagtacttataaacatactaatcctctttcaggaccctaaagttgcaggttagtaggtcttcaaggacaaatctgtaagtttcttatttctgtagtgcaagtaaaatttcactttttgaaactatagagagatccctttctgattagcctacagaacttaaagtgagggaaccatttcctctcacagacaaagaggcctgggatattaggactttggggtttgagagcatcatggggcagacagatggtggatggtctggacaagaagcgagtaagccactgcggttggtcatactgaagggaattgatggcaagaggatcccctgagcaagtcagaagttactctcatcagtcgttcatggtcacaacctgaggtactctgctgagtgggcaaggctgaagaagaggcctgtggaatgcagcattacctgctggacagagcagggcaggcagttctatgccttggagctcctgactgcagggactctgtccccacactcagaaagactcagctcactcaatgagagaatgtgatttactttatagaacgtataatcaactttgttgaataatttgttctattaaggctgtctaaagtatgtgatgtcttcatcatagtatgaagtgttgaaaattaataacgagcctagtttaggaaaaagctgcttaaaactgtggctctaagagagtaatcataaaataccttagataaaattgcactatggaattttcattgagtatgtttaaattattggcttgtctactaatacacatctgcttcaaaatgaacatatttcataaaattggcatcaattttaatgacgctcctggtatggaacctcagatataccctattggagacaatcctttgatcataaattctccccaactataaatcattttatgtctttatcata

SEQ ID NO: 420497 - DNA, 1564 bp, Homo sapiens
  misc_feature (45)..(45): n is a, c, g, or t
  misc_feature (83)..(83): n is a, c, g, or t
  misc_feature (98)..(98): n is a, c, g, or t
gcccgggcgctctcagcaggatggccaacaccttccctccatccntacaccccgccgccccctggcccgtggccgcgctcggntcccgcactgctcantccaccccctacatcccagcccgctgccagagccggggagagggcgggggccgcgtgggcgaggccgtgaacagcggctgtcacgtgggccgcccaggccaataggggtgaggctttgggtcgagctcagtcctcccccggcgcctccgactggcagtgggactcagcgggcgtggaggtcgcggctgagcgagcgagccctgggcgagtgaattgtggctgtgggttgacggtggagacaccccccggagggaggcggagggaagggaggcgaggcctgcacctgcatgcttcccgcctcccactccccagcgcccccggaccgtgcagttctctgcaggaccaggccatggagctcgaagtccggcgggtccgacaggcgttcctgtccggccggtcgcgacctctgcggtttcggctgcagcagctggaggccctgcggaggatggtgcaggagcgcgagaaggatatcctgacggccatcgccgccgacctgtgcaagagtgaattcaatgtgtacagtcaggaagtcattactgtccttggggaaattgattttatgcttgagaatcttcctgaatgggttactgctaaaccagttaagaagaacgtgctcaccatgctggatgaggcctatattcagccacagcctctgggagtggtgctgataatcggagcttggaattaccccttcgttctcaccattcagccactgataggagccatcgctgcaggaaatgctgtgattataaagccttctgaactgagtgaaaatacagccaagatcttggcaaagcttctccctcagtatttagaccaggatctctatattgttattaatggtggtgttgaggaaaccacggagctcctgaagcagcgatttgaccacattttctatacgggaaacactgcggttggcaaaattgtcatggaagctgctgccaagcatctgacccctgtgactcttgaactgggagggaaaagtccatgttatattgataaagattgtgacctggacattgtttgcagacgcataacctggggaaaatacatgaattgtggccaaacctgcattgcacccgactatattctctgtgaagcatccctccaaaatcaaattgtatggaagattaaggaaacagtgaaggaattttatggagaaaatataaaagagtctcctgattatgaaaggatcatcaatcttcgtcattttaagaggatactaagtttgcttgaaggacaaaagatagcttttggtggggagactgatgaggccacacgctacataggtaatggaaattctccttttcctatgggaagatggcaatttggcagtttttgctgacactacttattaacactagataaactattaaatatatagcatttaattgttaaagtactaaatcctgctttctggtatactgtacctgtagcttttgttataaactatttaaaatgtctgt

SEQ ID NO: 420498 - DNA, 3968 bp, Homo sapiens
  misc_feature (45)..(45): n is a, c, g, or t
  misc_feature (83)..(83): n is a, c, g, or t
  misc_feature (98)..(98): n is a, c, g, or t
  misc_feature (3953)..(3953): n is a, c, g, or t
gcccgggcgctctcagcaggatggccaacaccttccctccatccntacaccccgccgccccctggcccgtggccgcgctcggntcccgcactgctcantccaccccctacatcccagcccgctgccagagccggggagagggcgggggccgcgtgggcgaggccgtgaacagcggctgtcacgtgggccgcccaggccaataggggtgaggctttgggtcgagctcagtcctcccccggcgcctccgactggcagtgggactcagcgggcgtggaggtcgcggctgagcgagcgagccctgggcgagtgaattgtggctgtgggttgacggtggagacaccccccggagggaggcggagggaagggaggcgaggcctgcacctgcatgcttcccgcctcccactccccagcgcccccggaccgtgcagttctctgcaggaccaggccatggagctcgaagtccggcgggtccgacaggcgttcctgtccggccggtcgcgacctctgcggtttcggctgcagcagctggaggccctgcggaggatggtgcaggagcgcgagaaggatatcctgacggccatcgccgccgacctgtgcaagagtgaattcaatgtgtacagtcaggaagtcattactgtccttggggaaattgattttatgcttgagaatcttcctgaatgggttactgctaaaccagttaagaagaacgtgctcaccatgctggatgaggcctatattcagccacagcctctgggagtggtgctgataatcggagcttggaattaccccttcgttctcaccattcagccactgataggagccatcgctgcaggaaatgctgtgattataaagccttctgaactgagtgaaaatacagccaagatcttggcaaagcttctccctcagtatttagaccaggatctctatattgttattaatggtggtgttgaggaaaccacggagctcctgaagcagcgatttgaccacattttctatacgggaaacactgcggttggcaaaattgtcatggaagctgctgccaagcatctgacccctgtgactcttgaactgggagggaaaagtccatgttatattgataaagattgtgacctggacattgtttgcagacgcataacctggggaaaatacatgaattgtggccaaacctgcattgcacccgactatattctctgtgaagcatccctccaaaatcaaattgtatggaagattaaggaaacagtgaaggaattttatggagaaaatataaaagagtctcctgattatgaaaggatcatcaatcttcgtcattttaagaggatactaagtttgcttgaaggacaaaagatagcttttggtggggagactgatgaggccacacgctacatagccccaacagtacttaccgatgttgatcctaaaaccaaggtgatgcaagaagaaatttttggaccaattcttccaatagtgcctgtgaaaaatgtagatgaggccataaatttcataaatgaacgtgaaaagcctctggctctttatgtattttcgcataaccataagctcatcaaacggatgattgatgagacatccagtggaggtgtcacaggcaatgacgtcattatgcacttcacgctcaactctttcccatttggaggagtgggttccagtgggatgggagcttatcacggaaaacatagttttgatactttttctcatcagcgtccctgtttattaaaaagtttaaagagagaaggtgctaacaaactcagatatcctcccaacagccagtcaaaggtggattggggaaaattttttctcttgaaacggttcaacaaagaaaaactcggtctcctgttgctcactttcctgggtattgtagccgctgtgcttgtcaaggctgaatattactgaagaatgatcctgttcaacctcctagtgcctctactgaattattcctcttttaaatggttaatgaaccaataatttttaaatcataccaaaaatagtaagaaaatatgcaaacactctgtgatcaaacttaaaagtcattgccattcatcattaataaaagttgccatttcaactacgtcccaacattccctaatagggtattcagggaacctgtcttaaattgtgcttatctaaatcttggaactttgagctaggggaggagaatgtattagactaaatacaaactgcggggttgtaagggagtctcagaacctcactgaatccttcactccagttaatggcactgctcacttcctgcctctgctgccaccatcactgtgtgaagctttcaagagcttggtacttcccagggctaccggcagtcctctgtagtccagagaggtgagattagatcttcttggttccctgtgaggtttcaggcactaaaactctatgtggggaagggaggggttactcctcctccaatgggactcaaggacttgacctccaggagtaggcccctggtcagaagtgccatctcaccagtggtcttcattcttcctcattcattctttatcatcctgtgttctgtttagttgcaacaatctcttgtgactaatgtcactcaaagcatcttgtaaatcctagggcttcctggaagttagttgccaaagtcatgcaagcatcacctgtcattcttgtgttggagttatagaattctacatcttataaaacctaactggcatttaaaaaatactgtggccgggcgtggtggctcatgcctgtaatcccagcactttgggaggccgaggtgggaggattgcttgagtccaggaatttgagaccagcctggacaacacagtgagacctcatctctatcaaaaaataaaaattagctagatgtggtggcatgagcctgtgttcccagctgcttaggaggctgaagcaggaggattgattgagcctgcgaggccaaggctgcagcaggctgtgattgcaccactgcacttcagcttgggcaacagagcaagaccctgtctccgaaacaaataaaaaatactgtaataaaagtacttataaacatactaatcctctttcaggaccctaaagttgcaggttagtaggtcttcaaggacaaatctgtaagtttcttatttctgtagtgcaagtaaaatttcactttttgaaactatagagagatccctttctgattagcctacagaacttaaagtgagggaaccatttcctctcacagacaaagaggcctgggatattaggactttggggtttgagagcatcatggggcagacagatggtggatggtctggacaagaagcgagtaagccactgcggttggtcatactgaagggaattgatggcaagaggatcccctgagcaagtcagaagttactctcatcagtcgttcatggtcacaacctgaggtactctgctgagtgggcaaggctgaagaagaggcctgtggaatgcagcattacctgctggacagagcagggcaggcagttctatgccttggagctcctgactgcagggactctgtccccacactcagaaagactcagctcactcaatgagagaatgtgatttactttatagaacgtataatcaactttgttgaataatttgttctattaaggctgtctaaagtatgtgatgtcttcatcatagtatgaagtgttgaaaattaataacgagcctagtttaggaaaaagctgcttaaaactgtggctctaagagagtaatcataaaataccttagataaaattgcactatggaattttcattgagtatgtttaaattattggcttgtctactaatacacatctgcttcaaaatgaacatatttcataaaattggcatcaattttaatgacgctcctggtatggaacctcagatataccctattggagacaatcctttgatcataaattctccccaactataaatcattttatgtctttatcataaaaaaaattcactggccgtcgttntaccgtcgtgctggg

SEQ ID NO: 420499 - DNA, 3875 bp, Homo sapiens
  misc_feature (45)..(45): n is a, c, g, or t
  misc_feature (83)..(83): n is a, c, g, or t
  misc_feature (98)..(98): n is a, c, g, or t
gcccgggcgctctcagcaggatggccaacaccttccctccatccntacaccccgccgccccctggcccgtggccgcgctcggntcccgcactgctcantccaccccctacatcccagcccgctgccagagccggggagagggcgggggccgcgtgggcgaggccgtgaacagcggctgtcacgtgggccgcccaggccaataggggtgaggctttgggtcgagctcagtcctcccccggcgcctccgactggcagtgggactcagcgggcgtggaggtcgcggctgagcgagcgagccctgggcgagtgaattgtggctgtgggttgacggtggagacaccccccggagggaggcggagggaagggaggcgaggcctgcacctgcatgcttcccgcctcccactccccagcgcccccggaccgtgcagttctctgcaggaccaggccatggagctcgaagtccggcgggtccgacaggcgttcctgtccggccggtcgcgacctctgcggtttcggctgcagcagctggaggccctgcggaggatggtgcaggagcgcgagaaggatatcctgacggccatcgccgccgacctgtgcaagagtgaattcaatgtgtacagtcaggaagtcattactgtccttggggaaattgattttatgcttgagaatcttcctgaatgggttactgctaaaccagttaagaagaacgtgctcaccatgctggatgaggcctatattcagccacagcctctgggagtggtgctgataatcggagcttggaattaccccttcgttctcaccattcagccactgataggagccatcgctgcaggaaatgctgtgattataaagccttctgaactgagtgaaaatacagccaagatcttggcaaagcttctccctcagtatttagaccaggatctctatattgttattaatggtggtgttgaggaaaccacggagctcctgaagcagcgatttgaccacattttctatacgggaaacactgcggttggcaaaattgtcatggaagctgctgccaagcatctgacccctgtgactcttgaactgggagggaaaagtccatgttatattgataaagattgtgacctggacattgtttgcagacgcataacctggggaaaatacatgaattgtggccaaacctgcattgcacccgactatattctctgtgaagcatccctccaaaatcaaattgtatggaagattaaggaaacagtgaaggaattttatggagaaaatataaaagagtctcctgattatgaaaggatcatcaatcttcgtcattttaagaggatactaagtttgcttgaaggacaaaagatagcttttggtggggagactgatgaggccacacgctacatagccccaacagtacttaccgatgttgatcctaaaaccaaggtgatgcaagaagaaatttttggaccaattcttccaatagtgcctgtgaaaaatgtagatgaggccataaatttcataaatgaacgtgaaaagcctctggctctttatgtattttcgcataaccataagctcatcaaacggatgattgatgagacatccagtggaggtgtcacaggcaatgacgtcattatgcacttcacgctcaactctttcccatttggaggagtgggttccagtgggatgggagcttatcacggaaaacatagttttgatactttttctcatcagcgtccctgtttattaaaaagtttaaagagagaaggtgctaacaaactcagatatcctcccaacagccagtcaaaggtggattggggaaaattttttctcttgaaacggttcaacaaagaaaaactcggtctcctgttgctcactttcctgggtattgtagccgctgtgcttgtcaaggctgaatattactgaagaatgatcctgttcaacctcctagtgcctctactgaattattcctcttttaaatggttaatgaaccaataatttttaaatcataccaaaaatagtaagaaaatatgcaaacactctgtgatcaaacttaaaagtcattgccattcatcattaataaaagttgccatttcaactacgtcccaacattccctaatagggtattcagggaacctgtcttaaattgtgcttatctaaatcttggaactttgagctaggggaggagaatgtattagactaaatacaaactgcggggttgtaagggagtctcagaacctcactgaatccttcactccagttaatggcactgctcacttcctgcctctgctgccaccatcactgtgtgaagctttcaagagcttggtacttcccagggctaccggcagtcctctgtagtccagagaggtgagattagatcttcttggttccctgtgaggtttcaggcactaaaactctatgtggggaagggaggggttactcctcctccaatgggactcaaggacttgacctccaggagtaggcccctggtcagaagtgccatctcaccagtggtcttcattcttcctcattcattctttatcatcctgtgttctgtttagttgcaacaatctcttgtgactaatgtcactcaaagcatcttgtaaatcctagggcttcctggaagttagttgccaaagtcatgcaagcatcacctgtcattcttgtgttggagttatagaattctacatcttataaaacctaactggcatttaaaaaatactgtggccgggcgtggtggctcatgcctgtaatcccagcactttgggaggccgaggtgggaggattgcttgagtccaggaatttgagaccagcctggacaacacagtgagacctcatctctatcaaaaaataaaaattagctagatgtggtggcatgagcctgtgttcccagctgcttaggaggctgaagcaggaggattgattgagcctgcgaggccaaggctgcagcaggctgtgattgcaccactgcacttcagcttgggcaacagagcaagaccctgtctccgaaacaaataaaaaatactgtaataaaagtacttataaacatactaatcctctttcaggaccctaaagttgcaggttagtaggtcttcaaggacaaatctgtaagtttcttatttctgtagtgcaaaacttaaagtgagggaaccatttcctctcacagacaaagaggcctgggatattaggactttggggtttgagagcatcatggggcagacagatggtggatggtctggacaagaagcgagtaagccactgcggttggtcatactgaagggaattgatggcaagaggatcccctgagcaagtcagaagttactctcatcagtcgttcatggtcacaacctgaggtactctgctgagtgggcaaggctgaagaagaggcctgtggaatgcagcattacctgctggacagagcagggcaggcagttctatgccttggagctcctgactgcagggactctgtccccacactcagaaagactcagctcactcaatgagagaatgtgatttactttatagaacgtataatcaactttgttgaataatttgttctattaaggctgtctaaagtatgtgatgtcttcatcatagtatgaagtgttgaaaattaataacgagcctagtttaggaaaaagctgcttaaaactgtggctctaagagagtaatcataaaataccttagataaaattgcactatggaattttcattgagtatgtttaaattattggcttgtctactaatacacatctgcttcaaaatgaacatatttcataaaattggcatcaattttaatgacgctcctggtatggaacctcagatataccctattggagacaatcctttgatcataaattctccccaactataaatcattttatgtctttatcata

SEQ ID NO: 420500 - DNA, 3640 bp, Homo sapiens
tgagtaacggacgtgcgaggatgatgcttgtgcaagaaggaaatgaccgctgtcccggctccgcgggagacgaaccccggcttcccgccctcagggactagctctccagggaactgggacgcgcccccggaccgtgcagttctctgcaggaccaggccatggagctcgaagtccggcgggtccgacaggcgttcctgtccggccggtcgcgacctctgcggtttcggctgcagcagctggaggccctgcggaggatggtgcaggagcgcgagaaggatatcctgacggccatcgccgccgacctgtgcaagagtgaattcaatgtgtacagtcaggaagtcattactgtccttggggaaattgattttatgcttgagaatcttcctgaatgggttactgctaaaccagttaagaagaacgtgctcaccatgctggatgaggcctatattcagccacagcctctgggagtggtgctgataatcggagcttggaattaccccttcgttctcaccattcagccactgataggagccatcgctgcaggaaatgctgtgattataaagccttctgaactgagtgaaaatacagccaagatcttggcaaagcttctccctcagtatttagaccaggatctctatattgttattaatggtggtgttgaggaaaccacggagctcctgaagcagcgatttgaccacattttctatacgggaaacactgcggttggcaaaattgtcatggaagctgctgccaagcatctgacccctgtgactcttgaactgggagggaaaagtccatgttatattgataaagattgtgacctggacattgtttgcagacgcataacctggggaaaatacatgaattgtggccaaacctgcattgcacccgactatattctctgtgaagcatccctccaaaatcaaattgtatggaagattaaggaaacagtgaaggaattttatggagaaaatataaaagagtctcctgattatgaaaggatcatcaatcttcgtcattttaagaggatactaagtttgcttgaaggacaaaagatagcttttggtggggagactgatgaggccacacgctacatagccccaacagtacttaccgatgttgatcctaaaaccaaggtgatgcaagaagaaatttttggaccaattcttccaatagtgcctgtgaaaaatgtagatgaggccataaatttcataaatgaacgtgaaaagcctctggctctttatgtattttcgcataaccataagctcatcaaacggatgattgatgagacatccagtggaggtgtcacaggcaatgacgtcattatgcacttcacgctcaactctttcccatttggaggagtgggttccagtgggatgggagcttatcacggaaaacatagttttgatactttttctcatcagcgtccctgtttattaaaaagtttaaagagagaaggtgctaacaaactcagatatcctcccaacagccagtcaaaggtggattggggaaaattttttctcttgaaacggttcaacaaagaaaaactcggtctcctgttgctcactttcctgggtattgtagccgctgtgcttgtcaaggctgaatattactgaagaatgatcctgttcaacctcctagtgcctctactgaattattcctcttttaaatggttaatgaaccaataatttttaaatcataccaaaaatagtaagaaaatatgcaaacactctgtgatcaaacttaaaagtcattgccattcatcattaataaaagttgccatttcaactacgtcccaacattccctaatagggtattcagggaacctgtcttaaattgtgcttatctaaatcttggaactttgagctaggggaggagaatgtattagactaaatacaaactgcggggttgtaagggagtctcagaacctcactgaatccttcactccagttaatggcactgctcacttcctgcctctgctgccaccatcactgtgtgaagctttcaagagcttggtacttcccagggctaccggcagtcctctgtagtccagagaggtgagattagatcttcttggttccctgtgaggtttcaggcactaaaactctatgtggggaagggaggggttactcctcctccaatgggactcaaggacttgacctccaggagtaggcccctggtcagaagtgccatctcaccagtggtcttcattcttcctcattcattctttatcatcctgtgttctgtttagttgcaacaatctcttgtgactaatgtcactcaaagcatcttgtaaatcctagggcttcctggaagttagttgccaaagtcatgcaagcatcacctgtcattcttgtgttggagttatagaattctacatcttataaaacctaactggcatttaaaaaatactgtggccgggcgtggtggctcatgcctgtaatcccagcactttgggaggccgaggtgggaggattgcttgagtccaggaatttgagaccagcctggacaacacagtgagacctcatctctatcaaaaaataaaaattagctagatgtggtggcatgagcctgtgttcccagctgcttaggaggctgaagcaggaggattgattgagcctgcgaggccaaggctgcagcaggctgtgattgcaccactgcacttcagcttgggcaacagagcaagaccctgtctccgaaacaaataaaaaatactgtaataaaagtacttataaacatactaatcctctttcaggaccctaaagttgcaggttagtaggtcttcaaggacaaatctgtaagtttcttatttctgtagtgcaagtaaaatttcactttttgaaactatagagagatccctttctgattagcctacagaacttaaagtgagggaaccatttcctctcacagacaaagaggcctgggatattaggactttggggtttgagagcatcatggggcagacagatggtggatggtctggacaagaagcgagtaagccactgcggttggtcatactgaagggaattgatggcaagaggatcccctgagcaagtcagaagttactctcatcagtcgttcatggtcacaacctgaggtactctgctgagtgggcaaggctgaagaagaggcctgtggaatgcagcattacctgctggacagagcagggcaggcagttctatgccttggagctcctgactgcagggactctgtccccacactcagaaagactcagctcactcaatgagagaatgtgatttactttatagaacgtataatcaactttgttgaataatttgttctattaaggctgtctaaagtatgtgatgtcttcatcatagtatgaagtgttgaaaattaataacgagcctagtttaggaaaaagctgcttaaaactgtggctctaagagagtaatcataaaataccttagataaaattgcactatggaattttcattgagtatgtttaaattattggcttgtctactaatacacatctgcttcaaaatgaacatatttcataaaattggcatcaattttaatgacgctcctggtatggaacctcagatataccctattggagacaatcctttgatcataaattctccccaactataaatcattttatgtctttatcata

SEQ ID NO: 420501 - DNA, 3765 bp, Homo sapiens
tgagtaacggacgtgcgaggatgatgcttgtgcaagaaggaaatgaccgctgtcccggctccgcgggagacgaaccccggcttcccgccctcagggactagctctccagggaactgggacgcgcccccggaccgtgcagttctctgcaggaccaggccatggagctcgaagtccggcgggtccgacaggcgttcctgtccggccggtcgcgacctctgcggtttcggctgcagcagctggaggccctgcggaggatggtgcaggagcgcgagaaggatatcctgacggccatcgccgccgacctgtgcaagagtgaattcaatgtgtacagtcaggaagtcattactgtccttggggaaattgattttatgcttgagaatcttcctgaatgggttactgctaaaccagttaagaagaacgtgctcaccatgctggatgaggcctatattcagccacagcctctgggagtggtgctgataatcggagcttggaattaccccttcgttctcaccattcagccactgataggagccatcgctgcaggaaatgctgtgattataaagccttctgaactgagtgaaaatacagccaagatcttggcaaagcttctccctcagtatttagaccaggatctctatattgttattaatggtggtgttgaggaaaccacggagctcctgaagcagcgatttgaccacattttctatacgggaaacactgcggttggcaaaattgtcatggaagctgctgccaagcatctgacccctgtgactcttgaactgggagggaaaagtccatgttatattgataaagattgtgacctggacattgtttgcagacgcataacctggggaaaatacatgaattgtggccaaacctgcattgcacccgactatattctctgtgaagcatccctccaaaatcaaattgtatggaagattaaggaaacagtgaaggaattttatggagaaaatataaaagagtctcctgattatgaaaggatcatcaatcttcgtcattttaagaggatactaagtttgcttgaaggacaaaagatagcttttggtggggagactgatgaggccacacgctacatagccccaacagtacttaccgatgttgatcctaaaaccaaggtgatgcaagaagaaatttttggaccaattcttccaatagtgcctgtgaaaaatgtagatgaggccataaatttcataaatgaacgtgaaaagcctctggctctttatgtattttcgcataaccataagctcatcaaacggatgattgatgagacatccagtggaggtgtcacaggcaatgacgtcattatgcacttcacgctcaactctttcccatttggaggagtgggttccagtgggatgggagcttatcacggaaaacatagttttgatactttttctcatcagcgtccctgtttattaaaaagtttaaagagagaaggtgctaacaaactcagatatcctcccaacagccagtcaaaggtggattggggaaaattttttctcttgaaacggttcaacaaagaaaaactcggtctcctgttgctcactttcctgggtattgtagccgctgtgcttgtcaagaaataccaagctgtgctgaggagaaaggccctgttgatttttctggtagttcacagactgcgttggtccagtaagcagagatgaacaccagatttcaaaacccagccctgtctgttaagagtgaggctgaatattactgaagaatgatcctgttcaacctcctagtgcctctactgaattattcctcttttaaatggttaatgaaccaataatttttaaatcataccaaaaatagtaagaaaatatgcaaacactctgtgatcaaacttaaaagtcattgccattcatcattaataaaagttgccatttcaactacgtcccaacattccctaatagggtattcagggaacctgtcttaaattgtgcttatctaaatcttggaactttgagctaggggaggagaatgtattagactaaatacaaactgcggggttgtaagggagtctcagaacctcactgaatccttcactccagttaatggcactgctcacttcctgcctctgctgccaccatcactgtgtgaagctttcaagagcttggtacttcccagggctaccggcagtcctctgtagtccagagaggtgagattagatcttcttggttccctgtgaggtttcaggcactaaaactctatgtggggaagggaggggttactcctcctccaatgggactcaaggacttgacctccaggagtaggcccctggtcagaagtgccatctcaccagtggtcttcattcttcctcattcattctttatcatcctgtgttctgtttagttgcaacaatctcttgtgactaatgtcactcaaagcatcttgtaaatcctagggcttcctggaagttagttgccaaagtcatgcaagcatcacctgtcattcttgtgttggagttatagaattctacatcttataaaacctaactggcatttaaaaaatactgtggccgggcgtggtggctcatgcctgtaatcccagcactttgggaggccgaggtgggaggattgcttgagtccaggaatttgagaccagcctggacaacacagtgagacctcatctctatcaaaaaataaaaattagctagatgtggtggcatgagcctgtgttcccagctgcttaggaggctgaagcaggaggattgattgagcctgcgaggccaaggctgcagcaggctgtgattgcaccactgcacttcagcttgggcaacagagcaagaccctgtctccgaaacaaataaaaaatactgtaataaaagtacttataaacatactaatcctctttcaggaccctaaagttgcaggttagtaggtcttcaaggacaaatctgtaagtttcttatttctgtagtgcaagtaaaatttcactttttgaaactatagagagatccctttctgattagcctacagaacttaaagtgagggaaccatttcctctcacagacaaagaggcctgggatattaggactttggggtttgagagcatcatggggcagacagatggtggatggtctggacaagaagcgagtaagccactgcggttggtcatactgaagggaattgatggcaagaggatcccctgagcaagtcagaagttactctcatcagtcgttcatggtcacaacctgaggtactctgctgagtgggcaaggctgaagaagaggcctgtggaatgcagcattacctgctggacagagcagggcaggcagttctatgccttggagctcctgactgcagggactctgtccccacactcagaaagactcagctcactcaatgagagaatgtgatttactttatagaacgtataatcaactttgttgaataatttgttctattaaggctgtctaaagtatgtgatgtcttcatcatagtatgaagtgttgaaaattaataacgagcctagtttaggaaaaagctgcttaaaactgtggctctaagagagtaatcataaaataccttagataaaattgcactatggaattttcattgagtatgtttaaattattggcttgtctactaatacacatctgcttcaaaatgaacatatttcataaaattggcatcaattttaatgacgctcctggtatggaacctcagatataccctattggagacaatcctttgatcataaattctccccaactataaatcattttatgtctttatcata

SEQ ID NO: 420502 - DNA, 3875 bp, Homo sapiens
  misc_feature (45)..(45): n is a, c, g, or t
  misc_feature (83)..(83): n is a, c, g, or t
  misc_feature (98)..(98): n is a, c, g, or t
gcccgggcgctctcagcaggatggccaacaccttccctccatccntacaccccgccgccccctggcccgtggccgcgctcggntcccgcactgctcantccaccccctacatcccagcccgctgccagagccggggagagggcgggggccgcgtgggcgaggccgtgaacagcggctgtcacgtgggccgcccaggccaataggggtgaggctttgggtcgagctcagtcctcccccggcgcctccgactggcagtgggactcagcgggcgtggaggtcgcggctgagcgagcgagccctgggcgagtgaattgtggctgtgggttgacggtggagacaccccccggagggaggcggagggaagggaggcgaggcctgcacctgcatgcttcccgcctcccactccccagcgcccccggaccgtgcagttctctgcaggaccaggccatggagctcgaagtccggcgggtccgacaggcgttcctgtccggccggtcgcgacctctgcggtttcggctgcagcagctggaggccctgcggaggatggtgcaggagcgcgagaaggatatcctgacggccatcgccgccgacctgtgcaagagtgaattcaatgtgtacagtcaggaagtcattactgtccttggggaaattgattttatgcttgagaatcttcctgaatgggttactgctaaaccagttaagaagaacgtgctcaccatgctggatgaggcctatattcagccacagcctctgggagtggtgctgataatcggagcttggaattaccccttcgttctcaccattcagccactgataggagccatcgctgcaggaaatgctgtgattataaagccttctgaactgagtgaaaatacagccaagatcttggcaaagcttctccctcagtatttagaccaggatctctatattgttattaatggtggtgttgaggaaaccacggagctcctgaagcagcgatttgaccacattttctatacgggaaacactgcggttggcaaaattgtcatggaagctgctgccaagcatctgacccctgtgactcttgaactgggagggaaaagtccatgttatattgataaagattgtgacctggacattgtttgcagacgcataacctggggaaaatacatgaattgtggccaaacctgcattgcacccgactatattctctgtgaagcatccctccaaaatcaaattgtatggaagattaaggaaacagtgaaggaattttatggagaaaatataaaagagtctcctgattatgaaaggatcatcaatcttcgtcattttaagaggatactaagtttgcttgaaggacaaaagatagcttttggtggggagactgatgaggccacacgctacatagccccaacagtacttaccgatgttgatcctaaaaccaaggtgatgcaagaagaaatttttggaccaattcttccaatagtgcctgtgaaaaatgtagatgaggccataaatttcataaatgaacgtgaaaagcctctggctctttatgtattttcgcataaccataagctcatcaaacggatgattgatgagacatccagtggaggtgtcacaggcaatgacgtcattatgcacttcacgctcaactctttcccatttggaggagtgggttccagtgggatgggagcttatcacggaaaacatagttttgatactttttctcatcagcgtccctgtttattaaaaagtttaaagagagaaggtgctaacaaactcagatatcctcccaacagccagtcaaaggtggattggggaaaattttttctcttgaaacggttcaacaaagaaaaactcggtctcctgttgctcactttcctgggtattgtagccgctgtgcttgtcaaggctgaatattactgaagaatgatcctgttcaacctcctagtgcctctactgaattattcctcttttaaatggttaatgaaccaataatttttaaatcataccaaaaatagtaagaaaatatgcaaacactctgtgatcaaacttaaaagtcattgccattcatcattaatactgtcttaaattgtgcttatctaaatcttggaactttgagctaggggaggagaatgtattagactaaatacaaactgcggggttgtaagggagtctcagaacctcactgaatccttcactccagttaatggcactgctcacttcctgcctctgctgccaccatcactgtgtgaagctttcaagagcttggtacttcccagggctaccggcagtcctctgtagtccagagaggtgagattagatcttcttggttccctgtgaggtttcaggcactaaaactctatgtggggaagggaggggttactcctcctccaatgggactcaaggacttgacctccaggagtaggcccctggtcagaagtgccatctcaccagtggtcttcattcttcctcattcattctttatcatcctgtgttctgtttagttgcaacaatctcttgtgactaatgtcactcaaagcatcttgtaaatcctagggcttcctggaagttagttgccaaagtcatgcaagcatcacctgtcattcttgtgttggagttatagaattctacatcttataaaacctaactggcatttaaaaaatactgtggccgggcgtggtggctcatgcctgtaatcccagcactttgggaggccgaggtgggaggattgcttgagtccaggaatttgagaccagcctggacaacacagtgagacctcatctctatcaaaaaataaaaattagctagatgtggtggcatgagcctgtgttcccagctgcttaggaggctgaagcaggaggattgattgagcctgcgaggccaaggctgcagcaggctgtgattgcaccactgcacttcagcttgggcaacagagcaagaccctgtctccgaaacaaataaaaaatactgtaataaaagtacttataaacatactaatcctctttcaggaccctaaagttgcaggttagtaggtcttcaaggacaaatctgtaagtttcttatttctgtagtgcaagtaaaatttcactttttgaaactatagagagatccctttctgattagcctacagaacttaaagtgagggaaccatttcctctcacagacaaagaggcctgggatattaggactttggggtttgagagcatcatggggcagacagatggtggatggtctggacaagaagcgagtaagccactgcggttggtcatactgaagggaattgatggcaagaggatcccctgagcaagtcagaagttactctcatcagtcgttcatggtcacaacctgaggtactctgctgagtgggcaaggctgaagaagaggcctgtggaatgcagcattacctgctggacagagcagggcaggcagttctatgccttggagctcctgactgcagggactctgtccccacactcagaaagactcagctcactcaatgagagaatgtgatttactttatagaacgtataatcaactttgttgaataatttgttctattaaggctgtctaaagtatgtgatgtcttcatcatagtatgaagtgttgaaaattaataacgagcctagtttaggaaaaagctgcttaaaactgtggctctaagagagtaatcataaaataccttagataaaattgcactatggaattttcattgagtatgtttaaattattggcttgtctactaatacacatctgcttcaaaatgaacatatttcataaaattggcatcaattttaatgacgctcctggtatggaacctcagatataccctattggagacaatcctttgatcataaattctccccaactataaatcattttatgtctttatcata

SEQ ID NO: 420503 - DNA, 3693 bp, Homo sapiens
  misc_feature (45)..(45): n is a, c, g, or t
  misc_feature (83)..(83): n is a, c, g, or t
  misc_feature (98)..(98): n is a, c, g, or t
gcccgggcgctctcagcaggatggccaacaccttccctccatccntacaccccgccgccccctggcccgtggccgcgctcggntcccgcactgctcantccaccccctacatcccagcccgctgccagagccggggagagggcgggggccgcgtgggcgaggccgtgaacagcggctgtcacgtgggccgcccaggccaataggggtgaggctttgggtcgagctcagtcctcccccggcgcctccgactggcagtgggactcagcgggcgtggaggtcgcggctgagcgagcgagccctgggcgagtgaattgtggctgtgggttgacggtggagacaccccccggagggaggcggagggaagggaggcgaggcctgcacctgcatgcttcccgcctcccactccccagcgcccccggaccgtgcagttctctgcaggaccaggccatggagctcgaagtccggcgggtccgacaggcgttcctgtccggccggtcgcgacctctgcggtttcggctgcagcagctggaggccctgcggaggatggtgcaggagcgcgagaaggatatcctgacggccatcgccgccgacctgtgcaagagtgaattcaatgtgtacagtcaggaagtcattactgtccttggggaaattgattttatgcttgagaatcttcctgaatgggttactgctaaaccagttaagaagaacgtgctcaccatgctggatgaggcctatattcagccacagcctctgggagtggtgctgataatcggagcttggaattaccccttcgttctcaccattcagccactgataggagccatcgctgcaggaaatgctgtgattataaagccttctgaactgagtgaaaatacagccaagatcttggcaaagcttctccctcagtatttagaccaggatctctatattgttattaatggtggtgttgaggaaaccacggagctcctgaagcagcgatttgaccacattttctatacgggaaacactgcggttggcaaaattgtcatggaagctgctgccaagcatctgacccctgtgactcttgaactgggagggaaaagtccatgttatattgataaagattgtgacctggacattgtttgcagacgcataacctggggaaaatacatgaattgtggccaaacctgcattgcacccgactatattctctgtgaagcatccctccaaaatcaaattgtatggaagattaaggaaacagtgaaggaattttatggagaaaatataaaagagtctcctgattatgaaaggatcatcaatcttcgtcattttaagaggatactaagtttgcttgaaggacaaaagatagcttttggtggggagactgatgaggccacacgctacatagccccaacagtacttaccgatgttgatcctaaaaccaaggtgatgcaagaagaaatttttggaccaattcttccaatagtgcctgtgaaaaatgtagatgaggccataaatttcataaatgaacgtgaaaagcctctggctctttatgtattttcgcataaccataagctcatcaaacggatgattgatgagacatccagtggaggtgtcacaggcaatgacgtcattatgcacttcacgctcaactctttcccatttggaggagtgggctgaatattactgaagaatgatcctgttcaacctcctagtgcctctactgaattattcctcttttaaatggttaatgaaccaataatttttaaatcataccaaaaatagtaagaaaatatgcaaacactctgtgatcaaacttaaaagtcattgccattcatcattaataaaagttgccatttcaactacgtcccaacattccctaatagggtattcagggaacctgtcttaaattgtgcttatctaaatcttggaactttgagctaggggaggagaatgtattagactaaatacaaactgcggggttgtaagggagtctcagaacctcactgaatccttcactccagttaatggcactgctcacttcctgcctctgctgccaccatcactgtgtgaagctttcaagagcttggtacttcccagggctaccggcagtcctctgtagtccagagaggtgagattagatcttcttggttccctgtgaggtttcaggcactaaaactctatgtggggaagggaggggttactcctcctccaatgggactcaaggacttgacctccaggagtaggcccctggtcagaagtgccatctcaccagtggtcttcattcttcctcattcattctttatcatcctgtgttctgtttagttgcaacaatctcttgtgactaatgtcactcaaagcatcttgtaaatcctagggcttcctggaagttagttgccaaagtcatgcaagcatcacctgtcattcttgtgttggagttatagaattctacatcttataaaacctaactggcatttaaaaaatactgtggccgggcgtggtggctcatgcctgtaatcccagcactttgggaggccgaggtgggaggattgcttgagtccaggaatttgagaccagcctggacaacacagtgagacctcatctctatcaaaaaataaaaattagctagatgtggtggcatgagcctgtgttcccagctgcttaggaggctgaagcaggaggattgattgagcctgcgaggccaaggctgcagcaggctgtgattgcaccactgcacttcagcttgggcaacagagcaagaccctgtctccgaaacaaataaaaaatactgtaataaaagtacttataaacatactaatcctctttcaggaccctaaagttgcaggttagtaggtcttcaaggacaaatctgtaagtttcttatttctgtagtgcaagtaaaatttcactttttgaaactatagagagatccctttctgattagcctacagaacttaaagtgagggaaccatttcctctcacagacaaagaggcctgggatattaggactttggggtttgagagcatcatggggcagacagatggtggatggtctggacaagaagcgagtaagccactgcggttggtcatactgaagggaattgatggcaagaggatcccctgagcaagtcagaagttactctcatcagtcgttcatggtcacaacctgaggtactctgctgagtgggcaaggctgaagaagaggcctgtggaatgcagcattacctgctggacagagcagggcaggcagttctatgccttggagctcctgactgcagggactctgtccccacactcagaaagactcagctcactcaatgagagaatgtgatttactttatagaacgtataatcaactttgttgaataatttgttctattaaggctgtctaaagtatgtgatgtcttcatcatagtatgaagtgttgaaaattaataacgagcctagtttaggaaaaagctgcttaaaactgtggctctaagagagtaatcataaaataccttagataaaattgcactatggaattttcattgagtatgtttaaattattggcttgtctactaatacacatctgcttcaaaatgaacatatttcataaaattggcatcaattttaatgacgctcctggtatggaacctcagatataccctattggagacaatcctttgatcataaattctccccaactataaatcattttatgtctttatcata

SEQ ID NO: 420504 - DNA, 1805 bp, Homo sapiens
  misc_feature (45)..(45): n is a, c, g, or t
  misc_feature (83)..(83): n is a, c, g, or t
  misc_feature (98)..(98): n is a, c, g, or t
gcccgggcgctctcagcaggatggccaacaccttccctccatccntacaccccgccgccccctggcccgtggccgcgctcggntcccgcactgctcantccaccccctacatcccagcccgctgccagagccggggagagggcgggggccgcgtgggcgaggccgtgaacagcggctgtcacgtgggccgcccaggccaataggggtgaggctttgggtcgagctcagtcctcccccggcgcctccgactggcagtgggactcagcgggcgtggaggtcgcggctgagcgagcgagccctgggcgagtgaattgtggctgtgggttgacggtggagacaccccccggagggaggcggagggaagggaggcgaggcctgcacctgcatgcttcccgcctcccactccccagcgcccccggaccgtgcagttctctgcaggaccaggccatggagctcgaagtccggcgggtccgacaggcgttcctgtccggccggtcgcgacctctgcggtttcggctgcagcagctggaggccctgcggaggatggtgcaggagcgcgagaaggatatcctgacggccatcgccgccgacctgtgcaagagtgaattcaatgtgtacagtcaggaagtcattactgtccttggggaaattgattttatgcttgagaatcttcctgaatgggttactgctaaaccagttaagaagaacgtgctcaccatgctggatgaggcctatattcagccacagcctctgggagtggtgctgataatcggagcttggaattaccccttcgttctcaccattcagccactgataggagccatcgctgcaggaaatgctgtgattataaagccttctgaactgagtgaaaatacagccaagatcttggcaaagcttctccctcagtatttagaccagccattttgttctaatagctgtgatgatccaatcaagaaagatgaaatggaagacagtgagatgtcaaggattgaataggacgtagaaccagaagatagaggttgaaggtaccgctttgcccctgaccaggggtaaattcttcaataactgactctgtccggataaggaggataataatgctctaccagcttcagttaccgtgttaggggatcaataatatatgctatgtagattaagccatagaaaagttaaagcttgaaacatttgttgggcagctgaaccatgaagtgaatgaaattaattcgccttcaagtggaaacatgagatccacaagccagcttttacttcacacttccaccttggagtcttgaatacctctctgtcttccttgcttgccatctgttctcttacttttgatgctgttattgtccaagatgttctctcttagaatagctggtaatgatagcacaatgcatagatgggctcagtccacagaagctacgtgaattctcccagtaacagatgaggaaattgaggctcagagatgttcagtagcttgcctaaggttgcataagctagtgagtggcagagcccagattcaaaccagatacacttcaaaagcaagcgctctcagctactgtgccggatataccattcattcagaatagcgtgggctaagcccactctgtgttgtgagacagagaacattcagactaagacatgcatgacctgtcctgtgggagccactcttcaccagaggcacttctgcacacacccgcgtctcatgcattttccctggtcaaattcaaccatttgttctccttagtgtctttgttgctgagctcatgtaaaaaaacactggagtctccagattagttctatgtggg

SEQ ID NO: 420505 - DNA, 901 bp, Homo sapiens
  misc_feature (45)..(45): n is a, c, g, or t
  misc_feature (83)..(83): n is a, c, g, or t
  misc_feature (98)..(98): n is a, c, g, or t
gcccgggcgctctcagcaggatggccaacaccttccctccatccntacaccccgccgccccctggcccgtggccgcgctcggntcccgcactgctcantccaccccctacatcccagcccgctgccagagccggggagagggcgggggccgcgtgggcgaggccgtgaacagcggctgtcacgtgggccgcccaggccaataggggtgaggctttgggtcgagctcagtcctcccccggcgcctccgactggcagtgggactcagcgggcgtggaggtcgcggctgagcgagcgagccctgggcgagtgaattgtggctgtgggttgacggtggagacaccccccggagggaggcggagggaagggaggcgaggcctgcacctgcatgcttcccgcctcccactccccagcgcccccggaccgtgcagttctctgcaggaccaggccatggagctcgaagtccggcgggtccgacaggcgttcctgtccggccggtcgcgacctctgcggtttcggctgcagcagctggaggccctgcggaggatggtgcaggagcgcgagaaggatatcctgacggccatcgccgccgacctgtgcaagagtgaattcaatgtgtacagtcaggaagtcattactgtccttggggaaattgattttatgcttgagaatcttcctgaatgggttactgctaaaccagttaagaagaacgtgctcaccatgctggatgaggcctatattcagccacagcctctgggagtggtgctgataatcggagcttggaattaccccttcgttctcaccattcagccactgataggagccatcgctgcaggaaatgctgtgattataaagccttctgaactgagtgtctatatatggattaataggggtgttgaggaaa

SEQ ID NO: 420506 - DNA, 1113 bp, Homo sapiens
agcggaccgagccgcagccgcagccgggcggcgggcgagaggcggcggcggcgggcgggccgcgggcagtcagtcgggcggcggcggcggcggcggcggcgatgcggcggccccgctgagtccgcccgctcctggcgccgggagccagccgcgcgaggcggcccgggccgggcggcagcatgcggagcggcgaggagctggacggcttcgagggcgaggcctcgagcacctccatgatctcgggcgccagcagcccgtaccagcccaccaccgagccggtgagccagcgccgcgggctggccggcctgcgctgcgaccccgactacctgcgcggcgcgctcggccgcctcaaggtcgcccaagtgatcttggccctgattgcattcatctgcatagagaccatcatggcatgctccccgtgtgaaggcctctacttttttgagtttgtgagctgcagtgcgtttgtggtgactggcgtcttgctgattatgttcagtctcaacctgcacatgaggatcccccagatcaactggaatctgacagatttggtcaacactggactcagcgctttccttttctttattgcttcaatcgtactggctgctttaaaccatagagccggagcagaaattgctgccgtgatatttggcttcttggcgactgcggcatatgcagtgaacacattcctggcagtgcagaaatggagagtcagcgtccgccagcagagcaccaatgactacatccgagcccgcacggagtccagggatgtggacagtcgccctgagatccagcgcctggacacgtgaggacctgcctggatcctcctccctcccgtcctcgtgcctgtctctcagtcaagttttctttcccttgtcctgtcagatttccatgtgattcagttgaattttgtcctctttggtaaaagttcattttgggaaagggtttcccgagtggcccagtgggcgggtccgcggtggagttgggaggcccacgttcctcagcgtttggggctgtggagcagccggcgtcactgcccaggtccacttgaggtcttacctgccctgaagcacaggcttcctttgactctgagccaccttgtcgtgtgtatttgta

SEQ ID NO: 420507 - DNA, 3619 bp, Homo sapiens
tctcatctgtgttcaaaacaaaacagtcatgaagtctttgtgccactgcctgactgtcatcttctccagatcttgtttacagagtaataatgacgttaaacaggtatcagaaaggggaaaaagtttctaggccaagagctgctggtggattctcttgagcagaataacaagttgcttcctgctccagggactgccattagcttgtgaagtctctaggtgccttgttatttcctagtgaagttgcagaatccagggttttttccaggtttgtcttattttatcagcacccacgtccaggcccaacagcttggtaggctggtgaggtccacacacggccaggtctgggagataagggaggaagcagtggcctggaacaccccacctgtctgctatcagcactagacagctcaggctgtcttggaaacgtgtactttgttaactgccttcctgtcctcttgtctttgaaagctgtctcgcgttccacagtcagcttgagggcaagagtgggatgctggggacaggtctttcccgtcctgtgggtgagctcctggcatctggctcaggaacatgtgggtccagcaggtgactctgaagctggcttggctgccatctcagacaggacgcaggcctgacaccctcagcttttagctttgtaaacttccctggcgctttgtagaatcttgtgtttcttctcttctcagcagatatcattcaagtcacaagaactgtctggttgagaaagtaatttaaaatatttgaccttttatgtttcttttatttagaaactgtgagagaaaataccgtcaatatctgttaggtctagaaaaattttcttccgaaagtgaatgttctgtttaattcttcttcatgcaagtgagtggcattttgtacactctttagcttgaagcggagtgggtcctattgtattttcccttcttttgtctggaatatattctttttccatttggatacagtttttcaacctttggggatttttttttcctttctagtttttcctactccacaaacgtaacagtaaggaaaaaatcacccacaaacctgctgagtttgaatcactggcaacttgcctagaaaagttcagatgatgggtccttgaactgtgtatctatttcatagggtaagtttgttgtctatgtttgtttttttatgctgaggctttaattcaggtgacttgctatctagacacctggggtggcgtgttttctttgggatgcataatacacaaaggccagggagcctttggcttggacccccagggagctattgaaacttttaaagtttgagtttaggagtaagaacatatctcagaccaccttagtcagctttgctgatgggatttagggccaggtcagagtttcttttcataactgcctgaaaagagagatggtgtgaaacaagattctgataatggtttgtgtgagatttgatcatagtctaaaactatcacgtctgagttgccttaggatgacagtgctgacacccagtaggaagtatcccatttttatcaggaaagtcagtcacgcgtagggatggtgaggagacgcgtagggatggtgaggaggggagaggagggagacctgctggtgcccttgcaccagggtgaggcctgactcacgctgcttccccccacaggccctgctttgcttgcctgctttttccagaatcgattttgcaagcttcaagattctgttcccctcttcgcagaagtgaggaaggcaaatactcagggtttgaagggagacctggccggcctgagggctggcagatgtgagggcaggacacctgggatggactcgtaggctgacccaggcccaaagggggctgcctgttcccaactctttcactctgtaacccattttaaaatgagtttttgaatcttgcctcaaattgacctacttggataaaatcagtgcttttcctaacttgattttgtttgacgtggttccctctaagagaatggtaggaattgaaactatttgtatatgttgaaatttgtaggggttcaggaacccatggcagaaacactaaactatttatttacaagtatgactatttttttttcaaagtaggcaattctttgtatattttaaggcaaataatcacttcacctctggtgccttccatgcgtcgcataagcactcttgtcaatcatggaattggaaaaaaagatgtacatttagttaaacaagataacactatttttgtagcatgattttagattgtgtccttttaatattgttttcaacaatggtagttttgaggttttggccattttctctttacacttcgtatgtattttaaagaagaaaaaaaacaaaaaaaattccctggctattcctctttcctctctgctgctgcttctcctgcatcttgttcctgcttatttaaatagtctgagagtaagagtatatttctgtgaaataattataagtcagtataattgcatttggcattttttaaccacttgctcagtttggagccactgctcacctcaaacagtacaaagaaagtggttccatattttacaaacagaagagtagcatcagagccctgacctcctgtctttgggtgtaaaatggtgagaggccggtgtccggctccttcccctgtggtttgggctggtgaactgagcccaagtgtattctctggcctgggccccttccagaatcagtgcgagcgtcctgcagaggcatggccttcctgccactgcagagtgggaagcttcctgggggacctcagccagctccggggctctcatcttccactcggatctcagattggttcgttgtggatgctctggctaggctcggcggccttttccaggcttcaggcctgaacaaaacaggctgtttgctgtgaggagctagatgacaccaagacacagacacgtactcttcaccggctccttttgcttctccttcctgcaggacgtgagttatgtctggtcccaaaacccttgagtaaactagctgagccattgcaaatgaaggtacagatggattgaaacataaaattgtagcttttggtgtccttctgaagggtcagaatatgtaattatttgataaccaaggaagtcaagtcagatggctaagtagtaactttccaatatgatttctccgtggtacttcacctggtggcacttttggggggcaatgttaacaactatcacattttactcatcaagtctctttcatttcggcagtttaaagacacaactgtgggctttctgaggcgatgcccgttgggcaaacttaggtttatgtgtttggtttttcagctgacgtggaagccctgggtgggcgtcccctggctggcctggcttttgggttcaagtctgtatgtatggagtgggttggggccccaaagctttgctgctattgatttgtccccgacagcaggcaaagcctcacattgccctcaattttccccctttcatttgaaggaccagtttttcatggtacttgtcttgatctttttcatagtgttcaaatctgtatttttgtatgtagagggaaataattttctcaacactaatcgttaataactattgtattaaattgtcatgaaggaacttgtttaataaatggacgtgtaagga

SEQ ID NO: 420508 - DNA, 4058 bp, Homo sapiens
tctcatctgtgttcaaaacaaaacagtcatgaagtctttgtgccactgcctgactgtcatcttctccagatcttgtttacagagtaataatgacgttaaacaggtatcagaaaggggaaaaagtttctaggccaagagctgctggtggattctcttgagcagaataacaagttgcttcctgctccagggactgccattagcttgtgaagtctctaggtgccttgttatttcctagtgaagttgcagaatccagggttttttccaggtttgtcttattttatcagcacccacgtccaggcccaacagcttggtaggctggtgaggtccacacacggccaggtctgggagataagggaggaagcagtggcctggaacaccccacctgtctgctatcagcactagacagctcaggctgtcttggaaacgtgtactttgttaactgccttcctgtcctcttgtctttgaaagctgtctcgcgttccacagtcagcttgagggcaagagtgggatgctggggacaggtctttcccgtcctgtgggtgagctcctggcatctggctcaggaacatgtgggtccagcaggtgactctgaagctggcttggctgccatctcagacaggacgcaggcctgacaccctcagcttttagctttgtaaacttccctggcgctttgtagaatcttgtgtttcttctcttctcagcagatatcattcaagtcacaagaactgtctggttgagaaagtaatttaaaatatttgaccttttatgtttcttttatttagaaactgtgagagaaaataccgtcaatatctgttaggtctagaaaaattttcttccgaaagtgaatgttctgtttaattcttcttcatgcaagtgagtggcattttgtacactctttagcttgaagcggagtgggtcctattgtattttcccttcttttgtctggaatatattctttttccatttggatacagtttttcaacctttggggatttttttttcctttctagtttttcctactccacaaacgtaacagtaaggaaaaaatcacccacaaacctgctgagtttgaatcactggcaacttgcctagaaaagttcagatgatgggtccttgaactgtgtatctatttcatagggtaagtttgttgtctatgtttgtttttttatgctgaggctttaattcaggtgacttgctatctagacacctggggtggcgtgttttctttgggatgcataatacacaaaggccagggagcctttggcttggacccccagggagctattgaaacttttaaagtttgagtttaggagtaagaacatatctcagaccaccttagtcagctttgctgatgggatttagggccaggtcagagtttcttttcataactgcctgaaaagagagatggtgtgaaacaagattctgataatggtttgtgtgagatttgatcatagtctaaaactatcacgtctgagttgccttaggatgacagtgctgacacccagtaggaagtatcccatttttatcaggaaagtcagtcacgcgtagggatggtgaggagacgcgtagggatggtgaggaggggagaggagggagacctgctggtgcccttgcaccagggtgaggcctgactcacgctgcttccccccacaggccctgctttgcttgcctgctttttccagaatcgattttgcaagcttcaagattctgttcccctcttcgcagaagtgaggaaggcaaatactcagggtttgaagggagacctggccggcctgagggctggcagatgtgagggcaggacacctgggatggactcgtaggctgacccaggcccaaagggggctgcctgttcccaactctttcactctgtaacccattttaaaatgagtttttgaatcttgcctcaaattgacctacttggataaaatcagtgcttttcctaacttgattttgtttgacgtggttccctctaagagaatggtaggaattgaaactatttgtatatgttgaaatttgtaggggttcaggaacccatggcagaaacactaaactatttatttacaagtatgactatttttttttcaaagtaggcaattctttgtatattttaaggcaaataatcacttcacctctggtgccttccatgcgtcgcataagcactcttgtcaatcatggaattggaaaaaaagatgtacatttagttaaacaagataacactatttttgtagcatgattttagattgtgtccttttaatattgttttcaacaatggtagttttgaggttttggccattttctctttacacttcgtatgtattttaaagaagaaaaaaaacaaaaaaaattccctggctattcctctttcctctctgctgctgcttctcctgcatcttgttcctgcttatttaaatagtctgagagtaagagtatatttctgtgaaataattataagtcagtataattgcatttggcattttttaaccacttgctcagtttggagccactgctcacctcaaacagtacaaagaaagtggttccatattttacaaacagaagagtagcatcagagccctgacctcctgtctttgggtgtaaaatggtgagaggccggtgtccggctccttcccctgtggtttgggctggtgaactgagcccaagtgtattctctggcctgggccccttccagaatcagtgcgagcgtcctgcagaggcatggccttcctgccactgcagagtgggaagcttcctgggggacctcagccagctccggggctctcatcttccactcggatctcagattggttcgttgtggatgctctggctaggctcggcggccttttccaggcttcaggcctgaacaaaacaggctgtttgctgtgaggagctagatgacaccaagacacagacacgtactcttcaccggctccttttgcttctccttcctgcaggacgtgagttatgtctggtcccaaaacccttgagtaaactagctgagccattgcaaatgaaggtacagatggattgaaacataaaattgtagcttttggtgtccttctgaagggtcagaatatgtaattatttgataaccaaggaagtcaagtcagatggctaagtagtaactttccaatatgatttctccgtggtacttcacctggtggcacttttggggggcaatgttaacaactatcacattttactcatcaagtctctttcatttcggcagtttaaagacacaactgtgggctttctgaggcgatgcccgttgggcaaacttaggtttatgtgtttggtttttcagctgacgtggaagccctgggtgggcgtcccctggctggcctggcttttgggttcaagtctgtatgtatggagtgggttggggccccaaagctttgctgctattgatttgtccccgacagcaggcaaagcctcacattgccctcaattttccccctttcatttgaaggaccagtttttcatggtacttgtcttgatctttttcatagtgttcaaatctgtatttttgtatgtagagggaaataattttctcaacactaatcgttaataactattgtattaaattgtcatgaaggaacttgtttaataaatggacgtgtaaggaaaaaaaaaaaaaaaaaaaaaaaaaaaaaaaaaaaacaacaacaaaacaagagacgacacaacagaacgaaacaagaaaacaaaaaaaacaagcagcggtgtgggggccgcgcggcccctcagaagaaagagttagaaacacccacgcgcgggagggcggcggggcgccacagaggaggagagcaaaagacgtgggacacaagggcgcttcacacagaagaagacccccggggcaaaagagaaagagagcgggggggggcgagcacctccccccaaaaagagaaaagacggcgccgcgcggggagacaacacagacgagggcgttgtgagagaaccaaaccaaacagggaggagggagtccgcaggggaggctacaaaaagggggagagccaacaacaagaagggggacgcacaaggggcgcgcgggaggaaaaaaacag

SEQ ID NO: 420509 - DNA, 3208 bp, Homo sapiens
tctcatctgtgttcaaaacaaaacagtcatgaagtctttgtgccactgcctgactgtcatcttctccagatcttgtttacagagtaataatgacgttaaacaggtatcagaaaggggaaaaagtttctaggccaagagctgctggtggattctcttgagcagaataacaagttgcttcctgctccagggactgccattagcttgtgaagtctctaggtgccttgttatttcctagtgaagttgcagaatccagggttttttccaggtttgtcttattttatcagcacccacgtccaggcccaacagcttggtaggctggtgaggtccacacacggccaggtctgggagataagggaggaagcagtggcctggaacaccccacctgtctgctatcagcactagacagctcaggctgtcttggaaacgtgtactttgttaactgccttcctgtcctcttgtctttgaaagctgtctcgcgttccacagtcagcttgagggcaagagtgggatgctggggacaggtctttcccgtcctgtgggtgagctcctggcatctggctcaggaacatgtgggtccagcaggtgactctgaagctggcttggctgccatctcagacaggacgcaggcctgacaccctcagcttttagctttgtaaacttccctggcgctttgtagaatcttgtgtttcttctcttctcagcagatatcattcaagtcacaagaactgtctggttgagaaagtaatttaaaatatttgaccttttatgtttcttttatttagaaactgtgagagaaaataccgtcaatatctgttaggtctagaaaaattttcttccgaaagtgaatgttctgtttaattcttcttcatgcaagtgagtggcattttgtacactctttagcttgaagcggagtgggtcctattgtattttcccttcttttgtctggaatatattctttttccatttggatacagtttttcaacctttggggatttttttttcctttctagtttttcctactccacaaacgtaacagtaaggaaaaaatcacccacaaacctgctgagtttgaatcactggcaacttgcctagaaaagttcagatgatgggtccttgaactgtgtatctatttcatagggtaagtttgttgtctatgtttgtttttttatgctgaggctttaattcaggtgacttgctatctagacacctggggtggcgtgttttctttgggatgcataatacacaaaggccagggagcctttggcttggacccccagggagctattgaaacttttaaagtttgagtttaggagtaagaacatatgtcagagtttcttttcataactgcctgaaaagagagatggtgtgaaacaagattctgataatggtttgtgtgagatttgatcatagtctaaaactatcacgtctgagttgcctgttcccaactctttcactctgtaacccattttaaaatgagtttttgaatcttgcctcaaattgacctacttggataaaatcagtgcttttcctaacttgattttgtttgacgtggttccctctaagagaatggtaggaattgaaactatttgtatatgttgaaatttgtaggggttcaggaacccatggcagaaacactaaactatttatttacaagtatgactatttttttttcaaagtaggcaattctttgtatattttaaggcaaataatcacttcacctctggtgccttccatgcgtcgcataagcactcttgtcaatcatggaattggaaaaaaagatgtacatttagttaaacaagataacactatttttgtagcatgattttagattgtgtccttttaatattgttttcaacaatggtagttttgaggttttggccattttctctttacacttcgtatgtattttaaagaagaaaaaaaacaaaaaaaattccctggctattcctctttcctctctgctgctgcttctcctgcatcttgttcctgcttatttaaatagtctgagagtaagagtatatttctgtgaaataattataagtcagtataattgcatttggcattttttaaccacttgctcagtttggagccactgctcacctcaaacagtacaaagaaagtggttccatattttacaaacagaagagtagcatcagagccctgacctcctgtctttgggtgtaaaatggtgagaggccggtgtccggctccttcccctgtggtttgggctggtgaactgagcccaagtgtattctctggcctgggccccttccagaatcagtgcgagcgtcctgcagaggcatggccttcctgccactgcagagtgggaagcttcctgggggacctcagccagctccggggctctcatcttccactcggatctcagattggttcgttgtggatgctctggctaggctcggcggccttttccaggcttcaggcctgaacaaaacaggctgtttgctgtgaggagctagatgacaccaagacacagacacgtactcttcaccggctccttttgcttctccttcctgcaggacgtgagttatgtctggtcccaaaacccttgagtaaactagctgagccattgcaaatgaaggtacagatggattgaaacataaaattgtagcttttggtgtccttctgaagggtcagaatatgtaattatttgataaccaaggaagtcaagtcagatggctaagtagtaactttccaatatgatttctccgtggtacttcacctggtggcacttttggggggcaatgttaacaactatcacattttactcatcaagtctctttcatttcggcagtttaaagacacaactgtgggctttctgaggcgatgcccgttgggcaaacttaggtttatgtgtttggtttttcagctgacgtggaagccctgggtgggcgtcccctggctggcctggcttttgggttcaagtctgtatgtatggagtgggttggggccccaaagctttgctgctattgatttgtccccgacagcaggcaaagcctcacattgccctcaattttccccctttcatttgaaggaccagtttttcatggtacttgtcttgatctttttcatagtgttcaaatctgtatttttgtatgtagagggaaataattttctcaacactaatcgttaataactattgtattaaattgtcatgaaggaacttgtttaataaatggacgtgtaagga

SEQ ID NO: 420510 - DNA, 2967 bp, Homo sapiens
tctcatctgtgttcaaaacaaaacagtcatgaagtctttgtgccactgcctgactgtcatcttctccagatcttgtttacagagtaataatgacgttaaacaggtatcagaaaggggaaaaagtttctaggccaagagctgctggtggattctcttgagcagaataacaagttgcttcctgctccagggactgccattagcttgtgaagtctctaggtgccttgttatttcctagtgaagttgcagaatccagggttttttccaggtttgtcttattttatcagcacccacgtccaggcccaacagcttggtaggctggtgaggtccacacacggccaggtctgggagataagggaggaagcagtggcctggaacaccccacctgtctgctatcagcactagacagctcaggctgtcttggaaacgtgtactttgttaactgccttcctgtcctcttgtctttgaaagctgtctcgcgttccacagtcagcttgagggcaagagtgggatgctggggacaggtctttcccgtcctgtgggtgagctcctggcatctggctcaggaacatgtgggtccagcaggtgactctgaagctggcttggctgccatctcagacaggacgcaggcctgacaccctcagcttttagctttgtaaacttccctggcgctttgtagaatcttgtgtttcttctcttctcagcagatatcattcaagtcacaagaactgtctggttgagaaagtaatttaaaatatttgaccttttatgtttcttttatttagaaactgtgagagaaaataccgtcaatatctgttaggtctagaaaaattttcttccgaaagtgaatgttctgtttaattcttcttcatgcaagtgagtggcattttgtacactctttagcttgaagcggagtgggtcctattgtattttcccttcttttgtctggaatatattctttttccatttggatacagtttttcaacctttggggatttttttttcctttctagtttttcctactccacaaacgtaacagtaaggaaaaaatcacccacaaacctgctgagtttgaatcactggcaacttgcctagaaaagttcagatgatgggtccttgaactgtgtatctatttcatagggtaagtttgttgtctatgtttgtttttttatgctgaggctttaattcaggtgacttgctatctagacacctggggtggcgtgttttctttgggatgcataatacacaaaggccagggagcctttggcttggacccccagggagctattgaaacttttaaagtttgagtttaggagtaagaacatatctcagaccaccttagtcagctttgctgatgggatttagggccaggtcagagtttcttttcataactgcctgaaaagagagatggtgtgaaacaagattctgataatggtttgtgtgagatttgatcatagtctaaaactatcacgtctgagttgccttaggatgacagtgctgacacccagtaggaagtatcccatttttatcaggaaagtcagtcacgcgtagggatggtgaggagacgcgtagggatggtgaggaggggagaggagggagacctgctggtgcccttgcaccagggtgaggcctgactcacgctgcttccccccacaggccctgctttgcttgcctgctttttccagaatcgattttgcaagcttcaagattctgttcccctcttcgcagaagtgaggaaggcaaatactcagggtttgaagggagacctggccggcctgagggctggcagatgtgagggcaggacacctgggatggactcgtaggctgacccaggcccaaagggggctgcctgttcccaactctttcactctgtaacccattttaaaatgagtttttgaatcttgcctcaaattgacctacttggataaaatcagtgcttttcctaacttgattttgtttgacgtggttccctctaagagaatggtaggaattgaaactatttgtatatgttgaaatttgtaggggttcaggaacccatggcagaaacactaaactatttatttacaagtatgactatttttttttcaaagtaggcaattctttgtatattttaaggcaaataatcacttcacctctggtgccttccatgcgtcgcataagcactcttgtcaatcatggaattggaaaaaaagatgtacatttagttaaacaagataacactatttttgtagcatgattttagattgtgtccttttaatattgttttcaacaatggtagttttgaggttttggccattttctctttacacttcgtatgtattttaaagaagaaaaaaaacaaaaaaaattccctggctattcctctttcctctctgctgctgcttctcctgcatcttgttcctgcttatttaaatagtctgagagtaagagtatatttctgtgaaataattataagtcagtataattgcatttggcattttttaaccacttgctcagtttggagccactgctcacctcaaacagtacaaagaaagtggttccatattttacaaacagaagagtagcatcagagccctgacctcctgtctttgggtgtaaaatggtgagaggccggtgtccggctccttcccctgtggtttgggctggtgaactgagcccaagtgtattctctggcctgggccccttccagaatcagtgcgagcgtcctgcagaggcatggccttcctgccactgcagagtgggaagcttcctgggggacctcagccagctccggggctctcatcttccactcggatctcagattggttcgttgtggatgctctggctaggctcggcggccttttccaggcttcaggcctgaccaggcttcagtacctgaccaggcttcagtgcctgaccaggcttcagtgcctgaccaggcttcagtgcctgaccaggcttcagtgcctgaccaggcttcagtgcctgacc

SEQ ID NO: 420511 - DNA, 1716 bp, Homo sapiens
  misc_feature (1599)..(1599): n is a, c, g, or t
tctcatctgtgttcaaaacaaaacagtcatgaagtctttgtgccactgcctgactgtcatcttctccagatcttgtttacagagtaataatgacgttaaacaggtatcagaaaggggaaaaagtttctaggccaagagctgctggtggattctcttgagcagaataacaagttgcttcctgctccagggactgccattagcttgtgaagtctctaggtgccttgttatttcctagtgaagttgcagaatccagggttttttccaggtttgtcttattttatcagcacccacgtccaggcccaacagcttggtaggctggtgaggtccacacacggccaggtctgggagataagggaggaagcagtggcctggaacaccccacctgtctgctatcagcactagacagctcaggctgtcttggaaacgtgtactttgttaactgccttcctgtcctcttgtctttgaaagctgtctcgcgttccacagtcagcttgagggcaagagtgggatgctggggacaggtctttcccgtcctgtgggtgagctcctggcatctggctcaggaacatgtgggtccagcaggtgactctgaagctggcttggctgccatctcagacaggacgcaggcctgacaccctcagcttttagctttgtaaacttccctggcgctttgtagaatcttgtgtttcttctcttctcagcagatatcattcaagtcacaagaactgtctggttgagaaagtaatttaaaatatttgaccttttatgtttcttttatttagaaactgtgagagaaaataccgtcaatatctgttaggtctagaaaaattttcttccgaaagtgaatgttctgtttaattcttcttcatgcaagtgagtggcattttgtacactctttagcttgaagcggagtgggtcctattgtattttcccttcttttgtctggaatatattctttttccatttggatacagtttttcaacctttggggatttttttttcctttctagtttttcctactccacaaacgtaacagtaaggaaaaaatcacccacaaacctgctgagtttgaatcactggcaacttgcctagaaaagttcagatgatgggtccttgaactgtgtatctatttcatagggtaagtttgttgtctatgtttgtttttttatgctgaggctttaattcaggtgacttgctatctagacacctggggtggcgtgttttctttgggatgcataatacacaaaggccagggagcctttggcttggacccccagggagctattgaaacttttaaagtttgagtttaggagtaagaacatatctcagaccaccttagtcagctttgctgatgggatttagggccaggtcagagtttcttttcataactgcctgaaaagagagatggtgtgaaacaagattctgataatggtttgtgtgagatttgatcatagtctaaaactatcacgtctgagttgccttaggatgacagtgctgacacccagtaggaagtatcccatttttatcaggaaagtcagtcacgcgtagggatggtgaggagacgcgtagggatggtgaggaggggaaaattttttttantttatattttgtatgtttatgagtaatttaggttgttatgtttatagatttttagttgttatatgaaaatattatttttgtataaatagaataatatatgtggagagtggtaaataa

SEQ ID NO: 420512 - DNA, 3411 bp, Homo sapiens
agcggaccgagccgcagccgcagccgggcggcgggcgagaggcggcggcggcgggcgggccgcgggcagtcagtcgggcggcggcggcggcggcggcggcgatgcggcggccccgctgagtccgcccgctcctggcgccgggagccagccgcgcgaggcggcccgggccgggcggcagcatgcggagcggcgaggagctggacggcttcgagggcgaggcctcgagcacctccatgatctcgggcgccagcagcccgtaccagcccaccaccgagccggtgagccagcgccgcgggctggccggcctgcgctgcgaccccgactacctgcgcggcgcgctcggccgcctcaaggtcgcccaagtgatcttggccctgattgcattcatctgcatagagaccatcatggcatgctccccgtgtgaaggcctctacttttttgagtttgtgagctgcagtgcgtttgtggtgactggcgtcttgctgattatgttcagtctcaacctgcacatgaggatcccccagatcaactggaatctgacagatttggtcaacactggactcagcgctttccttttctttattgcttcaatcgtactggctgctttaaaccatagagccggagcagaaattgctgccgtgatatttggcttcttggcgactgcggcatatgcagtgaacacattcctggcagtgcagaaatggagagtcagcgtccgccagcagagcaccaatgactacatccgagcccgcacggagtccagggatgtggacagtcgccctgagatccagcgcctggacactttttcctactccacaaacgtaacagtaaggaaaaaatcacccacaaacctgctgagtttgaatcactggcaacttgcctagaaaagttcagatgatgggtccttgaactgtgtatctatttcatagggtaagtttgttgtctatgtttgtttttttatgctgaggctttaattcaggtgacttgctatctagacacctggggtggcgtgttttctttgggatgcataatacacaaaggccagggagcctttggcttggacccccagggagctattgaaacttttaaagtttgagtttaggagtaagaacatatctcagaccaccttagtcagctttgctgatgggatttagggccaggtcagagtttcttttcataactgcctgaaaagagagatggtgtgaaacaagattctgataatggtttgtgtgagatttgatcatagtctaaaactatcacgtctgagttgccttaggatgacagtgctgacacccagtaggaagtatcccatttttatcaggaaagtcagtcacgcgtagggatggtgaggagacgcgtagggatggtgaggaggggagaggagggagacctgctggtgcccttgcaccagggtgaggcctgactcacgctgcttccccccacaggccctgctttgcttgcctgctttttccagaatcgattttgcaagcttcaagattctgttcccctcttcgcagaagtgaggaaggcaaatactcagggtttgaagggagacctggccggcctgagggctggcagatgtgagggcaggacacctgggatggactcgtaggctgacccaggcccaaagggggctgcctgttcccaactctttcactctgtaacccattttaaaatgagtttttgaatcttgcctcaaattgacctacttggataaaatcagtgcttttcctaacttgattttgtttgacgtggttccctctaagagaatggtaggaattgaaactatttgtatatgttgaaatttgtaggggttcaggaacccatggcagaaacactaaactatttatttacaagtatgactatttttttttcaaagtaggcaattctttgtatattttaaggcaaataatcacttcacctctggtgccttccatgcgtcgcataagcactcttgtcaatcatggaattggaaaaaaagatgtacatttagttaaacaagataacactatttttgtagcatgattttagattgtgtccttttaatattgttttcaacaatggtagttttgaggttttggccattttctctttacacttcgtatgtattttaaagaagaaaaaaaacaaaaaaaattccctggctattcctctttcctctctgctgctgcttctcctgcatcttgttcctgcttatttaaatagtctgagagtaagagtatatttctgtgaaataattataagtcagtataattgcatttggcattttttaaccacttgctcagtttggagccactgctcacctcaaacagtacaaagaaagtggttccatattttacaaacagaagagtagcatcagagccctgacctcctgtctttgggtgtaaaatggtgagaggccggtgtccggctccttcccctgtggtttgggctggtgaactgagcccaagtgtattctctggcctgggccccttccagaatcagtgcgagcgtcctgcagaggcatggccttcctgccactgcagagtgggaagcttcctgggggacctcagccagctccggggctctcatcttccactcggatctcagattggttcgttgtggatgctctggctaggctcggcggccttttccaggcttcaggcctgaacaaaacaggctgtttgctgtgaggagctagatgacaccaagacacagacacgtactcttcaccggctccttttgcttctccttcctgcaggacgtgagttatgtctggtcccaaaacccttgagtaaactagctgagccattgcaaatgaaggtacagatggattgaaacataaaattgtagcttttggtgtccttctgaagggtcagaatatgtaattatttgataaccaaggaagtcaagtcagatggctaagtagtaactttccaatatgatttctccgtggtacttcacctggtggcacttttggggggcaatgttaacaactatcacattttactcatcaagtctctttcatttcggcagtttaaagacacaactgtgggctttctgaggcgatgcccgttgggcaaacttaggtttatgtgtttggtttttcagctgacgtggaagccctgggtgggcgtcccctggctggcctggcttttgggttcaagtctgtatgtatggagtgggttggggccccaaagctttgctgctattgatttgtccccgacagcaggcaaagcctcacattgccctcaattttccccctttcatttgaaggaccagtttttcatggtacttgtcttgatctttttcatagtgttcaaatctgtatttttgtatgtagagggaaataattttctcaacactaatcgttaataactattgtattaaattgtcatgaaggaacttgtttaataaatggacgtgtaagga

SEQ ID NO: 420513 - DNA, 4759 bp, Homo sapiens
  misc_feature (2)..(2): n is a, c, g, or t
  misc_feature (4)..(5): n is a, c, g, or t
  misc_feature (9)..(10): n is a, c, g, or t
  misc_feature (12)..(12): n is a, c, g, or t
  misc_feature (16)..(16): n is a, c, g, or t
  misc_feature (4520)..(4520): n is a, c, g, or t
  misc_feature (4536)..(4536): n is a, c, g, or t
ananngctnncncacngccaagattctacattgctcatctgggcatctgagcctccttcgaagtttcctgtcacaactgtcctcttgacagcatggatgaggaggaagacaatctgtctctgctgaccgcactgctggaagaaaatgagtcagccttggattgtaattcagaagaaaataacttcttgacgcgggaaaatggcgagcccgacgcatttgatgagctctttgatgccgacggcgacggtgaatcttatacagaagaggctgatgatggagaaacaggagagacaagagacgaaaaggaaaatctggccactctctttggagatatggaggacttaacagatgaagaagaagttcccgcatcacagtcaactgaaaatagggtcctccctgctcctgcccccaggcgagagaaaacgaatgaagagttgcaagaggaattaaggaatttgcaagagcaaatgaaggccttacaagagcagctaaaagtaacaacaattaaacagacagcaagcccagcccgtctgcaaaaatcccctgagaagtctccccggccacctcttaaggagaggagagttcagagaattcaggagtcaacatgcttttctgcggagcttgatgtccctgcgctaccaagaaccaagagggtggctcgaacaccaaaggcttcacctccagatcccaaaagctcatcttcaaggatgacaagtgcaccctcccaacccctacagacgatttctcggaacaaacctagtgggataactagaggtcaaattgtggggaccccaggaagttctggggaaacgactcaacccatctgtgtggaagccttctctggtctgcggctcaggcggcctcgagtatcctccacagaaatgaacaagaaaatgaccggccgaaaactgatcagactgtctcagatcaaggaaaagatggccagagagaagctggaagaaatagattgggtgacatttggggttatattgaagaaggttacgccacagagtgtgaatagtggaaaaaccttcagcatatggaaactgaatgatcttcgtgacctgacacaatgtgtgtccttgttcttatttggagaagttcacaaagcgctctggaagacggagcaggggactgtcgtagggatcctcaatgccaaccccatgaagcccaaggatggttcagaggaggtgtgtttatctatcgatcatcctcagaaggtcttaattatgggtgaagctcttgacctgggaacctgtaaagccaagaagaagaatggagagccgtgcacgcagactgtgaatttgcgtgactgtgagtactgtcagtaccatgtccaggctcagtacaagaagctcagcgcaaagcgtgcggatctgcagtccaccttctctggaggacgaattccaaagaagtttgcccgcagaggcaccagcctcaaagaacggctgtgccaagatggcttttactacggaggggtttcttctgcctcgtatgcagcttcaattgcagcagctgtggctcctaagaagaagattcaaaccactctgagtaatctggttgttaagggcacaaacttgatcatccaggaaacacggcaaaaactcggaataccccagaagagcctgtcttgctctgaggagttcaaggaactgatggacctgccgacgtgtggagccaggaacttaaaacaacatttagccaaagccacagcttcagggattatggggagcccaaaaccagccatcaagtccatctcggcctcagcactcttgaagcaacagaagcagcggatgttggagatgaggagaaggaaatcagaagaaatacagaagcgatttctgcagagctcaagtgaagttgagagcccagctgtgccatcttcatcaagacagccccctgctcagcctccacggacaggatccgagttccccaggctggagggagccccggccacaatgacgcccaagctggggcgaggtgtcttggaaggagatgatgttctcttttatgatgagtcaccaccaccaagaccaaaactgagtgctttagcagaagccaaaaagttagctgctatcaccaaattaagggcaaaaggccaggttcttacaaaaacaaacccaaacagcattaagaagaaacaaaaggaccctcaggacatcctggaggtgaaggaacgtgtagaaaaaaacaccatgttttcttctcaagctgaggatgaattggagcctgccaggaaaaaaaggagagaacaacttgcctatctggaatctgaggaatttcagaaaatcctaaaagcaaaatcaaaacacacaggcatcctgaaagaggccgaggctgagatgcaggagcgctactttgagccactggtgaaaaaagaacaaatggaagaaaagatgagaaacatcagagaagtgaagtgccgtgtcgtgacatgcaagacgtgcgcctatacccacttcaagctgctggagacctgcgtcagtgagcagcatgaataccactggcatgatggtgtgaagaggtttttcaaatgtccctgtggaaacagaagcatctccttggacagactcccgaacaagcactgcagtaactgtggcctctacaaatgggaacgggacggaatgctaaaggaaaagactggtccaaagataggaggagaaactctgttaccaagaggagaagaacatgctaaatttctgaacagccttaaataacccgaacttcagacattttcccacagacttcctggcctcctgtgactctggaaagcaaaggattggctgtgtattgtccattgattcctgattgacgccgtcaaaaacaaatgcttgttaagcccataagctttgcctgcttactttctgccattgggttggtttgataccacatttaacattgacatttaagtggaaaaccaagttatcattgtcttttctaagctcagtgtggatgattgcattacttcattcactgaagtttttgcccaaaaattggaaggtaaacagagagctatgtttctgtatcttttggttatagagtgttcacttctttatcataacaaaattctagtgtttatacgaacacccagaggcaaaagaatttggcttaattctcactccaggtaagtagcttaacttctgggcttcagttttctcatctgtaaaatcaggaagattggactaagtgatcctgaaatgtattttttagcactggatttctacaaataataaaactttcccatctagataatgatgatcacatagtcttgatgtacggacattaaaagccagatttcttcattcaattctgttatctctgttttactctttgaaattgatcaagccactgaatcactttgcatttcagtttatatatagagagagaaagaaggctgtctgctcttacattattgtggagccctgtgatagaaatatgtaaaatctcatattattttttttttaatttttttattttttatgacagggtctcactatgtcaccctggctggagtgcagtagtgcgatcgcggcacactgcagccttggcttccctgggctcaagcagtcctcccacctcagtctcccaaatagctaggactacaggcgtgcgtgaccaagcccagctaatttttgcattttttgtagagatggggttttgccatgttgctcaggctggtctcaaactcctgagcactagcaatccacccacctctgtttccaaaaaaaaaaaaaaaatgaaaggtcaacccctatgcaaattaccacagcaaaggtttcattcaggagattcttccatctgggcaacctggttttccaaatatcatttgacctaagtgaatgttgatactagctaaagattgggtaaattggttgaattattgtattgaagcttgagctgtagctaaaagtaatttaggtttcccctaagatgttattatgttagggacataacacttttgggaggttgttgtgggagatggttgatttaggttttcaaaagctagaaataaaatttacatgccttagatttcataaaattctgctctaattgggtggaaggtgctgtatctaacttgtgttcctcctaaggttatgtcctaataactattcttttaggagtatacttctactttatagaaggttgcttttctttttaattttttctaacaaagaaaagaataaagtatttattaataagaaccagaaagcacttgaaactgatgtttttaatggctcatttagggtagatttatttatctcattaacttaaaacagctatgtgtatgaaataggtcacaacagaacttgaacaccaggttggtgtctgagcaatccctttcttatgggaaaaacaatgttcttgtttgaacagagggtatcattgcagtcagtattcacgtgtatattgttatataagttgtataatatgcttgtaaaggctgagggtgagctgtatctggatgcctttttacaatttgattttaacttttaaaataaatttaaaacataatttgccanaccaaaaaaatttttnatacaaaaaaaccatgtcggcccccttggcccagtcgacttttaactcgagccagcttatcatgccgccccaattcgagcttacttggccacatcgccctaagtggagcctattaccaatcacttgcccgcgttttacaccgtcttgacctggaaaaccctgccggtacccaactttaatcccctttcagcaaatccccctttccccagttgccgaataacca

SEQ ID NO: 420514 - DNA, 4538 bp, Homo sapiens
  misc_feature (2)..(2): n is a, c, g, or t
  misc_feature (4)..(5): n is a, c, g, or t
  misc_feature (9)..(10): n is a, c, g, or t
  misc_feature (12)..(12): n is a, c, g, or t
  misc_feature (16)..(16): n is a, c, g, or t
  misc_feature (4299)..(4299): n is a, c, g, or t
  misc_feature (4315)..(4315): n is a, c, g, or t
ananngctnncncacngccaagattctacattgctcatctgggcatctgagcctccttcgaagtttcctgtcacaactgtcctcttgacagcatggatgaggaggaagacaatctgtctctgctgaccgcactgctggaagaaaatgagtcagccttggattgtaattcagaagaaaataacttcttgacgcgggaaaatggcgagcccgacgcatttgatgagctctttgatgccgacggcgacggtgaatcttatacagaagaggctgatgatggagaaacaggagagacaagagacgaaaaggaaaatctggccactctctttggagatatggaggacttaacagatgaagaagaagttcccgcatcacagtcaactgaaaatagggtcctccctgctcctgcccccaggcgagagaaaacgaatgaagagttgcaagaggaattaaggaatttgcaagagcaaatgaaggccttacaagagcagctaaaagtaacaacaattaaacagacagcaagcccagcccgtctgcaaaaatcccctgagaagtctccccggccacctcttaaggagaggagagttcagagaattcaggagtcaacatgcttttctgcggagcttgatgtccctgcgctaccaagaaccaagagggtggctcgaacaccaaaggcttcacctccagatcccaaaagctcatcttcaaggatgacaagtgcaccctcccaacccctacagacgatttctcggaacaaacctagtgggataactagaggtcaaattgtggggaccccaggaagttctggggaaacgactcaacccatctgtgtggaagccttctctggtctgcggctcaggcggcctcgagtatcctccacagaaatgaacaagaaaatgaccggccgaaaactgatcagactgtctcagatcaaggaaaagatggccagagagaagctggaagaaatagattgggtgacatttggggttatattgaagaaggttacgccacagagtgtgaatagtggaaaaaccttcagcatatggaaactgaatgatcttcgtgacctgacacaatgtgtgtccttgttcttatttggagaagttcacaaagcgctctggaagacggagcaggggactgtcgtagggatcctcaatgccaaccccatgaagcccaaggatggttcagaggaggtgtgtttatctatcgatcatcctcagaaggtcttaattatgggtgaagctcttgacctgggaacctgtaaagccaagaagaagaatggagagccgtgcacgcagactgtgaatttgcgtgactgtgagtactgtcagtaccatgtccaggctcagtacaagaagctcagcgcaaagcgtgcggatctgcagtccaccttctctggaggacgaattccaaagaagtttgcccgcagaggcaccagcctcaaagaacggctgtgccaagatggcttttactacggaggggtttcttctgcctcgtatgcagcttcaattgcagcagctgtggctcctaagaagaagattcaaaccactctgagtaatctggttgttaagggcacaaacttgatcatccaggaaacacggcaaaaactcggaataccccagaagagcctgtcttgctctgaggagttcaaggaactgatggacctgccgacgtgtggagccaggaacttaaaacaacatttagccaaagccacagcttcagggattatggggagcccaaaaccagccatcaagtccatctcggcctcagcactcttgaagcaacagaagcagcggatgttggagatgaggagaaggaaatcagaagaaatacagaagcgatttctgcagagctcaagtgaagttgagagcccagctgtgccatcttcatcaagacagccccctgctcagcctccacggacaggatccgagttccccaggctggagggagccccggccacaatgacgcccaagctggggcgaggtgtcttggaaggagatgatgttctcttttatgatgagtcaccaccaccaagaccaaaactgagtgctttagcagaagccaaaaagttagctgctatcaccaaattaagggcaaaaggccaggttcttacaaaaacaaacccaaacagcattaagaagaaacaaaaggaccctcaggacatcctggaggtgaaggaacgtgtagaaaaaaacaccatgttttcttctcaagctgaggatgaattggagcctgccaggaaaaaaaggagagaacaacttgcctatctggaatctgaggaatttcagaaaatcctaaaagcaaaatcaaaacacacaggcatcctgaaagaggccgaggctgagatgcaggagcgctactttgagccactggtgaaaaaagaacaaatggaagaaaagatgagaaacatcagagaagtgaagtgccgtgtcgtgacatgcaagacgtgcgcctatacccacttcaagctgctggagacctgcgtcagtgagcagcatgaataccactggcatgatggtgtgaagaggtttttcaaatgtccctgtggaaacagaagcatctccttggacagactcccgaacaagcactgcagtaactgtggcctctacaaatgggaacgggacggaatgctaaaggaaaagactggtccaaagataggaggagaaactctgttaccaagaggagaagaacatgctaaatttctgaacagccttaaataacccgaacttcagacattttcccacagacttcctggcctcctgtgactctggaaagcaaaggattggctgtgtattgtccattgattcctgattgacgccgtcaaaaacaaatgcttgttaagcccataagctttgcctgcttactttctgccattgggttggtttgataccacatttaacattgacatttaagtggaaaaccaagttatcattgtcttttctaagctcagtgtggatgattgcattacttcattcactgaagtttttgcccaaaaattggaaggtaaacagagagctatgtttctgtatcttttggttatagagtgttcacttctttatcataacaaaattctagtgtttatacgaacacccagaggcaaaagaatttggcttaattctcactccaggtaagtagcttaacttctgggcttcagttttctcatctgtaaaatcaggaagattggactaagtgatcctgaaatgtattttttagcactggatttctacaaataataaaactttcccatctagataatgatgatcacatagtcttgatgtacggacattaaaagccagatttcttcattcaattctgttatctctgttttactctttgaaattgatcaagccactgaatcactttgcatttcagtttatatatagagagagaaagaaggctgtctgctcttacattattgtggagccctgtgatagaaatatgtaaaatctcatattattttttttttaatttttttattttttatgacagggtctcactatgtcaccctggctggagtgcagtagtgcgatcgcggcacactgcagccttggcttccctgggctcaagcagtcctcccacctcagtctcccaaatagctaggactacaggcgtgcgtgaccaagcccagctaatttttgcattttttgtagagatggggttttgccatgttgctcaggctggtctcaaactcctgagcactagcaatccacccacctctgtttccaaaaaaaaaaaaaaaatgaaaggtcaacccctatgcaaattaccacagcaaaggtttcattcaggagattcttccatctgggcaacctggttttccaaatatcatttgacctaagtgaatgttgatactagctaaagattgggtaaattggttgaattattgtattgaagcttgagctgtagctaaaagtaatttaggtttcccctaagatgttattatgttagggacataacacttttgggaggttgttgtgggagatggttgatttaggttttcaaaagctagaaataaaatttacatgccttagatttatttatctcattaacttaaaacagctatgtgtatgaaataggtcacaacagaacttgaacaccaggttggtgtctgagcaatccctttcttatgggaaaaacaatgttcttgtttgaacagagggtatcattgcagtcagtattcacgtgtatattgttatataagttgtataatatgcttgtaaaggctgagggtgagctgtatctggatgcctttttacaatttgattttaacttttaaaataaatttaaaacataatttgccanaccaaaaaaatttttnatacaaaaaaaccatgtcggcccccttggcccagtcgacttttaactcgagccagcttatcatgccgccccaattcgagcttacttggccacatcgccctaagtggagcctattaccaatcacttgcccgcgttttacaccgtcttgacctggaaaaccctgccggtacccaactttaatcccctttcagcaaatccccctttccccagttgccgaataacca

SEQ ID NO: 420515 - DNA, 4852 bp, Homo sapiens
  misc_feature (2)..(2): n is a, c, g, or t
  misc_feature (4)..(5): n is a, c, g, or t
  misc_feature (9)..(10): n is a, c, g, or t
  misc_feature (12)..(12): n is a, c, g, or t
  misc_feature (16)..(16): n is a, c, g, or t
  misc_feature (4613)..(4613): n is a, c, g, or t
  misc_feature (4629)..(4629): n is a, c, g, or t
ananngctnncncacngccaagattctacattgctcatctgggcatctgagcctccttcgaagtttcctgtcacaactgtcctcttgacagcatggatgaggaggaagacaatctgtctctgctgaccgcactgctggaagaaaatgagtcagccttggattgtaattcagaagaaaataacttcttgacgcgggaaaatggcgagcccgacgcatttgatgagctctttgatgccgacggcgacggtgaatcttatacagaagaggctgatgatggagaaacaggagagacaagagacgaaaaggaaaatctggccactctctttggagatatggaggacttaacagatgaagaagaagttcccgcatcacagtcaactgaaaatagggtcctccctgctcctgcccccaggcgagagaaaacgaatgaagagttgcaagaggaattaaggaatttgcaagagcaaatgaaggccttacaagagcagctaaaagtaacaacaattaaacagacagcaagcccagcccgtctgcaaaaatcccctgagaagtctccccggccacctcttaaggagaggagagttcagagaattcaggagtcaacatgcttttctgcggagcttgatgtccctgcgctaccaagaaccaagagggtggctcgaacaccaaaggcttcacctccagatcccaaaagctcatcttcaaggatgacaagtgcaccctcccaacccctacagacgatttctcggaacaaacctagtgggataactagaggtcaaattgtggggaccccaggaagttctggggaaacgactcaacccatctgtgtggaagccttctctggtctgcggctcaggcggcctcgagtatcctccacagaaatgaacaagaaaatgaccggccgaaaactgatcagactgtctcagatcaaggaaaagatggccagagagaagctggaagaaatagattgggtgacatttggggttatattgaagaaggttacgccacagagtgtgaatagtggaaaaaccttcagcatatggaaactgaatgatcttcgtgacctgacacaatgtgtgtccttgttcttatttggagaagttcacaaagcgctctggaagacggagcaggggactgtcgtagggatcctcaatgccaaccccatgaagcccaaggatggttcagaggaggtgtgtttatctatcgatcatcctcagaaggtcttaattatgggtgaagctcttgacctgggaacctgtaaagccaagaagaagaatggagagccgtgcacgcagactgtgaatttgcgtgactgtgagtactgtcagtaccatgtccaggctcagtacaagaagctcagcgcaaagcgtgcggatctgcagtccaccttctctggaggacgaattccaaagaagtttgcccgcagaggcaccagcctcaaagaacggctgtgccaagatggcttttactacggaggggtttcttctgcctcgtatgcagcttcaattgcagcagctgtggctcctaagaagaagattcaaaccactctgagtaatctggttgttaagggcacaaacttgatcatccaggaaacacggcaaaaactcggaataccccagaagagcctgtcttgctctgaggagttcaaggaactgatggacctgccgacgtgtggagccaggaacttaaaacaacatttagccaaagccacagcttcagggattatggggagcccaaaaccagccatcaagtccatctcggcctcagcactcttgaagcaacagaagcagcggatgttggagatgaggagaaggaaatcagaagaaatacagaagcgatttctgcagagctcaagtgaagttgagagcccagctgtgccatcttcatcaagacagccccctgctcagcctccacggacaggatccgagttccccaggctggagggagccccggccacaatgacgcccaagctggggcgaggtgtcttggaaggagatgatgttctcttttatgatgagtcaccaccaccaagaccaaaactgagtgctttagcagaagccaaaaagttagctgctatcaccaaattaagggcaaaaggccaggttcttacaaaaacaaacccaaacagcattaagaagaaacaaaaggaccctcaggacatcctggaggtgaaggaacgtgtagaaaaaaacaccatgttttcttctcaagctgaggatgaattggagcctgccaggaaaaaaaggagagaacaacttgcctatctggaatctgaggaatttcagaaaatcctaaaagcaaaatcaaaacacacaggcatcctgaaagaggccgaggctgagatgcaggagcgctactttgagccactggtgaaaaaagaacaaatggaagaaaagatgagaaacatcagagaagtgaagtgccgtgtcgtgacatgcaagacgtgcgcctatacccacttcaagctgctggagacctgcgtcagtgagcagcatgaataccactggcatgatggtgtgaagaggtttttcaaatgtccctgtggaaacagaagcatctccttggacagactcccgaacaagcactgcagtaactgtggcctctacaaatgggaacgggacggaatgctaaaggtatgccatttgcgtactaatttttgactccttttagtgacccatgctaataatgtggaaccatctcctattaaaatattttcatttttctaggaaaagactggtccaaagataggaggagaaactctgttaccaagaggagaagaacatgctaaatttctgaacagccttaaataacccgaacttcagacattttcccacagacttcctggcctcctgtgactctggaaagcaaaggattggctgtgtattgtccattgattcctgattgacgccgtcaaaaacaaatgcttgttaagcccataagctttgcctgcttactttctgccattgggttggtttgataccacatttaacattgacatttaagtggaaaaccaagttatcattgtcttttctaagctcagtgtggatgattgcattacttcattcactgaagtttttgcccaaaaattggaaggtaaacagagagctatgtttctgtatcttttggttatagagtgttcacttctttatcataacaaaattctagtgtttatacgaacacccagaggcaaaagaatttggcttaattctcactccaggtaagtagcttaacttctgggcttcagttttctcatctgtaaaatcaggaagattggactaagtgatcctgaaatgtattttttagcactggatttctacaaataataaaactttcccatctagataatgatgatcacatagtcttgatgtacggacattaaaagccagatttcttcattcaattctgttatctctgttttactctttgaaattgatcaagccactgaatcactttgcatttcagtttatatatagagagagaaagaaggctgtctgctcttacattattgtggagccctgtgatagaaatatgtaaaatctcatattattttttttttaatttttttattttttatgacagggtctcactatgtcaccctggctggagtgcagtagtgcgatcgcggcacactgcagccttggcttccctgggctcaagcagtcctcccacctcagtctcccaaatagctaggactacaggcgtgcgtgaccaagcccagctaatttttgcattttttgtagagatggggttttgccatgttgctcaggctggtctcaaactcctgagcactagcaatccacccacctctgtttccaaaaaaaaaaaaaaaatgaaaggtcaacccctatgcaaattaccacagcaaaggtttcattcaggagattcttccatctgggcaacctggttttccaaatatcatttgacctaagtgaatgttgatactagctaaagattgggtaaattggttgaattattgtattgaagcttgagctgtagctaaaagtaatttaggtttcccctaagatgttattatgttagggacataacacttttgggaggttgttgtgggagatggttgatttaggttttcaaaagctagaaataaaatttacatgccttagatttcataaaattctgctctaattgggtggaaggtgctgtatctaacttgtgttcctcctaaggttatgtcctaataactattcttttaggagtatacttctactttatagaaggttgcttttctttttaattttttctaacaaagaaaagaataaagtatttattaataagaaccagaaagcacttgaaactgatgtttttaatggctcatttagggtagatttatttatctcattaacttaaaacagctatgtgtatgaaataggtcacaacagaacttgaacaccaggttggtgtctgagcaatccctttcttatgggaaaaacaatgttcttgtttgaacagagggtatcattgcagtcagtattcacgtgtatattgttatataagttgtataatatgcttgtaaaggctgagggtgagctgtatctggatgcctttttacaatttgattttaacttttaaaataaatttaaaacataatttgccanaccaaaaaaatttttnatacaaaaaaaccatgtcggcccccttggcccagtcgacttttaactcgagccagcttatcatgccgccccaattcgagcttacttggccacatcgccctaagtggagcctattaccaatcacttgcccgcgttttacaccgtcttgacctggaaaaccctgccggtacccaactttaatcccctttcagcaaatccccctttccccagttgccgaataacca

SEQ ID NO: 420516 - DNA, 4786 bp, Homo sapiens
  misc_feature (4547)..(4547): n is a, c, g, or t
  misc_feature (4563)..(4563): n is a, c, g, or t
gccaaaggccaagtaagctgaaacgggccgaattttatttttttttgtctcttgtctctcctgtttctccatcatcagcctccttcgaagtttcctgtcacaactgtcctcttgacagcatggatgaggaggaagacaatctgtctctgctgaccgcactgctggaagaaaatgagtcagccttggattgtaattcagaagaaaataacttcttgacgcgggaaaatggcgagcccgacgcatttgatgagctctttgatgccgacggcgacggtgaatcttatacagaagaggctgatgatggagaaacaggagagacaagagacgaaaaggaaaatctggccactctctttggagatatggaggacttaacagatgaagaagaagttcccgcatcacagtcaactgaaaatagggtcctccctgctcctgcccccaggcgagagaaaacgaatgaagagttgcaagaggaattaaggaatttgcaagagcaaatgaaggccttacaagagcagctaaaagtaacaacaattaaacagacagcaagcccagcccgtctgcaaaaatcccctgagaagtctccccggccacctcttaaggagaggagagttcagagaattcaggagtcaacatgcttttctgcggagcttgatgtccctgcgctaccaagaaccaagagggtggctcgaacaccaaaggcttcacctccagatcccaaaagctcatcttcaaggatgacaagtgcaccctcccaacccctacagacgatttctcggaacaaacctagtgggataactagaggtcaaattgtggggaccccaggaagttctggggaaacgactcaacccatctgtgtggaagccttctctggtctgcggctcaggcggcctcgagtatcctccacagaaatgaacaagaaaatgaccggccgaaaactgatcagactgtctcagatcaaggaaaagatggccagagagaagctggaagaaatagattgggtgacatttggggttatattgaagaaggttacgccacagagtgtgaatagtggaaaaaccttcagcatatggaaactgaatgatcttcgtgacctgacacaatgtgtgtccttgttcttatttggagaagttcacaaagcgctctggaagacggagcaggggactgtcgtagggatcctcaatgccaaccccatgaagcccaaggatggttcagaggaggtgtgtttatctatcgatcatcctcagaaggtcttaattatgggtgaagctcttgacctgggaacctgtaaagccaagaagaagaatggagagccgtgcacgcagactgtgaatttgcgtgactgtgagtactgtcagtaccatgtccaggctcagtacaagaagctcagcgcaaagcgtgcggatctgcagtccaccttctctggaggacgaattccaaagaagtttgcccgcagaggcaccagcctcaaagaacggctgtgccaagatggcttttactacggaggggtttcttctgcctcgtatgcagcttcaattgcagcagctgtggctcctaagaagaagattcaaaccactctgagtaatctggttgttaagggcacaaacttgatcatccaggaaacacggcaaaaactcggaataccccagaagagcctgtcttgctctgaggagttcaaggaactgatggacctgccgacgtgtggagccaggaacttaaaacaacatttagccaaagccacagcttcagggattatggggagcccaaaaccagccatcaagtccatctcggcctcagcactcttgaagcaacagaagcagcggatgttggagatgaggagaaggaaatcagaagaaatacagaagcgatttctgcagagctcaagtgaagttgagagcccagctgtgccatcttcatcaagacagccccctgctcagcctccacggacaggatccgagttccccaggctggagggagccccggccacaatgacgcccaagctggggcgaggtgtcttggaaggagatgatgttctcttttatgatgagtcaccaccaccaagaccaaaactgagtgctttagcagaagccaaaaagttagctgctatcaccaaattaagggcaaaaggccaggttcttacaaaaacaaacccaaacagcattaagaagaaacaaaaggaccctcaggacatcctggaggtgaaggaacgtgtagaaaaaaacaccatgttttcttctcaagctgaggatgaattggagcctgccaggaaaaaaaggagagaacaacttgcctatctggaatctgaggaatttcagaaaatcctaaaagcaaaatcaaaacacacaggcatcctgaaagaggccgaggctgagatgcaggagcgctactttgagccactggtgaaaaaagaacaaatggaagaaaagatgagaaacatcagagaagtgaagtgccgtgtcgtgacatgcaagacgtgcgcctatacccacttcaagctgctggagacctgcgtcagtgagcagcatgaataccactggcatgatggtgtgaagaggtttttcaaatgtccctgtggaaacagaagcatctccttggacagactcccgaacaagcactgcagtaactgtggcctctacaaatgggaacgggacggaatgctaaaggaaaagactggtccaaagataggaggagaaactctgttaccaagaggagaagaacatgctaaatttctgaacagccttaaataacccgaacttcagacattttcccacagacttcctggcctcctgtgactctggaaagcaaaggattggctgtgtattgtccattgattcctgattgacgccgtcaaaaacaaatgcttgttaagcccataagctttgcctgcttactttctgccattgggttggtttgataccacatttaacattgacatttaagtggaaaaccaagttatcattgtcttttctaagctcagtgtggatgattgcattacttcattcactgaagtttttgcccaaaaattggaaggtaaacagagagctatgtttctgtatcttttggttatagagtgttcacttctttatcataacaaaattctagtgtttatacgaacacccagaggcaaaagaatttggcttaattctcactccaggtaagtagcttaacttctgggcttcagttttctcatctgtaaaatcaggaagattggactaagtgatcctgaaatgtattttttagcactggatttctacaaataataaaactttcccatctagataatgatgatcacatagtcttgatgtacggacattaaaagccagatttcttcattcaattctgttatctctgttttactctttgaaattgatcaagccactgaatcactttgcatttcagtttatatatagagagagaaagaaggctgtctgctcttacattattgtggagccctgtgatagaaatatgtaaaatctcatattattttttttttaatttttttattttttatgacagggtctcactatgtcaccctggctggagtgcagtagtgcgatcgcggcacactgcagccttggcttccctgggctcaagcagtcctcccacctcagtctcccaaatagctaggactacaggcgtgcgtgaccaagcccagctaatttttgcattttttgtagagatggggttttgccatgttgctcaggctggtctcaaactcctgagcactagcaatccacccacctctgtttccaaaaaaaaaaaaaaaatgaaaggtcaacccctatgcaaattaccacagcaaaggtttcattcaggagattcttccatctgggcaacctggttttccaaatatcatttgacctaagtgaatgttgatactagctaaagattgggtaaattggttgaattattgtattgaagcttgagctgtagctaaaagtaatttaggtttcccctaagatgttattatgttagggacataacacttttgggaggttgttgtgggagatggttgatttaggttttcaaaagctagaaataaaatttacatgccttagatttcataaaattctgctctaattgggtggaaggtgctgtatctaacttgtgttcctcctaaggttatgtcctaataactattcttttaggagtatacttctactttatagaaggttgcttttctttttaattttttctaacaaagaaaagaataaagtatttattaataagaaccagaaagcacttgaaactgatgtttttaatggctcatttagggtagatttatttatctcattaacttaaaacagctatgtgtatgaaataggtcacaacagaacttgaacaccaggttggtgtctgagcaatccctttcttatgggaaaaacaatgttcttgtttgaacagagggtatcattgcagtcagtattcacgtgtatattgttatataagttgtataatatgcttgtaaaggctgagggtgagctgtatctggatgcctttttacaatttgattttaacttttaaaataaatttaaaacataatttgccanaccaaaaaaatttttnatacaaaaaaaccatgtcggcccccttggcccagtcgacttttaactcgagccagcttatcatgccgccccaattcgagcttacttggccacatcgccctaagtggagcctattaccaatcacttgcccgcgttttacaccgtcttgacctggaaaaccctgccggtacccaactttaatcccctttcagcaaatccccctttccccagttgccgaataacca

SEQ ID NO: 420517 - DNA, 3273 bp, Homo sapiens
gccaaaggccaagtaagctgaaacgggccgaattttatttttttttgtctcttgtctctcctgtttctccatcatcagcctccttcgaagtttcctgtcacaactgtcctcttgacagcatggatgaggaggaagacaatctgtctctgctgaccgcactgctggaagaaaatgagtcagccttggattgtaattcagaagaaaataacttcttgacgcgggaaaatggcgagcccgacgcatttgatgagctctttgatgccgacggcgacggtgaatcttatacagaagaggctgatgatggagaaacaggagagacaagagacgaaaaggaaaatctggccactctctttggagatatggaggacttaacagatgaagaagaagttcccgcatcacagtcaactgaaaatagggtcctccctgctcctgcccccaggcgagagaaaacgaatgaagagttgcaagaggaattaaggaatttgcaagagcaaatgaaggccttacaagagcagctaaaagtaacaacaattaaacagacagcaagcccagcccgtctgcaaaaatcccctgagaagtctccccggccacctcttaaggagaggagagttcagagaattcaggagtcaacatgcttttctgcggagcttgatgtccctgcgctaccaagaaccaagagggtggctcgaacaccaaaggcttcacctccagatcccaaaagctcatcttcaaggatgacaagtgcaccctcccaacccctacagacgatttctcggaacaaacctagtgggataactagaggtcaaattgtggggaccccaggaagttctggggaaacgactcaacccatctgtgtggaagccttctctggtctgcggctcaggcggcctcgagtatcctccacagaaatgaacaagaaaatgaccggccgaaaactgatcagactgtctcagatcaaggaaaagatggccagagagaagctggaagaaatagattgggtgacatttggggttatattgaagaaggttacgccacagagtgtgaatagtggaaaaaccttcagcatatggaaactgaatgatcttcgtgacctgacacaatgtgtgtccttgttcttatttggagaagttcacaaagcgctctggaagacggagcaggggactgtcgtagggatcctcaatgccaaccccatgaagcccaaggatggttcagaggaggtgtgtttatctatcgatcatcctcagaaggtcttaattatgggtgaagctcttgacctgggaacctgtaaagccaagaagaagaatggagagccgtgcacgcagactgtgaatttgcgtgactgtgagtactgtcagtaccatgtccaggctcagtacaagaagctcagcgcaaagcgtgcggatctgcagtccaccttctctggaggacgaattccaaagaagtttgcccgcagaggcaccagcctcaaagaacggctgtgccaagatggcttttactacggaggggtttcttctgcctcgtatgcagcttcaattgcagcagctgtggctcctaagaagaagattcaaaccactctgagtaatctggttgttaagggcacaaacttgatcatccaggaaacacggcaaaaactcggaataccccagaagagcctgtcttgctctgaggagttcaaggaactgatggacctgccgacgtgtggagccaggaacttaaaacaacatttagccaaagccacagcttcagggattatggggagcccaaaaccagccatcaagtccatctcggcctcagcactcttgaagcaacagaagcagcggatgttggagatgaggagaaggaaatcagaagaaatacagaagcgatttctgcagagctcaagtgaagttgagagcccagctgtgccatcttcatcaagacagccccctgctcagcctccacggacaggatccgagttccccaggctggagggagccccggccacaatgacgcccaagctggggcgaggtgtcttggaaggagatgatgttctcttttatgatgagtcaccaccaccaagaccaaaactgagtgctttagcagaagccaaaaagttagctgctatcaccaaattaagggcaaaaggccaggttcttacaaaaacaaacccaaacagcattaagaagaaacaaaaggaccctcaggacatcctggaggtgaaggaacgtgtagaaaaaaacaccatgttttcttctcaagctgaggatgaattggagcctgccaggaaaaaaaggagagaacaacttgcctatctggaatctgaggaatttcagaaaatcctaaaagcaaaatcaaaacacacaggcatcctgaaagaggccgaggctgagatgcaggagcgctactttgagccactggtgaaaaaagaacaaatggaagaaaagatgagaaacatcagagaagtgaagtgccgtgtcgtgacatgcaagacgtgcgcctatacccacttcaagctgctggagacctgcgtcagtgagcagcatgaataccactggcatgatggtgtgaagaggtttttcaaatgtccctgtggaaacagaagcatctccttggacagactcccgaacaagcactgcagtaactgtggcctctacaaatgggaacgggacggaatgctaaaggaaaagactggtccaaagataggaggagaaactctgttaccaagaggagaagaacatgctaaatttctgaacagccttaaataacccgaacttcagacattttcccacagacttcctggcctcctgtgactctggaaagcaaaggattggctgtgtattgtccattgattcctgattgacgccgtcaaaaacaaatgcttgttaagcccataagctttgcctgcttactttctgccattgggttggtttgataccacatttaacattgacatttaagtggaaaaccaagttatcattgtcttttctaagctcagtgtggatgattgcattacttcattcactgaagtttttgcccaaaaattggaaggtaaacagagagctatgtttctgtatcttttggttatagagtgttcacttctttatcataacaaaattctagtgtttatacgaacacccagaggcaaaagaatttggcttaattctcactccaggtaagtagcttaacttctgggcttcagttttctcatctgtaaaatcaggaagattggactaagtgatcctgaaatgtattttttagcactggatttctacaaataataaaactttcccatct

SEQ ID NO: 420518 - DNA, 3332 bp, Homo sapiens
gccaaaggccaagtaagctgaaacgggccgaattttatttttttttgtctcttgtctctcctgtttctccatcatcagcctccttcgaagtttcctgtcacaactgtcctcttgacagcatggatgaggaggaagacaatctgtctctgctgaccgcactgctggaagaaaatgagtcagccttggattgtaattcagaagaaaataacttcttgacgcgggaaaatggcgagcccgacgcatttgatgagctctttgatgccgacggcgacggtgaatcttatacagaagaggctgatgatggagaaacaggagagacaagagacgaaaaggaaaatctggccactctctttggagatatggaggacttaacagatgaagaagaagttcccgcatcacagtcaactgaaaatagggtcctccctgctcctgcccccaggcgagagaaaacgaatgaagagttgcaagaggaattaaggaatttgcaagagcaaatgaaggccttacaagagcagctaaaagtaacaacaattaaacagacagcaagcccagcccgtctgcaaaaatcccctgagaagtctccccggccacctcttaaggagaggagagttcagagaattcaggagtcaacatgcttttctgcggagcttgatgtccctgcgctaccaagaaccaagagggtggctcgaacaccaaaggcttcacctccagatcccaaaagctcatcttcaaggatgacaagtgcaccctcccaacccctacagacgatttctcggaacaaacctagtgggataactagaggtcaaattgtggggaccccaggaagttctggggaaacgactcaacccatctgtgtggaagccttctctggtctgcggctcaggcggcctcgagtatcctccacagaaatgaacaagaaaatgaccggccgaaaactgatcagactgtctcagatcaaggaaaagatggccagagagaagctggaagaaatagattgggtgacatttggggttatattgaagaaggttacgccacagagtgtgaatagtggaaaaaccttcagcatatggaaactgaatgatcttcgtgacctgacacaatgtgtgtccttgttcttatttggagaagttcacaaagcgctctggaagacggagcaggggactgtcgtagggatcctcaatgccaaccccatgaagcccaaggatggttcagaggaggtgtgtttatctatcgatcatcctcagaaggtcttaattatgggtgaagctcttgacctgggaacctgtaaagccaagaagaagaatggagagccgtgcacgcagactgtgaatttgcgtgactgtgagtactgtcagtaccatgtccaggctcagtacaagaagctcagcgcaaagcgtgcggatctgcagtccaccttctctggaggacgaattccaaagaagtttgcccgcagaggcaccagcctcaaagaacggctgtgccaagatggcttttactacggaggggtttcttctgcctcgtatgcagcttcaattgcagcagctgtggctcctaagaagaagattcaaaccactctgagtaatctggttgttaagggcacaaacttgatcatccaggaaacacggcaaaaactcggaataccccagaagagcctgtcttgctctgaggagttcaaggaactgatggacctgccgacgtgtggagccaggaacttaaaacaacatttagccaaagccacagcttcagggattatggggagcccaaaaccagccatcaagtccatctcggcctcagcactcttgaagcaacagaagcagcggatgttggagatgaggagaaggaaatcagaagaaatacagaagcgatttctgcagagctcaagtgaagttgagagcccagctgtgccatcttcatcaagacagccccctgctcagcctccacggacaggatccgagttccccaggctggagggagccccggccacaatgacgcccaagctggggcgaggtgtcttggaaggagatgatgttctcttttatgatgagtcaccaccaccaagaccaaaactgagtgctttagcagaagccaaaaagttagctgctatcaccaaattaagggcaaaaggccaggttcttacaaaaacaaacccaaacagcattaagaagaaacaaaaggaccctcaggacatcctggaggtgaaggaacgtgtagaaaaaaacaccatgttttcttctcaagctgaggatgaattggagcctgccaggaaaaaaaggagagaacaacttgcctatctggaatctgaggaatttcagaaaatcctaaaagcaaaatcaaaacacacaggcatcctgaaagaggccgaggctgagatgcaggagcgctactttgagccactggtgaaaaaagaacaaatggaagaaaagatgagaaacatcagagaagtgaagtgccgtgtcgtgacatgcaagacgtgcgcctatacccacttcaagctgctggagacctgcgtcagtgagcagcatgaataccactggcatgatggtgtgaagaggtttttcaaatgtccctgtggaaacagaagcatctccttggacagactcccgaacaagcactgcagtaactgtggcctctacaaatgggaacgggacggaatgctaaaggaaaagactggtccaaagataggaggagaaactctgttaccaagaggagaagaacatgctaaatttctgaacagccttaaataacccgaacttcagacattttcccacagacttcctggcctcctgtgactctggaaagcaaaggattggctgtgtattgtccattgattcctgattgacgccgtcaaaaacaaatgcttgttaagcccataagctttgcctgcttactttctgccattgggttggtttgataccacatttaacattgacatttaagtggaaaaccaagttatcattgtcttttctaagctcagtgtggatgattgcattacttcattcactgaagtttttgcccaaaaattggaaggtaaacagagagctatgtttctgtatcttttggttatagagtgttcacttctttatcataacaaaattctagtgtttatacgaacacccagaggcaaaagaatttggcttaattctcactccaggtaagtagcttaacttctgggcttcagttttctcatctgtaaaatcaggaagattggactaagtgatcctgaaatgtattttttagcactggatttctacaaataataaaactttcccatctagataatgatgatcacatagtcttgatgtacggacattaaaagccagatttcttcattc

SEQ ID NO: 420519 - DNA, 1487 bp, Homo sapiens
cgactgaaagatgggggctggagagagggtgcaggccccacctagggcggaggccacagcagggagaggggcagacagagccaggaccctggaaggaagcaggatggcagccggaacagcagttggagcctgggtgctggtcctcagtctgtggggggcagtagtaggtgctcaaaacatcacagcccggattggcgagccactggtgctgaagtgtaagggggcccccaagaaaccaccccagcggctggaatggaaactgaacacaggccggacagaagcttggaaggtcctgtctccccagggaggaggcccctgggacagtgtggctcgtgtccttcccaacggctccctcttccttccggctgtcgggatccaggatgaggggattttccggtgccaggcaatgaacaggaatggaaaggagaccaagtccaactaccgagtccgtgtctaccagattcctgggaagccagaaattgtagattctgcctctgaactcacggctggtgttcccaataaggtggggacatgtgtgtcagagggaagctaccctgcagggactcttagctggcacttggatgggaagcccctggtgcctaatgagaagggagtatctgtgaaggaacagaccaggagacaccctgagacagggctcttcacactgcagtcggagctaatggtgaccccagcccggggaggagatccccgtcccaccttctcctgtagcttcagcccaggccttccccgacaccgggccttgcgcacagccccatccagccccgtgtctgggagcctgtgcctctggaggaggtccaattggtggtggagccagaaggtggagcagtagctcctggtggaaccgtaaccctgacctgtgaagtccctgcccagccctctcctcaaatccactggatgaaggatggtgtgcccttgccccttccccccagccctgtgctgatcctccctgagatagggcctcaggaccagggaacctacagctgtgtggccacccattccagccacgggccccaggaaagccgtgctgtcagcatcagcatcatcgaaccaggcgaggaggggccaactgcaggctctgtgggaggatcagggctgggaactctagccctggccctggggatcctgggaggcctggggacagccgccctgctcattggggtcatcttgtggcaaaggcggcaacgccgaggagaggagaggaaggccccagaaaaccaggaggaagaggaggagcgtgcagaactgaatcagtcggaggaacctgaggcaggcgagagtagtactggagggccttgaggggcccacagacagatcccatccatcagctcccttttctttttcccttgaactgttctggcctcagaccaactctctcctgtataatctctctcctgtataaccccaccttgccaagctttcttctacaaccagagccccccacaatgatgattaaacacctgacacat

SEQ ID NO: 420520 - DNA, 1769 bp, Homo sapiens
cgactgaaagatgggggctggagagagggtgcaggccccacctagggcggaggccacagcagggagaggggcagacagagccaggaccctggaaggaagcaggatggcagccggaacagcagttggagcctgggtgctggtcctcagtctgtggggggcagtagtaggtgctcaaaacatcacagcccggattggcgagccactggtgctgaagtgtaagggggcccccaagaaaccaccccagcggctggaatggaaactgaacacaggccggacagaagcttggaaggtcctgtctccccagggaggaggcccctgggacagtgtggctcgtgtccttcccaacggctccctcttccttccggctgtcgggatccaggatgaggggattttccggtgccaggcaatgaacaggaatggaaaggagaccaagtccaactaccgagtccgtgtctaccagattcctgggaagccagaaattgtagattctgcctctgaactcacggctggtgttcccaataaggtggggacatgtgtgtcagagggaagctaccctgcagggactcttagctggcacttggatgggaagcccctggtgcctaatgagaagggagtatctgtgaaggaacagaccaggagacaccctgagacagggctcttcacactgcagtcggagctaatggtgaccccagcccggggaggagatccccgtcccaccttctcctgtagcttcagcccaggccttccccgacaccgggccttgcgcacagccccatccagccccgtgtctgggagcctgtgcctctggaggaggtccaattggtggtggagccagaaggtggagcagtagctcctggtggaaccgtaaccctgacctgtgaagtccctgcccagccctctcctcaaatccactggatgaaggatggtgtgcccttgccccttccccccagccctgtgctgatcctccctgagatagggcctcaggaccagggaacctacagctgtgtggccacccattccagccacgggccccaggaaagccgtgctgtcagcatcagcatcatcgaaccaggcgaggaggggccaactgcaggctctgtgggaggatcagggctgggaactctagccctggccctggggatcctgggaggcctggggacagccgccctgctcattggggtcatcttgtggcaaaggcggcaacgccgaggagaggagaggaaggccccagaaaaccaggaggaagaggaggagcgtgcagaactgaatcagtcggaggaacctgaggcaggcgagagtagtactggagggccttgaggggcccacagacagatcccatccatcagctcccttttctttttcccttgaactgttctggcctcagaccaactctctcctgtataatctctctcctgtataaccccaccttgccaagctttcttctacaaccagagccccccacaatgatgattaaacacctgacacattataagaacagtccgacaagatggtcataaatcggaactttttcgggcgactcgtgctctccacaaagttgtttaaacccactccgggagggccggggcgccccctttccttggcacagcggccaacacgctgtccatggagagcctccgtggcttccagaaggtggcgggccttccacggagtaaaaagccccgggcgcaagtcgagttttcgaccaaatccatgaaggtacggagagaccacgggtcttcacagggttcccgcagaatccattcattgcg

SEQ ID NO: 420521 - DNA, 1442 bp, Homo sapiens
cgactgaaagatgggggctggagagagggtgcaggccccacctagggcggaggccacagcagggagaggggcagacagagccaggaccctggaaggaagcaggatggcagccggaacagcagttggagcctgggtgctggtcctcagtctgtggggggcagtagtaggtgctcaaaacatcacagcccggattggcgagccactggtgctgaagtgtaagggggcccccaagaaaccaccccagcggctggaatggaaactgaacacaggccggacagaagcttggaaggtcctgtctccccagggaggaggcccctgggacagtgtggctcgtgtccttcccaacggctccctcttccttccggctgtcgggatccaggatgaggggattttccggtgccaggcaatgaacaggaatggaaaggagaccaagtccaactaccgagtccgtgtctaccagattcctgggaagccagaaattgtagattctgcctctgaactcacggctggtgttcccaataaggtggggacatgtgtgtcagagggaagctaccctgcagggactcttagctggcacttggatgggaagcccctggtgcctaatgagaagggagtatctgtgaaggaacagaccaggagacaccctgagacagggctcttcacactgcagtcggagctaatggtgaccccagcccggggaggagatccccgtcccaccttctcctgtagcttcagcccaggccttccccgacaccgggccttgcgcacagccccatccagccccgtgtctgggagcctgtgcctctggaggaggtccaattggtggtggagccagaaggtggagcagtagctcctggtggaaccgtaaccctgacctgtgaagtccctgcccagccctctcctcaaatccactggatgaaggatggtgtgcccttgccccttccccccagccctgtgctgatcctccctgagatagggcctcaggaccagggaacctacagctgtgtggccacccattccagccacgggccccaggaaagccgtgctgtcagcatcagcatcatcgaaccaggcgaggaggggccaactgcaggtgaggggtttgataaagtcagggaagcagaagatagcccccaacacatgtgactggggggatggtcaacaagaaaggaatggaaggccccagaaaaccaggaggaagaggaggagcgtgcagaactgaatcagtcggaggaacctgaggcaggcgagagtagtactggagggccttgaggggcccacagacagatcccatccatcagctcccttttctttttcccttgaactgttctggcctcagaccaactctctcctgtataatctctctcctgtataaccccaccttgccaagctttcttctacaaccagagccccccacaatgatgattaaacacctgacacat

SEQ ID NO: 420522 - DNA, 1539 bp, Homo sapiens
cgactgaaagatgggggctggagagagggtgcaggccccacctagggcggaggccacagcagggagaggggcagacagagccaggaccctggaaggaagcaggatggcagccggaacagcagttggagcctgggtgctggtcctcagtctgtggggggcagtagtaggtgctcaaaacatcacagcccggattggcgagccactggtgctgaagtgtaagggggcccccaagaaaccaccccagcggctggaatggaaactgaacacaggccggacagaagcttggaaggtcctgtctccccagggaggaggcccctgggacagtgtggctcgtgtccttcccaacggctccctcttccttccggctgtcgggatccaggatgaggggattttccggtgccaggcaatgaacaggaatggaaaggagaccaagtccaactaccgagtccgtgtctaccagtttgagaaccttcacaattacagcctctgactggatttttcctccttcagagattcctgggaagccagaaattgtagattctgcctctgaactcacggctggtgttcccaataaggtggggacatgtgtgtcagagggaagctaccctgcagggactcttagctggcacttggatgggaagcccctggtgcctaatgagaagggagtatctgtgaaggaacagaccaggagacaccctgagacagggctcttcacactgcagtcggagctaatggtgaccccagcccggggaggagatccccgtcccaccttctcctgtagcttcagcccaggccttccccgacaccgggccttgcgcacagccccatccagccccgtgtctgggagcctgtgcctctggaggaggtccaattggtggtggagccagaaggtggagcagtagctcctggtggaaccgtaaccctgacctgtgaagtccctgcccagccctctcctcaaatccactggatgaaggatggtgtgcccttgccccttccccccagccctgtgctgatcctccctgagatagggcctcaggaccagggaacctacagctgtgtggccacccattccagccacgggccccaggaaagccgtgctgtcagcatcagcatcatcgaaccaggcgaggaggggccaactgcaggctctgtgggaggatcagggctgggaactctagccctggccctggggatcctgggaggcctggggacagccgccctgctcattggggtcatcttgtggcaaaggcggcaacgccgaggagaggagaggaaggccccagaaaaccaggaggaagaggaggagcgtgcagaactgaatcagtcggaggaacctgaggcaggcgagagtagtactggagggccttgaggggcccacagacagatcccatccatcagctcccttttctttttcccttgaactgttctggcctcagaccaactctctcctgtataatctctctcctgtataaccccaccttgccaagctttcttctacaaccagagccccccacaatgatgattaaacacctgacacat

SEQ ID NO: 420523 - DNA, 1332 bp, Homo sapiens
cgactgaaagatgggggctggagagagggtgcaggccccacctagggcggaggccacagcagggagaggggcagacagagccaggaccctggaaggaagcaggatggcagccggaacagcagttggagcctgggtgctggtcctcagtctgtggggggcagtagtaggtgctcaaaacatcacagcccggattggcgagccactggtgctgaagtgtaagggggcccccaagaaaccaccccagcggctggaatggaaactgggaggaggcccctgggacagtgtggctcgtgtccttcccaacggctccctcttccttccggctgtcgggatccaggatgaggggattttccggtgccaggcaatgaacaggaatggaaaggagaccaagtccaactaccgagtccgtgtctaccagattcctgggaagccagaaattgtagattctgcctctgaactcacggctggtgttcccaataaggtggggacatgtgtgtcagagggaagctaccctgcagggactcttagctggcacttggatgggaagcccctggtgcctaatgagaagggagtatctgtgaaggaacagaccaggagacaccctgagacagggctcttcacactgcagtcggagctaatggtgaccccagcccggggaggagatccccgtcccaccttctcctgtagcttcagcccaggccttccccgacaccgggccttgcgcacagccccatccagccccgtgtctgggagcctgtgcctctggaggaggtccaattggtggtggagccagaaggtggagcagtagctcctggtggaaccgtaaccctgacctgtgaagtccctgcccagccctctcctcaaatccactggatgaaggatgtgagtgacctggagagaggggctgggagaaccaggcgaggaggggccaactgcaggctctgtgggaggatcagggctgggaactctagccctggccctggggatcctgggaggcctggggacagccgccctgctcattggggtcatcttgtggcaaaggcggcaacgccgaggagaggagaggaaggccccagaaaaccaggaggaagaggaggagcgtgcagaactgaatcagtcggaggaacctgaggcaggcgagagtagtactggagggccttgaggggcccacagacagatcccatccatcagctcccttttctttttcccttgaactgttctggcctcagaccaactctctcctgtataatctctctcctgtataaccccaccttgccaagctttcttctacaaccagagccccccacaatgatgattaaacacctgacacat

SEQ ID NO: 420524 - DNA, 1670 bp, Homo sapiens
cgactgaaagatgggggctggagagagggtgcaggccccacctagggcggaggccacagcagggagaggggcagacagagccaggaccctggaaggaagcaggatggcagccggaacagcagttggagcctgggtgctggtcctcagtctgtggggtgagccactccctcaaccccactgaccctccctgcagaaagcactttaaccccacaccccagtcgtcctagaacttttcccagaacccgaggaagtgcctttcaaggtccctcacccaccctgtccaaattttgttagccctcattcccttcctacccctctaccatggtgctatctcccaggggcagtagtaggtgctcaaaacatcacagcccggattggcgagccactggtgctgaagtgtaagggggcccccaagaaaccaccccagcggctggaatggaaactgaacacaggccggacagaagcttggaaggtcctgtctccccagggaggaggcccctgggacagtgtggctcgtgtccttcccaacggctccctcttccttccggctgtcgggatccaggatgaggggattttccggtgccaggcaatgaacaggaatggaaaggagaccaagtccaactaccgagtccgtgtctaccagattcctgggaagccagaaattgtagattctgcctctgaactcacggctggtgttcccaataaggtggggacatgtgtgtcagagggaagctaccctgcagggactcttagctggcacttggatgggaagcccctggtgcctaatgagaagggagtatctgtgaaggaacagaccaggagacaccctgagacagggctcttcacactgcagtcggagctaatggtgaccccagcccggggaggagatccccgtcccaccttctcctgtagcttcagcccaggccttccccgacaccgggccttgcgcacagccccatccagccccgtgtctgggagcctgtgcctctggaggaggtccaattggtggtggagccagaaggtggagcagtagctcctggtggaaccgtaaccctgacctgtgaagtccctgcccagccctctcctcaaatccactggatgaaggatggtgtgcccttgccccttccccccagccctgtgctgatcctccctgagatagggcctcaggaccagggaacctacagctgtgtggccacccattccagccacgggccccaggaaagccgtgctgtcagcatcagcatcatcgaaccaggcgaggaggggccaactgcaggctctgtgggaggatcagggctgggaactctagccctggccctggggatcctgggaggcctggggacagccgccctgctcattggggtcatcttgtggcaaaggcggcaacgccgaggagaggagaggaaggccccagaaaaccaggaggaagaggaggagcgtgcagaactgaatcagtcggaggaacctgaggcaggcgagagtagtactggagggccttgaggggcccacagacagatcccatccatcagctcccttttctttttcccttgaactgttctggcctcagaccaactctctcctgtataatctctctcctgtataaccccaccttgccaagctttcttctacaaccagagccccccacaatgatgattaaacacctgacacat

SEQ ID NO: 420525 - DNA, 1535 bp, Homo sapiens
cgactgaaagatgggggctggagagagggtgcaggccccacctagggcggaggccacagcagggagaggggcagacagagccaggaccctggaaggaagcaggatggcagccggaacagcagttggagcctgggtgctggtcctcagtctgtggggggcagtagtaggtgctcaaaacatcacagcccggattggcgagccactggtgctgaagtgtaagggggcccccaagaaaccaccccagcggctggaatggaaactgaacacaggccggacagaagcttggaaggtcctgtctccccagggaggaggcccctgggacagtgtggctcgtgtccttcccaacggctccctcttccttccggctgtcgggatccaggatgaggggattttccggtgccaggcaatgaacaggaatggaaaggagaccaagtccaactaccgagtccgtgtctaccagattcctgggaagccagaaattgtagattctgcctctgaactcacggctggtgttcccaataaggtagtggaagaaagcaggagaagtagaaaacggccctgtgaacaggaggtggggacatgtgtgtcagagggaagctaccctgcagggactcttagctggcacttggatgggaagcccctggtgcctaatgagaagggagtatctgtgaaggaacagaccaggagacaccctgagacagggctcttcacactgcagtcggagctaatggtgaccccagcccggggaggagatccccgtcccaccttctcctgtagcttcagcccaggccttccccgacaccgggccttgcgcacagccccatccagccccgtgtctgggagcctgtgcctctggaggaggtccaattggtggtggagccagaaggtggagcagtagctcctggtggaaccgtaaccctgacctgtgaagtccctgcccagccctctcctcaaatccactggatgaaggatggtgtgcccttgccccttccccccagccctgtgctgatcctccctgagatagggcctcaggaccagggaacctacagctgtgtggccacccattccagccacgggccccaggaaagccgtgctgtcagcatcagcatcatcgaaccaggcgaggaggggccaactgcaggctctgtgggaggatcagggctgggaactctagccctggccctggggatcctgggaggcctggggacagccgccctgctcattggggtcatcttgtggcaaaggcggcaacgccgaggagaggagaggaaggccccagaaaaccaggaggaagaggaggagcgtgcagaactgaatcagtcggaggaacctgaggcaggcgagagtagtactggagggccttgaggggcccacagacagatcccatccatcagctcccttttctttttcccttgaactgttctggcctcagaccaactctctcctgtataatctctctcctgtataaccccaccttgccaagctttcttctacaaccagagccccccacaatgatgattaaacacctgacacat

SEQ ID NO: 420526 - DNA, 767 bp, Homo sapiens
tggattcaaaggacaatattctttttcataggtaatttctcactatcagtgtaaagagcagcgtgatgcccatagatttgagaaaataagcaacattattaagcagttcaagctgagctgcagcaagctggctgcctctttccagagtatggaagtcaggaactctaacttcgctgctttcattgacatctttacatccaacacttatgtgatggttgtgatgtctgatccgtccattccttctgcagctactctgatcaacatccgcaatgccaggaaacactttgaaaagctggaaagagtggatggaccaaagcagtgtcttctcatgcgctaaacattgatgaatattgtttcacacaaaaattaaaagtttcctaattaatgttgtattcatatatgtaggctctgaaatgttgtgatgcttattgcttctgtatttcttctctactccctagtcttaatgtttaaccttgaatgctattaacttaaatagccattgaggagttagaagatgaattgttcatgaagtcggtgttacataaaagtaggtgatatgtaagttttctgataacaaggttctaatagtgtttaaatgtactggtaacctggttccaatagttgtgtttgcccaagcctttctcggcatcatcttgtattccttatcagatagtaagtaacctgtaagtttggagtattactgttttctcagcatgcattaaaaatattccttaacttcaattgtaaataaacttttggtgttaggg

SEQ ID NO: 420527 - DNA, 2136 bp, Homo sapiens
gcagatgcccacgtgatcctggcctgcagttgggtggctgcggtgagatacctgggttcctgaagggcgggtggttaggtcgtaactactgcccccgccggctgactctccgagcggccgggctcggaagccacgagccagctgaggcgttctccgcttagtgcctacggcatgggtcagctctttctgccacctccgccttcgcggtcctcacctctttgcgggtgaagttacctttgggtttccagaccttgggggcctgaggcccaaactcgggacgaacccctaacccacctctcttttcctgtcattctccaactcttactttgtaccacggaatcacttggccttaaagctagccagctcggccgtgccttgaggccaggttcgagagataaaggtaaccgtggggaaagcggccccccagtggacaaaggcggaggcaagaatagagcaggcctgagggccataggcgatgagaataggcagttgaggggtgaaaaagaaaacaaacaaacaacaacaacaaaccctgaagagtactgaagatttagaagggactggaaaggacttgttgcgcaatggaagaatctgactctgagaaaacgacggagaaagaaaatctggggccgagaatggatccaccactaggggaaccggaaggatcgcttgggtgggtgctaccaaatacagccatgaagaaaaaggtgctgttgatgggtaaaagtgggtctggtaagaccagcatgaggtctattatctttgcaaattatattgccagagacacacgtcgccttggcgcaacaatactagaccgtatacatagtcttcaaattaatagcagtttgagcacctactctctcgtagactctgttggaaatacaaagacatttgatgtagaacattctcatgttcgatttctgggaaacctggtattgaacctgtgggattgtggtgggcaagacaccttcatggaaaattatttcactagccaacgggacaacatcttccgaaatgtggaggttctgatttatgtctttgatgtggagagccgcgaactggaaaaggacatgcactattaccaatcatgcctggaggccattctgcagaattctccagatgccaaaatattttgcttggtacacaaaatggatctggtacaggaggatcaacgggacctgatttttaaagagcgagaagaagatttgaggcgtttgtctcgcccattggaatgttcttgtttccgaacatctatctgggatgaaaccctctataaggcttggtccagcatagtttatcagctgattcccaatgttcagcagctggaaatgaacctaaggaattttgctgaaattatcgaagctgatgaagtacttctttttgagagagctacttttctggtaatttctcactatcagtgtaaagagcagcgtgatgcccatagatttgagaaaataagcaacattattaagcagttcaagctgagctgcagcaagctggctgcctctttccagagtatggaagtcaggaactctaacttcgctgctttcattgacatctttacatccaacacttatgtgatggttgtgatgtctgatccgtccattccttctgcagctactctgatcaacatccgcaatgccaggaaacactttgaaaagctggaaagagtggatggaccaaagcagtgtcttctcatgcgctaaacattgatgaatattgtttcacacaaaaattaaaagtttcctaattaatgttgtattcatatatgtaggctctgaaatgttgtgatgcttattgcttctgtatttcttctctactccctagtcttaatgtttaaccttgaatgctattaacttaaatagccattgaggagttagaagatgaattgttcatgaagtcggtgttacataaaagtaggtgatatgtaagttttctgataacaaggttctaatagtgtttaaatgtactggtaacctggttccaatagttgtgtttgcccaagcctttctcggcatcatcttgtattccttatcagatagtaagtaacctgtaagtttggagtattactgttttctcagcatgcattaaaaatattccttaacttcaattgtaaataaacttttggtgttaggg

SEQ ID NO: 420528 - DNA, 1421 bp, Homo sapiens
gcagatgcccacgtgatcctggcctgcagttgggtggctgcggtgggtgctaccaaatacagccatgaagaaaaaggtgctgttgatgggtaaaagtgggtctggtaagaccagcatgaggtctattatctttgcaaattatattgccagagacacacgtcgccttggcgcaacaattgatgtagaacattctcatgttcgatttctgggaaacctggtattgaacctgtgggattgtggtgggcaagacaccttcatggaaaattatttcactagccaacgggacaacatcttccgaaatgtggaggttctgatttatgtctttgatgtggagagccgcgaactggaaaaggacatgcactattaccaatcatgcctggaggccattctgcagaattctccagatgccaaaatattttgcttggtacacaaaatggatctggtacaggaggatcaacgggacctgatttttaaagagcgagaagaagatttgaggcgtttgtctcgcccattggaatgttcttgtttccgaacatctatctgggatgaaaccctctataaggcttggtccagcatagtttatcagctgattcccaatgttcagcagctggaaatgaacctaaggaattttgctgaaattatcgaagctgatgaagtacttctttttgagagagctacttttctggtaatttctcactatcagtgtaaagagcagcgtgatgcccatagatttgagaaaataagcaacattattaagcagttcaagctgagctgcagcaagctggctgcctctttccagagtatggaagtcaggaactctaacttcgctgctttcattgacatctttacatccaacacttatgtgatggttgtgatgtctgatccgtccattccttctgcagctactctgatcaacatccgcaatgccaggaaacactttgaaaagctggaaagagtggatggaccaaagcagtgtcttctcatgcgctaaacattgatgaatattgtttcacacaaaaattaaaagtttcctaattaatgttgtattcatatatgtaggctctgaaatgttgtgatgcttattgcttctgtatttcttctctactccctagtcttaatgtttaaccttgaatgctattaacttaaatagccattgaggagttagaagatgaattgttcatgaagtcggtgttacataaaagtaggtgatatgtaagttttctgataacaaggttctaatagtgtttaaatgtactggtaacctggttccaatagttgtgtttgcccaagcctttctcggcatcatcttgtattccttatcagatagtaagtaacctgtaagtttggagtattactgttttctcagcatgcattaaaaatattccttaacttcaattgtaaataaacttttggtgttaggg

SEQ ID NO: 420529 - DNA, 1219 bp, Homo sapiens
gcagatgcccacgtgatcctggcctgcagttgggtggctgcggtgagatacctgggttcctgaagggcgggtggttaggtcgtaactactgcccccgccggctgactctccgagcggccgggctcggaagccacgagccagctgaggcgttctccgcttagtgcctacggcatgggtcagctctttctgccacctccgccttcgcggtcctcacctctttgcgggtgaagttacctttgggtttccagaccttgggggcctgaggcccaaactcgggacgaacccctaacccacctctcttttcctgtcattctccaactcttactttgtaccacggaatcacttggccttaaagctagccagctcggccgtgccttgaggccaggttcgagagataaaggtaaccgtggggaaagcggccccccagtggacaaaggcggaggcaagaatagagcaggcctgagggccataggcgatgagaataggcagttgaggggtgaaaaagaaaacaaacaaacaacaacaacaaaccctgaagagtactgaagatttagaagggactggaaaggacttgttgcgcaatggaagaatctgactctgagaaaacgacggagaaagaaaatctggggccgagaatggatccaccactaggggaaccggaaggatcgcttgggtgggtgctaccaaatacagccatgaagaaaaaggtgctgttgatgggtaaaagtgggtctggtaagaccagcatgaggtctattatctttgcaaattatattgccagagacacacgtcgccttggcgcaacaattgatgtagaacattctcatgttcgatttctgggaaacctggtattgaacctgtgggattgtggtgggcaagacaccttcatggaaaattatttcactagccaacgggacaacatcttccgaaatgtggaggttctgatttatgtctttgatgtggagagccgcgaactggaaaaggacatgcactattaccaatcatgcctggaggccattctgcagaattctccagatgccaaaatattttgcttggtacacaaaatggatctggtacaggaggatcaacgggacctggtaagaaacagaagaagtgctgcaccaaatgctcgacatgctttgcaaacttattttgtagaggtataggtaaatttgtaccattttttcaggaataaaaagtcagcagaagttttgaaagt

SEQ ID NO: 420530 - DNA, 1465 bp, Homo sapiens
gtacactcacaagccggagcagataaatgtggggttgtggtggcgataattcttcatgccaacagtggcaggaacatttaatacagtacattcatggttcaacatactgtggtctgaattccagctggtgctaccaacattgatgtgcggcagcacagtttatcaggggaaacagacgatgacaactacttagctttatcaagcagtaaaggtgaattcttgctacatgggcaactttgtagtcaccaatggccaaaagggaaattcgcattgggaatgctgtggtacagtacagtgggtccgagcactgccgtagaaagaattaactcaacagatcgcattgagcaagaacttttgcttcaggtatggtcggtggagagccgcgaactggaaaaggacatgcactattaccaatcatgcctggaggccattctgcagaattctccagatgccaaaatattttgcttggtacacaaaatggatctggtacaggaggatcaacgggacctgatttttaaagagcgagaagaagatttgaggcgtttgtctcgcccattggaatgttcttgtttccgaacatctatctgggatgaaaccctctataaggcttggtccagcatagtttatcagctgattcccaatgttcagcagctggaaatgaacctaaggaattttgctgaaattatcgaagctgatgaagtacttctttttgagagagctacttttctggtaatttctcactatcagtgtaaagagcagcgtgatgcccatagatttgagaaaataagcaacattattaagcagttcaagctgagctgcagcaagctggctgcctctttccagagtatggaagtcaggaactctaacttcgctgctttcattgacatctttacatccaacacttatgtgatggttgtgatgtctgatccgtccattccttctgcagctactctgatcaacatccgcaatgccaggaaacactttgaaaagctggaaagagtggatggaccaaagcagtgtcttctcatgcgctaaacattgatgaatattgtttcacacaaaaattaaaagtttcctaattaatgttgtattcatatatgtaggctctgaaatgttgtgatgcttattgcttctgtatttcttctctactccctagtcttaatgtttaaccttgaatgctattaacttaaatagccattgaggagttagaagatgaattgttcatgaagtcggtgttacataaaagtaggtgatatgtaagttttctgataacaaggttctaatagtgtttaaatgtactggtaacctggttccaatagttgtgtttgcccaagcctttctcggcatcatcttgtattccttatcagatagtaagtaacctgtaagtttggagtattactgttttctcagcatgcattaaaaatattccttaacttcaattgtaaataaacttttggtgttaggg

SEQ ID NO: 420531 - DNA, 629 bp, Homo sapiens
ggtggggggtagcatctgagacagagtgaacagcatgtgtaaaggccacatagtggataaaccatgtgccacttgaggaattgagaaaaagtcagtgtgtttagaacataaggagaggggcagagaaatggatctggtacaggagaatcaatgagaccgggtaagaaacagaaaaggggctgcaccaaatgattgacacgctctgcaaacttcttttgttggctcaagttgtggctcaagaggtgagaaggtaaggccagacttatttgttatgatttgccctttaaattgaagccttaagattatctttcacattgatcaagccaacaaaaataggctataagtaggagtgattgaattgaggatttgcttactatatatatattttttctatcaggcaagacaccttcatggaaaattatttcactagccaacgggacaacatcttccgaaatgtggaggttctgatttatgtctttgatgtggagagccgcgaactggaaaaggacatgcactattaccaatcatgcctggaggccattctgcagaattctccagatgccaaaatattttgcttggtacacaaaatggatctggtacaggaggatcaacgggacctggtaagaaac

SEQ ID NO: 420532 - DNA, 2052 bp, Homo sapiens
gcagatgcccacgtgatcctggcctgcagttgggtggctgcggtgagatacctgggttcctgaagggcgggtggttaggtcgtaactactgcccccgccggctgactctccgagcggccgggctcggaagccacgagccagctgaggcgttctccgcttagtgcctacggcatgggtcagctctttctgccacctccgccttcgcggtcctcacctctttgcgggtgaagttacctttgggtttccagaccttgggggcctgaggcccaaactcgggacgaacccctaacccacctctcttttcctgtcattctccaactcttactttgtaccacggaatcacttggccttaaagctagccagctcggccgtgccttgaggccaggttcgagagataaaggtaaccgtggggaaagcggccccccagtggacaaaggcggaggcaagaatagagcaggcctgagggccataggcgatgagaataggcagttgaggggtgaaaaagaaaacaaacaaacaacaacaacaaaccctgaagagtactgaagatttagaagggactggaaaggacttgttgcgcaatggaagaatctgactctgagaaaacgacggagaaagaaaatctggggccgagaatggatccaccactaggggaaccggaaggatcgcttgggtgggtgctaccaaatacagccatgaagaaaaaggtgctgttgatgggtaaaagtgggtctggtaagaccagcatgaggtctattatctttgcaaattatattgccagagacacacgtcgccttggcgcaacaattgatgtagaacattctcatgttcgatttctgggaaacctggtattgaacctgtgggattgtggtgggcaagacaccttcatggaaaattatttcactagccaacgggacaacatcttccgaaatgtggaggttctgatttatgtctttgatgtggagagccgcgaactggaaaaggacatgcactattaccaatcatgcctggaggccattctgcagaattctccagatgccaaaatattttgcttggtacacaaaatggatctggtacaggaggatcaacgggacctgatttttaaagagcgagaagaagatttgaggcgtttgtctcgcccattggaatgttcttgtttccgaacatctatctgggatgaaaccctctataaggcttggtccagcatagtttatcagctgattcccaatgttcagcagctggaaatgaacctaaggaattttgctgaaattatcgaagctgatgaagtacttctttttgagagagctacttttctggtaatttctcactatcagtgtaaagagcagcgtgatgcccatagatttgagaaaataagcaacattattaagcagttcaagctgagctgcagcaagctggctgcctctttccagagtatggaagtcaggaactctaacttcgctgctttcattgacatctttacatccaacacttatgtgatggttgtgatgtctgatccgtccattccttctgcagctactctgatcaacatccgcaatgccaggaaacactttgaaaagctggaaagagtggatggaccaaagcagtgtcttctcatgcgctaaacattgatgaatattgtttcacacaaaaattaaaagtttcctaattaatgttgtattcatatatgtaggctctgaaatgttgtgatgcttattgcttctgtatttcttctctactccctagtcttaatgtttaaccttgaatgctattaacttaaatagccattgaggagttagaagatgaattgttcatgaagtcggtgttacataaaagtaggtgatatgtaagttttctgataacaaggttctaatagtgtttaaatgtactggtaacctggttccaatagttgtgtttgcccaagcctttctcggcatcatcttgtattccttatcagatagtaagtaacctgtaagtttggagtattactgttttctcagcatgcattaaaaatattccttaacttcaattgtaaataaacttttggtgttaggg

SEQ ID NO: 420533 - DNA, 1280 bp, Homo sapiens
gcagatgcccacgtgatcctggcctgcagttgggtggctgcggtgagatacctgggttcctgaagggcgggtggttaggtcgtaactactgcccccgccggctgactctccgagcggccgggctcggaagccacgagccagctgaggcgttctccgcttagtgcctacggcatgggtcagctctttctgccacctccgccttcgcggtcctcacctctttgcgggtgaagttacctttgggtttccagaccttgggggcctgaggcccaaactcgggacgaacccctaacccacctctcttttcctgtcattctccaactcttactttgtaccacggaatcacttggccttaaagctagccagctcggccgtgccttgaggccaggttcgagagataaaggtaaccgtggggaaagcggccccccagtggacaaaggcggaggcaagaatagagcaggcctgagggccataggcgatgagaataggcagttgaggggtgaaaaagaaaacaaacaaacaacaacaacaaaccctgaagagtactgaagatttagaagggactggaaaggacttgttgcgcaatggaagaatctgactctgagaaaacgacggagaaagaaaatctggggccgagaatggatccaccactaggggaaccggaaggatcgcttgggtgggtgctaccaaatacagccatgaagaaaaaggtgctgttgatgggtaaaagtgggtctggtaagaccagcatgaggtctattatctttgcaaattatattgccagagacacacgtcgccttggcgcaacaattgatgtagaacattctcatgttcgatttctgggaaacctggtattgaacctgtgggattgtggtgggcaagacaccttcatggaaaattatttcactagccaacgggacaacatcttccgaaatgtggaggttctgatttatgtctttgatgtggagagccgcgaactggaaaaggacatgcactattaccaatcatgcctggaggccattctgcagaattctccagatgccaaaatattttgcttggtacacaaaatggatctggtacaggaggatcaacgggacctgatttttaaagagcgagaagaagatttgaggcgtttgtctcgcccattggaatgttcttgtttccgaacatctatctgggatgaaaccctctataaggcttggtccagcaatagtttatcagactgattcccaactgttcagcagacaggaagcagcaggagcggggtaccgacgctcgacatt

SEQ ID NO: 420534 - DNA, 609 bp, Homo sapiens
cagggccacgggaggactcagtgacgacttgaaagcatcaaacacagtggagggctcatacggggtgctcagtagatgggcgcatcattttatagaatactgaggcccagagagggaaggtgtcttgtctgtggtcgcatgggggctcagtgggaaagccgggactaaaagctggccccaggctagctttgtgccaggccatcctgctcttacacaggggctgagaaccaggggcagcccaggagtcctggatggggcagcagtcatgttggatggggctggggtgttggctctccctttctgggctctcaggagtggtcagggctagccccagatctcccagaccaagaagaggagcagcctgtggggagacactcatgccctgacatgagtcagtgcatcaagagaggccatcagccagtgggattcagcaagcatgcctggcgctgcctggtagggtgctgcccatgggaggaagagaagaggagctgccacccatttggggccctccttctctgggtcctcagatttgcccttcagcccagagtgtaagttccacagggccccattcatggaggccttgcccatgccctccatgcatttcagata

SEQ ID NO: 420535 - DNA, 2514 bp, Homo sapiens
gagcgcgaagtcggggacggggcggggctggcggcgggggcggggacccggagcgggaagatggcggcggcgcaggaggcggacggggcccgcagcgccgtggtggcggccgggggaggcagctccggtcaggtgaccagcaatggcagcatcgggagggacccgccagcggagacccagcctcagaacccaccggcccagccggcacccaatgcctggcaggtcatcaaaggtgtgctgtttaggatcttcatcatctgggccatcagcagttggttccgccgagggccggcccctcaggaccaggcgggccccggaggagccccacgcgtcgccagccgcaacctgttccccaaagacactttaatgaacctgcatgtgtacatctcagagcacgagcactttacagacttcaacgccacgtcggcactcttctgggaacagcacgatcttgtgtatggcgactggactagcggcgagaactcagacggctgctacgagcactttgctgagctcgatatcccacagagcgtccagcagaacggctccatctacatccacgtttacttcaccaagagtggcttccacccagacccccggcagaaggccctgtaccgccggcttgccacagtccacatgtcccggatgatcaacaaatacaagcgcagacgatttcagaaaaccaagaacctgctgacaggagagacagaagcggacccagaaatgatcaagagggctgaggactatgggcctgtggaggtgatctcccattggcaccccaacatcaccatcaacatcgtggacgaccacacgccgtgggtgaagggcagtgtgccccctcccctggatcaatatgtgaagttcgacgccgtgagcggtgactactatcccatcatctacttcaatgactactggaacctgcagaaggactactaccccatcaacgagagcctggccagcctgccgctccgcgtctccttctgcccactctcgctttggcgctggcagctctatgctgcccagagcaccaagtcgccctggaacttcctgggtgatgagttgtacgagcagtcagatgaggagcaggactcggtgaaggtggccctgctggagaccaacccctacctgctggcgctcaccatcatcgtgtctatcgttcacagtgtcttcgagttcctggccttcaagaatgatatccagttctggaacagccggcagtccctggagggcctgtccgtgcgctccgtcttcttcggcgttttccagtcattcgtggtcctcctctacatcctggacaacgagaccaacttcgtggtccaggtcagcgtcttcattggggtcctcatcgacctctggaagatcaccaaggtcatggacgtccggctggaccgagagcacagggtggcaggaatcttcccccgcctatccttcaaggacaagtccacgtatatcgagtcctcgaccaaagtgtatgatgatatggcattccggtacctgtcctggatcctcttcccgctcctgggctgctatgccgtctacagtcttctgtacctggagcacaagggctggtactcctgggtgctcagcatgctctacggcttcctgctgaccttcggcttcatcaccatgacgccccagctcttcatcaactacaagctcaagtctgtggcccaccttccctggcgcatgctcacctacaaggccctcaacacattcatcgacgacctgttcgcctttgtcatcaagatgcccgttatgtaccggatcggctgcctgcgggacgatgtggttttcttcatctacctctaccaacggtggatctaccgcgtcgaccccacccgagtcaacgagtttggcatgagtggagaagaccccacagctgccgcccccgtggccgaggttcccacagcagcaggggccctcacgcccacacctgcacccaccacgaccaccgccaccagggaggaggcctccacgtccctgcccaccaagcccacccagggggccagctctgccagcgagccccaggaagcccctccaaagccagcagaggacaagaaaaaggattagtcgagactggtcctcacctgctccggctcctggcgaccactacccctgcgtcccggccccctcgcctcccctccctgtcgccctttccctggacagatcaggccggggcggtgggaggcccgcctcaggtcagggcccagcgtgtgacgtaggggccggggcaggccagggtttgtttgtggaggcgctgtctgtccctctgtccctctgtgtttccagccatctcgccctgccagcccagcaccactgggaatcatggtgaagctgatgcagcgttgccgagggggtgggttgggcgggggtggggccgggcccccctacgggatgcccacggccgttcatcatcttgtccctcgtccccctaccacactccccctcctagaccgccgccctttaacacagtctggatttaataaattcatatgggtgtttaacttaaactca

SEQ ID NO: 420536 - DNA, 2615 bp, Homo sapiens
  misc_feature (2591)..(2591): n is a, c, g, or t
gagcgcgaagtcggggacggggcggggctggcggcgggggcggggacccggagcgggaagatggcggcggcgcaggaggcggacggggcccgcagcgccgtggtggcggccgggggaggcagctccggtcaggtgaccagcaatggcagcatcgggagggacccgccagcggagacccagcctcagaacccaccggcccagccggcacccaatgcctggcaggtcatcaaaggtgtgctgtttaggatcttcatcatctgggccatcagcagttggttccgccgagggccggcccctcaggaccaggcgggccccggaggagccccacgcgtcgccagccgcaacctgttccccaaagacactttaatgaacctgcatgtgtacatctcagagcacgagcactttacagacttcaacgccacgtcggcactcttctgggaacagcacgatcttgtgtatggcgactggactagcggcgagaactcagacggctgctacgagcactttgctgagctcgatatcccacagagcgtccagcagaacggctccatctacatccacgtttacttcaccaagagtggcttccacccagacccccggcagaaggccctgtaccgccggcttgccacagtccacatgtcccggatgatcaacaaatacaagcgcagacgatttcagaaaaccaagaacctgctgacaggagagacagaagcggacccagaaatgatcaagagggctgaggactatgggcctgtggaggtgatctcccattggcaccccaacatcaccatcaacatcgtggacgaccacacgccgtgggtgaagggcagtgtgccccctcccctggatcaatatgtgaagttcgacgccgtgagcggtgactactatcccatcatctacttcaatgactactggaacctgcagaaggactactaccccatcaacgagagcctggccagcctgccgctccgcgtctccttctgcccactctcgctttggcgctggcagctctatgctgcccagagcaccaagtcgccctggaacttcctgggtgatgagttgtacgagcagtcagatgaggagcaggactcggtgaaggtggccctgctggagaccaacccctacctgctggcgctcaccatcatcgtgtctatcgttcacagtgtcttcgagttcctggccttcaagaatgatatccagttctggaacagccggcagtccctggagggcctgtccgtgcgctccgtcttcttcggcgttttccagtcattcgtggtcctcctctacatcctggacaacgagaccaacttcgtggtccaggtcagcgtcttcattggggtcctcatcgacctctggaagatcaccaaggtcatggacgtccggctggaccgagagcacagggtggcaggaatcttcccccgcctatccttcaaggacaagtccacgtatatcgagtcctcgaccaaagtgtatgatgatatggcattccggtacctgtcctggatcctcttcccgctcctgggctgctatgccgtctacagtcttctgtacctggagcacaagggctggtactcctgggtgctcagcatgctctacggcttcctgctgaccttcggcttcatcaccatgacgccccagctcttcatcaactacaagctcaagtctgtggcccaccttccctggcgcatgctcacctacaaggccctcaacacattcatcgacgacctgttcgcctttgtcatcaagatgcccgttatgtaccggatcggctgcctgcgggacgatgtggttttcttcatctacctctaccaacggtggatctaccgcgtcgaccccacccgagtcaacgagtttggcatgagtggagaagaccccacagctgccgcccccgtggccgaggttcccacagcagcaggggccctcacgcccacacctgcacccaccacgaccaccgccaccagggaggaggcctccacgtccctgcccaccaagcccacccagggggccagctctgccagcgagccccaggaagcccctccaaagccagcagaggacaagaaaaaggattagtcgagactggtcctcacctgctccggctcctggcgaccactacccctgcgtcccggccccctcgcctcccctccctgtcgccctttccctggacagatcaggccggggcggtgggaggcccgcctcaggtcagggcccagcgtgtgacgtaggggccggggcaggccagggtttgtttgtggaggcgctgtctgtccctctgtccctctgtgtttccagccatctcgccctgccagcccagcaccactgggaatcatggtgaagctgatgcagcgttgccgagggggtgggttgggcgggggtggggccgggcccccctacgggatgcccacggccgttcatcatcttgtccctcgtccccctaccacactccccctcctagaccgccgccctttaacacagtctggatttaataaattcatatgggtgtttaacttaaactcaaaaaacacaaaaaaaaaaaaaaaaaaaaaaaaaaaaaaaaaaaaaaaaacaaaaaaaaaaaaaaaaggggggggcgncaaaaaatcccccggggggccccc

SEQ ID NO: 420537 - DNA, 2592 bp, Homo sapiens
  misc_feature (2568)..(2568): n is a, c, g, or t
gagcgcgaagtcggggacggggcggggctggcggcgggggcggggacccggagcgggaagatggcggcggcgcaggaggcggacggggcccgcagcgccgtggtggcggccgggggaggcagctccggtcaggtgaccagcaatggcagcatcgggagggacccgccagcggagacccagcctcagaacccaccggcccagccggcacccaatgcctggcaggtcatcaaaggtgtgctgtttaggatcttcatcatctgggccatcagcagttggttccgccgagggccggcccctcaggaccaggcgggccccggaggagccccacgcgtcgccagccgcaacctgttccccaaagacactttaatgaacctgcatgtgtacatctcagagcacgagcactttacagacttcaacgccacgtcggcactcttctgggaacagcacgatcttgtgtatggcgactggactagcggcgagaactcagacggctgctacgagcactttgctgagctcgatatcccacagagcgtccagcagaacggctccatctacatccacgtttacttcaccaagagtggcttccacccagacccccggcagaaggccctgtaccgccggcttgccacagtccacatgtcccggatgatcaacaaatacaagcgcagacgatttcagaaaaccaagaacctgctgacaggagagacagaagcggacccagaaatgatcaagagggctgaggactatgggcctgtggaggtgatctcccattggcaccccaacatcaccatcaacatcgtggacgaccacacgccgtgggtgaagggcagtgtgccccctcccctggatcaatatgtgaagttcgacgccgtgagcggtgactactatcccatcatctacttcaatgactactggaacctgcagaaggactactaccccatcaacgagagcctggccagcctgccgctccgcgtctccttctgcccactctcgctttggcgctggcagctctatgctgcccagagcaccaagtcgccctggaacttcctgggtgatgagttgtacgagcagtcagatgaggagcaggactcggtgaaggtggccctgctggagaccaacccctacctgctggcgctcaccatcatcgtgtctatcgttcacagtgtcttcgagttcctggccttcaagaatgatatccagttctggaacagccggcagtccctggagggcctgtccgtgcgctccgtcttcttcggcgttttccagtcattcgtggtcctcctctacatcctggacaacgagaccaacttcgtggtccaggtcagcgtcttcattggggtcctcatcgacctctggaagatcaccaaggtcatggacgtccggctggaccgagagcacagggtggcaggaatcttcccccgcctatccttcaaggacaagtccacgtatatcgagtcctcgaccaaagtgtatgatgatatggcattccggtacctgtcctggatcctcttcccgctcctgggctgctatgccgtctacagtcttctgtacctggagcacaagggctggtactcctgggtgctcagcatgctctacggcttcctgctgaccttcggcttcatcaccatgacgccccagctcttcatcaactacaagctcaagtctgtggcccaccttccctggcgcatgctcacctacaaggccctcaacacattcatcgacgacctgttcgcctttgtcatcaagatgcccgttatgtaccggatcggctgcctgcgggacgatgtggttttcttcatctacctctaccaacggtggatctaccgcgtcgaccccacccgagtcaacgagtttggcatgagtggagaagaccccacagctgccgcccccgtggccgaggttcccacagcagcaggggccctcacgcccacacctgcacccaccacgaccaccgccaccagggaggaggcctccacgtccctgcccaccaagcccacccagggggccagctctgccagcgagccccaggaagcccctccaaagccagcagaggacaagaaaaaggattagtcgagactggtcctcacctgctccggctcctggcgaccactacccctgcgtcccggccccctcgcctcccctccctgtcgccctttccctggacagatcaggccggggcggtgggaggcccgcctcaggtcagggcccagcgtgtgacgtaggggccggggcaggccagggtttgtttgtggaggcgctgtctgtccctctgtccctctgtgtttccagccatctcgccctgccagcccagcaccactgggaatcatggtgaagctgatgcagcgttgccgagggggtgggttgggcgggggtggggccgggcccccctacgggatgcccacggccgttcatcatcttgtccctcgtccccctaccacactccccctcctagaccgccgccctttaacacagtctggatttaataaattcatatgggtgtttaacttaaactcaaaaaaaaaaaaaaaaaaaaaaaaaaacaaaaaaaaaaaaaaaaggggggggcgncaaaaaatcccccggggggccccc

SEQ ID NO: 420538 - DNA, 2469 bp, Homo sapiens
gccgggtttagagctgtacgaagacacacagctaatgaaaaattgtggaattctcagagcccgtgaagcctagcccacggatgcgaggtgaccagcaatggcagcatcgggagggacccgccagcggagacccagcctcagaacccaccggcccagccggcacccaatgcctggcaggtcatcaaaggtgtgctgtttaggatcttcatcatctgggccatcagcagttggttccgccgagggccggcccctcaggaccaggcgggccccggaggagccccacgcgtcgccagccgcaacctgttccccaaagacactttaatgaacctgcatgtgtacatctcagagcacgagcactttacagacttcaacgccacgtcggcactcttctgggaacagcacgatcttgtgtatggcgactggactagcggcgagaactcagacggctgctacgagcactttgctgagctcgatatcccacagagcgtccagcagaacggctccatctacatccacgtttacttcaccaagagtggcttccacccagacccccggcagaaggccctgtaccgccggcttgccacagtccacatgtcccggatgatcaacaaatacaagcgcagacgatttcagaaaaccaagaacctgctgacaggagagacagaagcggacccagaaatgatcaagagggctgaggactatgggcctgtggaggtgatctcccattggcaccccaacatcaccatcaacatcgtggacgaccacacgccgtgggtgaagggcagtgtgccccctcccctggatcaatatgtgaagttcgacgccgtgagcggtgactactatcccatcatctacttcaatgactactggaacctgcagaaggactactaccccatcaacgagagcctggccagcctgccgctccgcgtctccttctgcccactctcgctttggcgctggcagctctatgctgcccagagcaccaagtcgccctggaacttcctgggtgatgagttgtacgagcagtcagatgaggagcaggactcggtgaaggtggccctgctggagaccaacccctacctgctggcgctcaccatcatcgtgtctatcgttcacagtgtcttcgagttcctggccttcaagaatgatatccagttctggaacagccggcagtccctggagggcctgtccgtgcgctccgtcttcttcggcgttttccagtcattcgtggtcctcctctacatcctggacaacgagaccaacttcgtggtccaggtcagcgtcttcattggggtcctcatcgacctctggaagatcaccaaggtcatggacgtccggctggaccgagagcacagggtggcaggaatcttcccccgcctatccttcaaggacaagtccacgtatatcgagtcctcgaccaaagtgtatgatgatatggcattccggtacctgtcctggatcctcttcccgctcctgggctgctatgccgtctacagtcttctgtacctggagcacaagggctggtactcctgggtgctcagcatgctctacggcttcctgctgaccttcggcttcatcaccatgacgccccagctcttcatcaactacaagctcaagtctgtggcccaccttccctggcgcatgctcacctacaaggccctcaacacattcatcgacgacctgttcgcctttgtcatcaagatgcccgttatgtaccggatcggctgcctgcgggacgatgtggttttcttcatctacctctaccaacggtggatctaccgcgtcgaccccacccgagtcaacgagtttggcatgagtggagaagaccccacagctgccgcccccgtggccgaggttcccacagcagcaggggccctcacgcccacacctgcacccaccacgaccaccgccaccagggaggaggcctccacgtccctgcccaccaagcccacccagggggccagctctgccagcgagccccaggaagcccctccaaagccagcagaggacaagaaaaaggattagtcgagactggtcctcacctgctccggctcctggcgaccactacccctgcgtcccggccccctcgcctcccctccctgtcgccctttccctggacagatcaggccggggcggtgggaggcccgcctcaggtcagggcccagcgtgtgacgtaggggccggggcaggccagggtttgtttgtggaggcgctgtctgtccctctgtccctctgtgtttccagccatctcgccctgccagcccagcaccactgggaatcatggtgaagctgatgcagcgttgccgagggggtgggttgggcgggggtggggccgggcccccctacgggatgcccacggccgttcatcatcttgtccctcgtccccctaccacactccccctcctagaccgccgccctttaacacagtctggatttaataaattcatatgggtgtttaacttaaactca

SEQ ID NO: 420539 - DNA, 2459 bp, Homo sapiens
gatggaacgaaaaggacgcgaagaatcggcagggagaagcggacaggatgtcccgaaaggctcatataaccgaaaaggtgaccagcaatggcagcatcgggagggacccgccagcggagacccagcctcagaacccaccggcccagccggcacccaatgcctggcaggtcatcaaaggtgtgctgtttaggatcttcatcatctgggccatcagcagttggttccgccgagggccggcccctcaggaccaggcgggccccggaggagccccacgcgtcgccagccgcaacctgttccccaaagacactttaatgaacctgcatgtgtacatctcagagcacgagcactttacagacttcaacgccacgtcggcactcttctgggaacagcacgatcttgtgtatggcgactggactagcggcgagaactcagacggctgctacgagcactttgctgagctcgatatcccacagagcgtccagcagaacggctccatctacatccacgtttacttcaccaagagtggcttccacccagacccccggcagaaggccctgtaccgccggcttgccacagtccacatgtcccggatgatcaacaaatacaagcgcagacgatttcagaaaaccaagaacctgctgacaggagagacagaagcggacccagaaatgatcaagagggctgaggactatgggcctgtggaggtgatctcccattggcaccccaacatcaccatcaacatcgtggacgaccacacgccgtgggtgaagggcagtgtgccccctcccctggatcaatatgtgaagttcgacgccgtgagcggtgactactatcccatcatctacttcaatgactactggaacctgcagaaggactactaccccatcaacgagagcctggccagcctgccgctccgcgtctccttctgcccactctcgctttggcgctggcagctctatgctgcccagagcaccaagtcgccctggaacttcctgggtgatgagttgtacgagcagtcagatgaggagcaggactcggtgaaggtggccctgctggagaccaacccctacctgctggcgctcaccatcatcgtgtctatcgttcacagtgtcttcgagttcctggccttcaagaatgatatccagttctggaacagccggcagtccctggagggcctgtccgtgcgctccgtcttcttcggcgttttccagtcattcgtggtcctcctctacatcctggacaacgagaccaacttcgtggtccaggtcagcgtcttcattggggtcctcatcgacctctggaagatcaccaaggtcatggacgtccggctggaccgagagcacagggtggcaggaatcttcccccgcctatccttcaaggacaagtccacgtatatcgagtcctcgaccaaagtgtatgatgatatggcattccggtacctgtcctggatcctcttcccgctcctgggctgctatgccgtctacagtcttctgtacctggagcacaagggctggtactcctgggtgctcagcatgctctacggcttcctgctgaccttcggcttcatcaccatgacgccccagctcttcatcaactacaagctcaagtctgtggcccaccttccctggcgcatgctcacctacaaggccctcaacacattcatcgacgacctgttcgcctttgtcatcaagatgcccgttatgtaccggatcggctgcctgcgggacgatgtggttttcttcatctacctctaccaacggtggatctaccgcgtcgaccccacccgagtcaacgagtttggcatgagtggagaagaccccacagctgccgcccccgtggccgaggttcccacagcagcaggggccctcacgcccacacctgcacccaccacgaccaccgccaccagggaggaggcctccacgtccctgcccaccaagcccacccagggggccagctctgccagcgagccccaggaagcccctccaaagccagcagaggacaagaaaaaggattagtcgagactggtcctcacctgctccggctcctggcgaccactacccctgcgtcccggccccctcgcctcccctccctgtcgccctttccctggacagatcaggccggggcggtgggaggcccgcctcaggtcagggcccagcgtgtgacgtaggggccggggcaggccagggtttgtttgtggaggcgctgtctgtccctctgtccctctgtgtttccagccatctcgccctgccagcccagcaccactgggaatcatggtgaagctgatgcagcgttgccgagggggtgggttgggcgggggtggggccgggcccccctacgggatgcccacggccgttcatcatcttgtccctcgtccccctaccacactccccctcctagaccgccgccctttaacacagtctggatttaataaattcatatgggtgtttaacttaaactca

SEQ ID NO: 420540 - DNA, 2197 bp, Homo sapiens
aaaattaggctaagtgcgaggccgcggttaatcggcagagggaccttcaatgaacctgcatgtgtacatctcagagcacgagcactttacagacttcaacgccacgtcggcactcttctgggaacagcacgatcttgtgtatggcgactggactagcggcgagaactcagacggctgctacgagcactttgctgagctcgatatcccacagagcgtccagcagaacggctccatctacatccacgtttacttcaccaagagtggcttccacccagacccccggcagaaggccctgtaccgccggcttgccacagtccacatgtcccggatgatcaacaaatacaagcgcagacgatttcagaaaaccaagaacctgctgacaggagagacagaagcggacccagaaatgatcaagagggctgaggactatgggcctgtggaggtgatctcccattggcaccccaacatcaccatcaacatcgtggacgaccacacgccgtgggtgaagggcagtgtgccccctcccctggatcaatatgtgaagttcgacgccgtgagcggtgactactatcccatcatctacttcaatgactactggaacctgcagaaggactactaccccatcaacgagagcctggccagcctgccgctccgcgtctccttctgcccactctcgctttggcgctggcagctctatgctgcccagagcaccaagtcgccctggaacttcctgggtgatgagttgtacgagcagtcagatgaggagcaggactcggtgaaggtggccctgctggagaccaacccctacctgctggcgctcaccatcatcgtgtctatcgttcacagtgtcttcgagttcctggccttcaagaatgatatccagttctggaacagccggcagtccctggagggcctgtccgtgcgctccgtcttcttcggcgttttccagtcattcgtggtcctcctctacatcctggacaacgagaccaacttcgtggtccaggtcagcgtcttcattggggtcctcatcgacctctggaagatcaccaaggtcatggacgtccggctggaccgagagcacagggtggcaggaatcttcccccgcctatccttcaaggacaagtccacgtatatcgagtcctcgaccaaagtgtatgatgatatggcattccggtacctgtcctggatcctcttcccgctcctgggctgctatgccgtctacagtcttctgtacctggagcacaagggctggtactcctgggtgctcagcatgctctacggcttcctgctgaccttcggcttcatcaccatgacgccccagctcttcatcaactacaagctcaagtctgtggcccaccttccctggcgcatgctcacctacaaggccctcaacacattcatcgacgacctgttcgcctttgtcatcaagatgcccgttatgtaccggatcggctgcctgcgggacgatgtggttttcttcatctacctctaccaacggtggatctaccgcgtcgaccccacccgagtcaacgagtttggcatgagtggagaagaccccacagctgccgcccccgtggccgaggttcccacagcagcaggggccctcacgcccacacctgcacccaccacgaccaccgccaccagggaggaggcctccacgtccctgcccaccaagcccacccagggggccagctctgccagcgagccccaggaagcccctccaaagccagcagaggacaagaaaaaggattagtcgagactggtcctcacctgctccggctcctggcgaccactacccctgcgtcccggccccctcgcctcccctccctgtcgccctttccctggacagatcaggccggggcggtgggaggcccgcctcaggtcagggcccagcgtgtgacgtaggggccggggcaggccagggtttgtttgtggaggcgctgtctgtccctctgtccctctgtgtttccagccatctcgccctgccagcccagcaccactgggaatcatggtgaagctgatgcagcgttgccgagggggtgggttgggcgggggtggggccgggcccccctacgggatgcccacggccgttcatcatcttgtccctcgtccccctaccacactccccctcctagaccgccgccctttaacacagtctggatttaataaattcatatgggtgtttaacttaaactca

SEQ ID NO: 420541 - DNA, 2120 bp, Homo sapiens
gagcgcgaagtcggggacggggcggggctggcggcgggggcggggacccggagcgggaagatggcggcggcgcaggaggcggacggggcccgcagcgccgtggtggcggccgggggaggcagctccggtcaggtgaccagcaatggcagcatcgggagggacccgccagcggagacccagcctcagaacccaccggcccagccggcacccaatgcctggcaggtcatcaaaggtgtgctgtttaggatcttcatcatctgggccatcagcagttggttccgccgagggccggcccctcaggaccaggcgggccccggaggagccccacgcgtcgccagccgcaacctgttccccaaagacactttaatgaacctgcatgtgtacatctcagagcacgagcactttacagacttcaacgccacgtcggcactcttctgggaacagcacgatcttgtgtatggcgactggactagcggcgagaactcagacggctgctacgagcactttgctgagctcgatatcccacagagcgtccagcagaacggctccatctacatccacgtttacttcaccaagagtggcttccacccagacccccggcagaaggccctgtaccgccggcttgccacagtccacatgtcccggatgatcaacaaatacaagcgcagacgatttcagaaaaccaagaacctgctgacaggagagacagaagcggacccagaaatgatcaagagggctgaggactatgggcctgtggaggtgatctcccattggcaccccaacatcaccatcaacatcgtggacgaccacacgccgtgggtgaagggcagtgtgccccctcccctggatcaatatgtgaagttcgacgccgtgagcggtgactactatcccatcatctacttcaatgactactggaacctgcagaaggactactaccccatcaacgagagcctggccagcctgccgctccgcgtctccttctgcccactctcgctttggcgctggcagctctatgctgcccagagcaccaagtcgccctggaacttcctgggtgatgagttgtacgagcagtcagatgaggagcaggactcggtgaaggtggccctgctggagaccaacccctacctgctggcgctcaccatcatcgtgtctatcgttcacagtgtcttcgagttcctggccttcaagaatgatatccagttctggaacagccggcagtccctggagggcctgtccgtgcgctccgtcttcttcggcgttttccagtcattcgtggtcctcctctacatcctggacaacgagaccaacttcgtggtccaggtcagcgtcttcattggggtcctcatcgacctctggaagatcaccaaggtcatggacgtccggctggaccgagagcacagggtggcaggaatcttcccccgcctatccttcaaggacaagtccacgtatatcgagtcctcgaccaaagtgtatgatgatatggcattccggtacctgtcctggatcctcttcccgctcctgggctgctatgccgtctacagtcttctgtacctggagcacaagggctggtactcctgggtgctcagcatgctctacggcttcctgctgaccttcggcttcatcaccatgacgccccagctcttcatcaactacaagctcaagtctgtggcccaccttccctggcgcatgctcacctacaaggccctcaacacattcatcgacgacctgttcgcctttgtcatcaagatgcccgttatgtaccggatcggctgcctgcgggacgatgtggttttcttcatctacctctaccaacggtggatctaccgcgtcgaccccacccgagtcaacgagtttggcatgagtggagaagaccccacagctgccgcccccgtggccgaggttcccacagcagcaggggccctcacgcccacacctgcacccaccacgaccaccgccaccagggtgggttgggcgggggtggggccgggcccccctacgggatgcccacggccgttcatcatcttgtccctcgtccccctaccacactccccctcctagaccgccgccctttaacacagtctggatttaataaattcatatgggtgtttaacttaaactca

SEQ ID NO: 420542 - DNA, 1876 bp, Homo sapiens
gagcgcgaagtcggggacggggcggggctggcggcgggggcggggacccggagcgggaagatggcggcggcgcaggaggcggacggggcccgcagcgccgtggtggcggccgggggaggcagctccggtcaggtgaccagcaatggcagcatcgggagggacccgccagcggagacccagcctcagaacccaccggcccagccggcacccaatgcctggcaggtcatcaaaggtgtgctgtttaggatcttcatcatctgggccatcagcagttggttccgccgagggccggcccctcaggaccaggcgggccccggaggagccccacgcgtcgccagccgcaacctgttccccaaagacactttaatgaacctgcatgtgtacatctcagagcacgagcactttacagacttcaacgccacgtcggcactcttctgggaacagcacgatcttgtgtatggcgactggactagcggcgagaactcagacggctgctacgagcactttgctgagctcgatatcccacagagcgtccagcagaacggctccatctacatccacgtttacttcaccaagagtggcttccacccagacccccggcagaaggccctgtaccgccggcttgccacagtccacatgtcccggatgatcaacaaatacaagcgcagacgatttcagaaaaccaagaacctgctgacaggagagacagaagcggacccagaaatgatcaagagggctgaggactatgggcctgtggaggtgatctcccattggcaccccaacatcaccatcaacatcgtggacgaccacacgccgtgggtgaagggcagtgtgccccctcccctggatcaatatgtgaagttcgacgccgtgagcggtgactactatcccatcatctacttcaatgactactggaacctgcagaaggactactaccccatcaacgagagcctggccagcctgccgctccgcgtctccttctgcccactctcgctttggcgctggcagctctatgctgcccagagcaccaagtcgccctggaacttcctgggtgatgagttgtacgagcagtcagatgaggagcaggactcggtgaaggtggccctgctggagaccaacccctacctgctggcgctcaccatcatcgtgtctatcgttcacagtgtcttcgagttcctggccttcaagaatgatatccagttctggaacagccggcagtccctggagggcctgtccgtgcgctccgtcttcttcggcgttttccagtcattcgtggtcctcctctacatcctggacaacgagaccaacttcgtggtccaggtcagcgtcttcattggggtcctcatcgacctctggaagatcaccaaggtcatggacgtccggctggaccgagagcacagggtggcaggaatcttcccccgcctatccttcaaggacaagtccacgtatatcgagtcctcgaccaaagtgtatgatgatatggcattccggtacctgtcctggatcctcttcccgctcctgggctgctatgccgtctacagtcttctgtacctggagcacaagggctggtactcctgggtgctcagcatgctctacggcttcctgctgaccttcggcttcatcaccatgacgccccagctcttcatcaactacaagctcaagtctgtggcccaccttccctggcgcatgctcacctacaaggccctcaacacattcatcgacgacctgttcgccgactgtcatctcagggctgagatgacagtcggcaagatcctctggacacagcagttctgagttatccccagatgcagtggaaaaggcagggatgtcttcaaatcagagcatctcttcacctgtgcttgatgctgtacccaga

SEQ ID NO: 420543 - DNA, 1641 bp, Homo sapiens
gagcgcgaagtcggggacggggcggggctggcggcgggggcggggacccggagcgggaagatggcggcggcgcaggaggcggacggggcccgcagcgccgtggtggcggccgggggaggcagctccggtcaggtgaccagcaatggcagcatcgggagggacccgccagcggagacccagcctcagaacccaccggcccagccggcacccaatgcctggcaggtcatcaaaggtgtgctgtttaggatcttcatcatctgggccatcagcagttggttccgccgagggccggcccctcaggaccaggcgggccccggaggagccccacgcgtcgccagccgcaacctgttccccaaagacactttaatgaacctgcatgtgtacatctcagagcacgagcactttacagacttcaacgccacgtcggcactcttctgggaacagcacgatcttgtgtatggcgactggactagcggcgagaactcagacggctgctacgagcactttgctgagctcgatatcccacagagcgtccagcagaacggctccatctacatccacgtttacttcaccaagagtggcttccacccagacccccggcagaaggccctgtaccgccggcttgccacagtccacatgtcccggatgatcaacaaatacaagcgcagacgatttcagaaaaccaagaacctgctgacaggagagacagaagcggacccagaaatgatcaagagggctgaggactatgggcctgtggaggtgatctcccattggcaccccaacatcaccatcaacatcgtggacgaccacacgccgtgggtgaagggcagtgtgccccctcccctggatcaatatgtgaagttcgacgccgtgagcggtgactactatcccatcatctacttcaatgactactggaacctgcagaaggactactaccccatcaacgagagcctggccagcctgccgctccgcgtctccttctgcccactctcgctttggcgctggcagctctatgctgcccagagcaccaagtcgccctggaacttcctgggtgatgagttgtacgagcagtcagatgaggagcaggactcggtgaaggtggccctgctggagaccaacccctacctgctggcgctcaccatcatcgtgtctatcgttcacagtgtcttcgagttcctggccttcaagaatgatatccagttctggaacagccggcagtccctggagggcctgtccgtgcgctccgtcttcttcggcgttttccagtcattcgtggtcctcctctacatcctggacaacgagaccaacttcgtggtccaggtcagcgtcttcattggggtcctcatcgacctctggaagatcaccaaggtcatggacgtccggctggaccgagagcacagggtggcaggaatcttcccccgcctatccttcaaggacaagtccacgtatatcgagtcctcgaccaaagtgtatgatgatatggcattccggtacctgtcctggatcctcttcccgctcgggatgcccacggccgttcatcatcttgtccctcgtccccctaccacactccccctcctagaccgccgccctttaacacagtctggatttaataaattcatatgggtgtttaacttaaactca

SEQ ID NO: 420544 - DNA, 1575 bp, Homo sapiens
gagcgcgaagtcggggacggggcggggctggcggcgggggcggggacccggagcgggaagatggcggcggcgcaggaggcggacggggcccgcagcgccgtggtggcggccgggggaggcagctccggtcaggtgaccagcaatggcagcatcgggagggacccgccagcggagacccagcctcagaacccaccggcccagccggcacccaatgcctggcaggtcatcaaaggtgtgctgtttaggatcttcatcatctgggccatcagcagttggttccgccgagggccggcccctcaggaccaggcgggccccggaggagccccacgcgtcgccagccgcaacctgttccccaaagacactttaatgaacctgcatgtgtacatctcagagcacgagcactttacagacttcaacgccacgtcggcactcttctgggaacagcacgatcttgtgtatggcgactggactagcggcgagaactcagacggctgctacgagcactttgctgagctcgatatcccacagagcgtccagcagaacggctccatctacatccacgtttacttcaccaagagtggcttccacccagacccccggcagaaggccctgtaccgccggcttgccacagtccacatgtcccggatgatcaacaaatacaagcgcagacgatttcagaaaaccaagaacctgctgacaggagagacagaagcggacccagaaatgatcaagagggctgaggactatgggcctgtggaggtgatctcccattggcaccccaacatcaccatcaacatcgtggacgaccacacgccgtgggtgaagggcagtgtgccccctcccctggatcaatatgtgaagttcgacgccgtgagcggtgactactatcccatcatctacttcaatgactactggaacctgcagaaggactactaccccatcaacgagagcctggccagcctgccgctccgcgtctccttctgcccactctcgctttggcgctggcagctctatgctgcccagagcaccaagtcgccctggaacttcctgggtgatgagttgtacgagcagtcagatgaggagcaggactcggtgaaggtggccctgctggagaccaacccctacctgctggcgctcaccatcatcgtgtctatcgttcacagtgtcttcgagttcctggccttcaagaatgatatccagttctggaacagccggcagtccctggagggcctgtccgtgcgctccgtcttcttcggcgttttccagtcattcgtggtcctcctctacatcctggacaacgagaccaacttcgtggtccaggtcagcgtcttcattggggtcctcatcgacctctggaagatcaccaaggtcatggacgtccggtggacgagaggcaaggtggaggatctccccgcctatctcaggcagtcaggtaatcgagtctgacaagggtgagaatggatcggaccggcggcccctccggacgggggagccgaaagcccggacgggcaggggactggggcaaggcaggccggagtggtacaaaaccctcacaacactgcccgggccaaagca

SEQ ID NO: 420545 - DNA, 1109 bp, Homo sapiens
gagcgcgaagtcggggacggggcggggctggcggcgggggcggggacccggagcgggaagatggcggcggcgcaggaggcggacggggcccgcagcgccgtggtggcggccgggggaggcagctccggtcaggtgaccagcaatggcagcatcgggagggacccgccagcggagacccagcctcagaacccaccggcccagccggcacccaatgcctggcaggtcatcaaaggtgtgctgtttaggatcttcatcatctgggccatcagcagttggttccgccgagggccggcccctcaggaccaggcgggccccggaggagccccacgcgtcgccagccgcaacctgttccccaaagacactttaatgaacctgcatgtgtacatctcagagcacgagcactttacagacttcaacgccacgtcggcactcttctgggaacagcacgatcttgtgtatggcgactggactagcggcgagaactcagacggctgctacgagcactttgctgagctcgatatcccacagagcgtccagcagaacggctccatctacatccacgtttacttcaccaagagtggcttccacccagacccccggcagaaggccctgtaccgccggcttgccacagtccacatgtcccggatgatcaacaaatacaagcgcagacgatttcagaaaaccaagaacctgctgacaggagagacagaagcggacccagaaatgatcaagagggctgaggactatgggcctgtggaggtgatctcccattggcaccccaacatcaccatcaacatcgtggacgaccacacgccgtgggtgaagggcagtgtgccccctcccctggatcaatgtaagctccccagccctgccagctgcctgcagagcctttgagagggtgctcggggtccatctccttgtcttctcctggccctgtccccctgagagagctttccagggctccaccctcccaagctcccaccctgtcctatccccttcccatgtcctctccctctcccacaccaccacccctggggaccccaggactgacttctacacgccagcatcggtccgcaatcaagtgccatccagcccacaaactgttttca

SEQ ID NO: 420546 - DNA, 2303 bp, Homo sapiens
gagcgcgaagtcggggacggggcggggctggcggcgggggcggggacccggagcgggaagatggcggcggcgcaggaggcggacggggcccgcagcgccgtggtggcggccgggggaggcagctccggtcaggtgaccagcaatggcagcatcgggagggacccgccagcggagacccagcctcagaacccaccggcccagccggcacccaatgcctggcaggtcatcaaaggtgtgctgtttaggatcttcatcatctgggccatcagcagttggttccgccgagggccggcccctcaggaccaggcgggccccggaggagccccacgcgtcgccagccgcaacctgttccccaaagacactttaatgaacctgcatgtgtacatctcagagcacgagcactttacagacttcaacgccacgtcggcactcttctgggaacagcacgatcttgtgtatggcgactggactagcggcgagaactcagacggctgctacgagcactttgctgagctcgatatcccacagagcgtccagcagaacggctccatctacatccacgtttacttcaccaagagtggcttccacccagacccccggcagaaggccctgtaccgccggcttgccacagtccacatgtcccggatgatcaacaaatacaagcgcagacgatttcagaaaaccaagaacctgctgacaggagagacagaagcggacccagaaatgatcaagagggctgaggactatgggcctgtggaggtgatctcccattggcaccccaacatcaccatcaacatcgtggacgaccacacgccgtgggtgaagggcagtgtgccccctcccctggatcaatatgtgaagttcgacgccgtgagcggtgactactatcccatcatctacttcaatgactactggaacctgcagaaggactactaccccatcaacgagagcctggccagcctgccgctccgcgtctccttctgcccactctcgctttggcgctggcagctctatgctgcccagagcaccaagtcgccctggaacttcctgggtgatgagttgtacgagcagtcagatgaggagcaggactcggtgaaggtggccctgctggagaccaacccctacctgctggcgctcaccatcatcgtgtctatcgttcacagtgtcttcgagttcctggccttcaagaatgatatccagttctggaacagccggcagtccctggagggcctgtccgtgcgctccgtcttcttcggcgttttccagtcattcgtggtcctcctctacatcctggacaacgagaccaacttcgtggtccaggtcagcgtcttcattggggtcctcatcgacctctggaagatcaccaaggtcatggacgtccggctggaccgagagcacagggtggcaggaatcttcccccgcctatccttcaaggacaagtccacgtatatcgagtcctcgaccaaagtgtatgatgatatggcattccggtacctgtcctggatcctcttcccgctcctgggctgctatgccgtctacagtcttctgtacctggagcacaagggctggtactcctgggtgctcagcatgctctacggcttcctgctgaccttcggcttcatcaccatgacgccccagctcttcatcaactacaagctcaagtctgtggcccaccttccctggcgcatgctcacctacaaggccctcaacacattcatcgacgacctgttcgcctttgtcatcaagatgcccgttatgtaccggatcggctgcctgcgggacgatgtggttttcttcatctacctctaccaacggtggatctaccgcgtcgaccccacccgagtcaacgagtttggcatgagtggagaagaccccacagctgccgcccccgtggccgaggttcccacagcagcaggggccctcacgcccacacctgcacccaccacgaccaccgccaccagggaggaggcctccacgtccctgcccaccaagcccacccagggggccagctctgccagcgagccccagggtttgtttgtggaggcgctgtctgtccctctgtccctctgtgtttccagccatctcgccctgccagcccagcaccactgggaatcatggtgaagctgatgcagcgttgccgagggggtgggttgggcgggggtggggccgggcccccctacgggatgcccacggccgttcatcatcttgtccctcgtccccctaccacactccccctcctagaccgccgccctttaacacagtctggatttaataaattcatatgggtgtttaacttaaactca

SEQ ID NO: 420547 - DNA, 2506 bp, Homo sapiens
gccccgcccatcgacccccttctatgaactctccttgagcactcctggcctaatggcggcggcgcaggaggcggacggggcccgcagcgccgtggtggcggccgggggaggcagctccggtcaggtgaccagcaatggcagcatcgggagggacccgccagcggagacccagcctcagaacccaccggcccagccggcacccaatgcctggcaggtcatcaaaggtgtgctgtttaggatcttcatcatctgggccatcagcagttggttccgccgagggccggcccctcaggaccaggcgggccccggaggagccccacgcgtcgccagccgcaacctgttccccaaagacactttaatgaacctgcatgtgtacatctcagagcacgagcactttacagacttcaacgccacgtcggcactcttctgggaacagcacgatcttgtgtatggcgactggactagcggcgagaactcagacggctgctacgagcactttgctgagctcgatatcccacagagcgtccagcagaacggctccatctacatccacgtttacttcaccaagagtggcttccacccagacccccggcagaaggccctgtaccgccggcttgccacagtccacatgtcccggatgatcaacaaatacaagcgcagacgatttcagaaaaccaagaacctgctgacaggagagacagaagcggacccagaaatgatcaagagggctgaggactatgggcctgtggaggtgatctcccattggcaccccaacatcaccatcaacatcgtggacgaccacacgccgtgggtgaagggcagtgtgccccctcccctggatcaatatgtgaagttcgacgccgtgagcggtgactactatcccatcatctacttcaatgactactggaacctgcagaaggactactaccccatcaacgagagcctggccagcctgccgctccgcgtctccttctgcccactctcgctttggcgctggcagctctatgctgcccagagcaccaagtcgccctggaacttcctgggtgatgagttgtacgagcagtcagatgaggagcaggactcggtgaaggtggccctgctggagaccaacccctacctgctggcgctcaccatcatcgtgtctatcgttcacagtgtcttcgagttcctggccttcaagaatgatatccagttctggaacagccggcagtccctggagggcctgtccgtgcgctccgtcttcttcggcgttttccagtcattcgtggtcctcctctacatcctggacaacgagaccaacttcgtggtccaggtcagcgtcttcattggggtcctcatcgacctctggaagatcaccaaggtcatggacgtccggctggaccgagagcacagggtggcaggaatcttcccccgcctatccttcaaggacaagtccacgtatatcgagtcctcgaccaaagtgtatgatgatatggcattccggtacctgtcctggatcctcttcccgctcctgggctgctatgccgtctacagtcttctgtacctggagcacaagggctggtactcctgggtgctcagcatgctctacggcttcctgctgaccttcggcttcatcaccatgacgccccagctcttcatcaactacaagctcaagtctgtggcccaccttccctggcgcatgctcacctacaaggccctcaacacattcatcgacgacctgttcgcctttgtcatcaagatgcccgttatgtaccggatcggctgcctgcgggacgatgtggttttcttcatctacctctaccaacggtggatctaccgcgtcgaccccacccgagtcaacgagtttggcatgagtggagaagaccccacagctgccgcccccgtggccgaggttcccacagcagcaggggccctcacgcccacacctgcacccaccacgaccaccgccaccagggaggaggcctccacgtccctgcccaccaagcccacccagggggccagctctgccagcgagccccaggaagcccctccaaagccagcagaggacaagaaaaaggattagtcgagactggtcctcacctgctccggctcctggcgaccactacccctgcgtcccggccccctcgcctcccctccctgtcgccctttccctggacagatcaggccggggcggtgggaggcccgcctcaggtcagggcccagcgtgtgacgtaggggccggggcaggccagggtttgtttgtggaggcgctgtctgtccctctgtccctctgtgtttccagccatctcgccctgccagcccagcaccactgggaatcatggtgaagctgatgcagcgttgccgagggggtgggttgggcgggggtggggccgggcccccctacgggatgcccacggccgttcatcatcttgtccctcgtccccctaccacactccccctcctagaccgccgccctttaacacagtctggatttaataaattcatatgggtgtttaacttaaactca

SEQ ID NO: 420548 - DNA, 2572 bp, Homo sapiens
gagcgcgaagtcggggacggggcggggctggcggcgggggcggggacccggagcgggaagatggcggcggcgcaggaggcggacggggcccgcagcgccgtggtggcggccgggggaggcagctccggtcaggtgaccagcaatggcagcatcgggagggacccgccagcggagacccagcctcagaacccaccggcccagccggcacccaatgcctggcaggtcatcaaaggtgtgctgtttaggatcttcatcatctgggccatcagcagttggttccgccgagggccggcccctcaggaccaggcgggccccggaggagccccacgcgtcgccagccgcaacctgttccccaaagacactttaatgaacctgcatgtgtacatctcagagcacgagcactttacagacttcaacgccacgtcggcactcttctgggaacagcacgatcttgtgtatggcgactggactagcggcgagaactcagacggctgctacgagcactttgctgagctcgatatcccacagagcgtccagcagaacggctccatctacatccacgtttacttcaccaagagtggcttccacccagacccccggcagaaggccctgtaccgccggcttgccacagtccacatgtcccggatgatcaacaaatacaagcgcagacgatttcagaaaaccaagaacctgctgacaggagagacagaagcggacccagaaatgatcaagagggctgaggactatgggcctgtggaggtgatctcccattggcaccccaacatcaccatcaacatcgtggacgaccacacgccgtgggtgaagggcagtgtgccccctcccctggatcaatatgtgaagttcgacgccgtgagcggtgactactatcccatcatctacttcaatgactactggaacctgcagaaggactactaccccatcaacgagagcctggccagcctgccgctccgcgtctccttctgcccactctcgctttggcgctggcagctctatgctgcccagagcaccaagtcgccctggaacttcctgggtgatgagttgtacgagcagtcagatgaggagcaggactcggtgaaggtggccctgctggagaccaacccctacctgctggcgctcaccatcatcgtgtctatcgttcacagtgtcttcgagttcctggccttcaagaatgatatccagttctggaacagccggcagtccctggagggcctgtccgtgcgctccgtcttcttcggcgttttccagtcattcgtggtcctcctctacatcctggacaacgagaccaacttcgtggtccaggtcagcgtcttcattggggtcctcatcgacctctggaagatcaccaaggtcatggacgtccggctggaccgagagcacagggtggcaggaatcttcccccgcctatccttcaaggacaagtccacgtatatcgagtcctcgaccaaagtgtatgatgatatggcattccggtacctgtcctggatcctcttcccgctcctgggctgctatgccgtctacagtcttctgtacctggagcacaagggctggtactcctgggtgctcagcatgctctacggcttcctgctgaccttcggcttcatcaccatgacgccccagctcttcatcaactacaagctcaagtctgtggcccaccttccctggcgcatgctcacctacaaggccctcaacacattcatcgacgacctgttcgcctttgtcatcaagatgcccgttatgtaccggatcggctgcctgcgggacggcccacctggctgtggacgggccagcccgacctcacactgcctcccacccctctccagatgtggttttcttcatctacctctaccaacggtggatctaccgcgtcgaccccacccgagtcaacgagtttggcatgagtggagaagaccccacagctgccgcccccgtggccgaggttcccacagcagcaggggccctcacgcccacacctgcacccaccacgaccaccgccaccagggaggaggcctccacgtccctgcccaccaagcccacccagggggccagctctgccagcgagccccaggaagcccctccaaagccagcagaggacaagaaaaaggattagtcgagactggtcctcacctgctccggctcctggcgaccactacccctgcgtcccggccccctcgcctcccctccctgtcgccctttccctggacagatcaggccggggcggtgggaggcccgcctcaggtcagggcccagcgtgtgacgtaggggccggggcaggccagggtttgtttgtggaggcgctgtctgtccctctgtccctctgtgtttccagccatctcgccctgccagcccagcaccactgggaatcatggtgaagctgatgcagcgttgccgagggggtgggttgggcgggggtggggccgggcccccctacgggatgcccacggccgttcatcatcttgtccctcgtccccctaccacactccccctcctagaccgccgccctttaacacagtctggatttaataaattcatatgggtgtttaacttaaactca

SEQ ID NO: 420549 - DNA, 2378 bp, Homo sapiens
gagcgcgaagtcggggacggggcggggctggcggcgggggcggggacccggagcgggaagatggcggcggcgcaggaggcggacggggcccgcagcgccgtggtggcggccgggggaggcagctccggtcaggtgaccagcaatggcagcatcgggagggacccgccagcggagacccagcctcagaacccaccggcccagccggcacccaatgcctggcaggtcatcaaaggtgtgctgtttaggatcttcatcatctgggccatcagcagttggttccgccgagggccggcccctcaggaccaggcgggccccggaggagccccacgcgtcgccagccgcaacctgttccccaaagacactttaatgaacctgcatgtgtacatctcagagcacgagcactttacagacttcaacgccacgtcggcactcttctgggaacagcacgatcttgtgtatggcgactggactagcggcgagaactcagacggctgctacgagcactttgctgagctcgatatcccacagagcgtccagcagaacggctccatctacatccacgtttacttcaccaagagtggcttccacccagacccccggcagaaggccctgtaccgccggcttgccacagtccacatgtcccggatgatcaacaaatacaagcgcagacgatttcagaaaaccaagaacctgctgacaggagagacagaagcggacccagaaatgatcaagagggctgaggactatgggcctgtggaggtgatctcccattggcaccccaacatcaccatcaacatcgtggacgaccacacgccgtgggtgaagggcagtgtgccccctcccctggatcaatatgtgaagttcgacgccgtgagcggtgactactatcccatcatctacttcaatgactactggaacctgcagaaggactactaccccatcaacgagagcctggccagcctgccgctccgcgtctccttctgcccactctcgctttggcgctggcagctctatgctgcccagagcaccaagtcgccctggaacttcctgggtgatgagttgtacgagcagtcagatgaggagcaggactcggtgaaggtggccctgctggagaccaacccctacctgctggcgctcaccatcatcgtgtctatcgttcacagtgtcttcgagttcctggccttcaagaatgatatccagttctggaacagccggcagtccctggagggcctgtccgtgcgctccgtcttcttcggcgttttccagtcattcgtggtcctcctctacatcctggacaacgagaccaacttcgtggtccaggtcagcgtcttcattggggtcctcatcgacctctggaagatcaccaaggtcatggacgtccggctggaccgagagcacagggtggcaggaatcttcccccgcctatccttcaaggacaagtccacgtatatcgagtcctcgaccaaagtgtatgatgatgcttcatcaccatgacgccccagctcttcatcaactacaagctcaagtctgtggcccaccttccctggcgcatgctcacctacaaggccctcaacacattcatcgacgacctgttcgcctttgtcatcaagatgcccgttatgtaccggatcggctgcctgcgggacgatgtggttttcttcatctacctctaccaacggtggatctaccgcgtcgaccccacccgagtcaacgagtttggcatgagtggagaagaccccacagctgccgcccccgtggccgaggttcccacagcagcaggggccctcacgcccacacctgcacccaccacgaccaccgccaccagggaggaggcctccacgtccctgcccaccaagcccacccagggggccagctctgccagcgagccccaggaagcccctccaaagccagcagaggacaagaaaaaggattagtcgagactggtcctcacctgctccggctcctggcgaccactacccctgcgtcccggccccctcgcctcccctccctgtcgccctttccctggacagatcaggccggggcggtgggaggcccgcctcaggtcagggcccagcgtgtgacgtaggggccggggcaggccagggtttgtttgtggaggcgctgtctgtccctctgtccctctgtgtttccagccatctcgccctgccagcccagcaccactgggaatcatggtgaagctgatgcagcgttgccgagggggtgggttgggcgggggtggggccgggcccccctacgggatgcccacggccgttcatcatcttgtccctcgtccccctaccacactccccctcctagaccgccgccctttaacacagtctggatttaataaattcatatgggtgtttaacttaaactca

SEQ ID NO: 420550 - DNA, 2393 bp, Homo sapiens
ccaccgtgcaagagtgtgtggagcctgctgtcatgaggctgggcttcgcagcctggcctaggatgccagccctgcctctacctctacctcggttttctacatgtggggtgggaggatcctgtcggtggccggaagggtcctgggtggcggaatctctaagcctagggaggagagccttctgccagcagttgctgtggtggctgatattctgctgccagggttgtcaggggagatggctcatgcctgttttcccagcattttgggaggccgaagcagaaggatcacttgagcccggaagttcaagatcagcccaggcagcatagtgagaccccatctcttccaaaaaagagaaaaaagaaagaaagaaaagaagctgtccatggtggctcacgcctctaatcccagcactttgggaggccgaggtgggaggatcgtgcttgagcccaggaattcgagaccagcttgggcagcatagtgagaccccatctcagaaaaaaaagaaagcaaagattaagattttctcgggaaccctggggaggaagtgtacagagagtgatagtccccgagcacttccacctgcctctgaggtccttccccccatgttgcctcagagggctgaggactatgggcctgtggaggtgatctcccattggcaccccaacatcaccatcaacatcgtggacgaccacacgccgtgggtgaagggcagtgtgccccctcccctggatcaatatgtgaagttcgacgccgtgagcggtgactactatcccatcatctacttcaatgactactggaacctgcagaaggactactaccccatcaacgagagcctggccagcctgccgctccgcgtctccttctgcccactctcgctttggcgctggcagctctatgctgcccagagcaccaagtcgccctggaacttcctgggtgatgagttgtacgagcagtcagatgaggagcaggactcggtgaaggtggccctgctggagaccaacccctacctgctggcgctcaccatcatcgtgtctatcgttcacagtgtcttcgagttcctggccttcaagaatgatatccagttctggaacagccggcagtccctggagggcctgtccgtgcgctccgtcttcttcggcgttttccagtcattcgtggtcctcctctacatcctggacaacgagaccaacttcgtggtccaggtcagcgtcttcattggggtcctcatcgacctctggaagatcaccaaggtcatggacgtccggctggaccgagagcacagggtggcaggaatcttcccccgcctatccttcaaggacaagtccacgtatatcgagtcctcgaccaaagtgtatgatgatatggcattccggtacctgtcctggatcctcttcccgctcctgggctgctatgccgtctacagtcttctgtacctggagcacaagggctggtactcctgggtgctcagcatgctctacggcttcctgctgaccttcggcttcatcaccatgacgccccagctcttcatcaactacaagctcaagtctgtggcccaccttccctggcgcatgctcacctacaaggccctcaacacattcatcgacgacctgttcgcctttgtcatcaagatgcccgttatgtaccggatcggctgcctgcgggacgatgtggttttcttcatctacctctaccaacggtggatctaccgcgtcgaccccacccgagtcaacgagtttggcatgagtggagaagaccccacagctgccgcccccgtggccgaggttcccacagcagcaggggccctcacgcccacacctgcacccaccacgaccaccgccaccagggaggaggcctccacgtccctgcccaccaagcccacccagggggccagctctgccagcgagccccaggaagcccctccaaagccagcagaggacaagaaaaaggattagtcgagactggtcctcacctgctccggctcctggcgaccactacccctgcgtcccggccccctcgcctcccctccctgtcgccctttccctggacagatcaggccggggcggtgggaggcccgcctcaggtcagggcccagcgtgtgacgtaggggccggggcaggccagggtttgtttgtggaggcgctgtctgtccctctgtccctctgtgtttccagccatctcgccctgccagcccagcaccactgggaatcatggtgaagctgatgcagcgttgccgagggggtgggttgggcgggggtggggccgggcccccctacgggatgcccacggccgttcatcatcttgtccctcgtccccctaccacactccccctcctagaccgccgccctttaacacagtctggatttaataaattcatatgggtgtttaacttaaactca

SEQ ID NO: 420551 - DNA, 1777 bp, Homo sapiens
gagcgcgaagtcggggacggggcggggctggcggcgggggcggggacccggagcgggaagatggcggcggcgcaggaggcggacggggcccgcagcgccgtggtggcggccgggggaggcagctccggtcaggtgaccagcaatggcagcatcgggagggacccgccagcggagacccagcctcagaacccaccggcccagccggcacccaatgcctggcaggtcatcaaaggtgtgctgtttaggatcttcatcatctgggccatcagcagttggttccgccgagggccggcccctcaggaccaggcgggccccggaggagccccacgcgtcgccagccgcaacctgttccccaaagacactttaatgaacctgcatgtgtacatctcagagcacgagcactttacagacttcaacgccacgtcggcactcttctgggaacagcacgatcttgtgtatggcgactggactagcggcgagaactcagacggctgctacgagcactttgctgagctcgatatcccacagagcgtccagcagaacggctccatctacatccacgtttacttcaccaagagtggcttccacccagacccccggcagaaggccctgtaccgccggcttgccacagtccacatgtcccggatgatcaacaaatacaagcgcagacgatttcagaaaaccaagaacctgctgacaggagagacagaagcggacccagaaatgatcaagagggctgaggactatgggcctgtggaggtgatctcccattggcaccccaacatcaccatcaacatcgtggacgaccacacgccgtgggtgaagggcagtgtgccccctcccctggatcaatatgtgaagttcgacgccgtgagcggtgactactatcccatcatctacttcaatgactactggaacctgcagaaggactactaccccatcaacgagagcctggccagcctgccgctccgcgtctccttctgcccactctcgctttggcgctggcagctctatgctgcccagagcaccaagtcgccctggaacttcctgggtgatgagttgtacgagcagtcagatgaggagcaggactcggtgaaggtggccctgctggagaccaacccctacctgctggcgctcaccatcatcgtgtctatcgttcacagtgtcttcgagttcctggccttcaagaatgatatccagttctggaacagccggcagtccctggagggcctgtccgtgcgctccgtcttcttcggcgttttccagtcattcgtggtcctcctctacatcctggacaacgagaccaacttcgtggtccaggtcagcgtcttcattggggtcctcatcgacctctggaagatcaccaaggtcatggacgtccggctggaccgagagcacagggtggcaggaatcttcccccgcctatccttcaaggacaagtccacgtatatcgagtcctcgaccaaagtgtatgatgatatggcattccggtacctgtcctggatcctcttcccgctcctgggctgctatgccgtctacagtcttctgtacctggagcacaagggctggtactcctgggtgctcagcatgctctacggcttcctgctgaccttcgggaccggtcatgcccgtccggaacgtctataagaaggagaaagctcgagtcatcactgaggaagagaagaatttcaaagccttcgctagtctccgtatggcccgtgccaacgcccggctcttcggcatacgggcaaaaagagccaaggaagcagcaccacga

SEQ ID NO: 420552 - DNA, 1185 bp, Homo sapiens
tcggtacctaccactcctatagatcagtagatcaccaaggtcatggacgtccggctggaccgagagcacagggtggcaggaatcttcccccgcctatccttcaaggacaagtccacgtatatcgagtcctcgaccaaagtgtatgatgatatggcattccggtacctgtcctggatcctcttcccgctcctgggctgctatgccgtctacagtcttctgtacctggagcacaagggctggtactcctgggtgctcagcatgctctacggcttcctgctgaccttcggcttcatcaccatgacgccccagctcttcatcaactacaagctcaagtctgtggcccaccttccctggcgcatgctcacctacaaggccctcaacacattcatcgacgacctgttcgcctttgtcatcaagatgcccgttatgtaccggatcggctgcctgcgggacgatgtggttttcttcatctacctctaccaacggtggatctaccgcgtcgaccccacccgagtcaacgagtttggcatgagtggagaagaccccacagctgccgcccccgtggccgaggttcccacagcagcaggggccctcacgcccacacctgcacccaccacgaccaccgccaccagggaggaggcctccacgtccctgcccaccaagcccacccagggggccagctctgccagcgagccccaggaagcccctccaaagccagcagaggacaagaaaaaggattagtcgagactggtcctcacctgctccggctcctggcgaccactacccctgcgtcccggccccctcgcctcccctccctgtcgccctttccctggacagatcaggccggggcggtgggaggcccgcctcaggtcagggcccagcgtgtgacgtaggggccggggcaggccagggtttgtttgtggaggcgctgtctgtccctctgtccctctgtgtttccagccatctcgccctgccagcccagcaccactgggaatcatggtgaagctgatgcagcgttgccgagggggtgggttgggcgggggtggggccgggcccccctacgggatgcccacggccgttcatcatcttgtccctcgtccccctaccacactccccctcctagaccgccgccctttaacacagtctggatttaataaattcatatgggtgtttaacttaaactca

SEQ ID NO: 420553 - DNA, 835 bp, Homo sapiens
gagcgcgaagtcggggacggggcggggctggcggcgggggcggggacccggagcgggaagatggcggcggcgcaggaggcggacggggcccgcagcgccgtggtggcggccgggggaggcagctccggtcaggtgaccagcaatggcagcatcgggagggacccgccagcggagacccagcctcagaacccaccggcccagccggcacccaatgcctggcaggtcatcaaaggtgtgctgtttaggatcttcatcatctgggccatcagcagttggttccgccgagggccggcccctcaggaccaggcgggccccggaggagccccacgcgtcgccagccgcaacctgttccccaaagacactttaatgaacctgcatgtgtacatctcagagcacgagcactttacagacttcaacgccacgtcggcactcttctgggaacagcacgatcttgtgtatggcgactggactagcggcgagaactcagacggctgctacgagcactttgctgagctcgatatcccacagagcgtccagcagaacggctccatctacatccacgtttacttcaccaagagtggcttccacccagacccccggcagaaggccctgtaccgccggcttgccacagtccacatgtcccggatgatcaacaaatacaagcgcagacgatttcagaaaaccaagaacctgctgacaggagagacagaagcggacccagaaatgatcaagagggctgaggactatgggcctgtggaggtgatctcccattggcacccaaataccataactagtgtagacttcaagtcgtaggtcgagtcaatcgatatgcagc

SEQ ID NO: 420554 - DNA, 2979 bp, Homo sapiens
gcttctggtacttttgacgcgtctgctaacgtagtccctcagtgcgcatccggacgtaggaggtggaggttgtggaattcgccgttcgaaagcagggactaaaagccccacttcgtcttacgttccgaaaggaaggcgtctgttgagcctttctctcagtcgtgagggaggcgtcgacggcgtgcggaagtcctgagttgaggcttgcgggatcctttccggagaaagcgcaggctaaagccgcaggtgaagatgtccaactacgtgaacgacatgtggccgggctcgccgcaggagaaggattcgccctcgacctcgcggtcgggcgggtccagccggctgtcgtcgcggtctaggagccgctctttttccagaagctctcggtcccattcccgcgtctcgagccggttttcgtccaggagtcggaggagcaagtccaggtcccgttcccgaaggcgccaccagcggaagtacaggcgctactcgcggtcatactcgcggagccggtcgcgatcccgcagccgccgttaccgagagaggcgctacgggttcaccaggagatactaccggtctccttcgcggtaccggtcccggtcccgtagcaggtcgcgctctcggggaaggtcgtactgcggaagggcgtacgcgatcgcgcggggacagcgctactacggctttggtcgcacagtgtacccggaggagcacagcagatggagggacagatccaggacgaggtcgcggagcagaaccccctttcgcttaagtgaaaaagatcgaatggagctgttagaaatagcaaaaaccaatgcagcgaaagctctaggaacaaccaacattgacttgccagctagtctcagaactgttccttcagccaaagaaacaagccgtggaataggtgtatcaagtaatggtgcaaagcctgaagtaagtattctaggtttgtcggaacaaaactttcagaaagccaactgtcaaatctgattagccacttatatcttagactatactttttgggaagtctagagatgtatataatgtgctaaattcaaagtagcaaatctgaagataggcaatgtcaaacccatgaaaatgggagattaatgagctttatttggccgtgcatggtgcctcatgcctgtaatgaggcagatggcttgagtccaggagttcaagactagcctgggcaatgtggcaaaaccgcgtgtttacaaaaaatacaaaaattagccaggcatggtggtgcatgcctgtagtcccagctgtttgggaggctgaggcaggaggatctttgagcctaggatgctaaggttgcagtgagccaagatggcaccattgcactctagcctgggcagcagagcgagaccctgtctcaaaaaatacatttatttttttcattttcagttaacagtgtactcttataacaccgttattagctggtactttggtgatttctattactagtttttctaagctatttacagagtgtttgtagctttcatttgcagcattatgttcccacaaattctgtactcagcatatacagtatagtttatctgctctatttctgtcttatagaaatcatgaatgtggtctgcagacattgatgaagaaaatctgttggtaattgatacatgggctaaagcatcagaggtttaatttgaagtttatgttcacacactgaaaacttagtttttttgttggtagatccatgtgcatgctagaatttgggacaggcactatttgcataaagtattaaagtcaatttttaaactaagcaaaggtacacgttgtaacggtggggcatctgtgaaaaagatgtccctttcataatatatgcaatatattccagatgttttgagagattacagaagaggaggcctgcttcacttgcagataagtttattataattctccagaaatgtgcaggatgtgcattagcaaattgcactgtacttttcactccagcctgggtgacagagcaagactcccgtctcgggggcttaaaaaaaaaaaaatgctgtatctaaatgaatctgtgtaattgggcccagatgtgggtttgctcagtattagtagacaaggtctttgttcagacgattaggtgcctaactggcaaatgccttagtttcttaaaacgtattttctgatgtggctttacatttcaaaagtgaacttgattcaacctgagaaaactgattaaaaaattagtttaaatttgccagcagggaagtaaaataattatgggaagagtgtcttaagcctaatattaaatcagttttgttaaggggaaaactcaatagttctgttacttaggctgttagatccaagttgatttttgtgtctacagctaaattttgtttacaattaggctattttttaatataggatttagaaaccaagggtatgtgttttaaaattacactttttcttaacctgtctagctgtcggaaaaggtaacagaagatggaactcgaaatcccaatgaaaaacctacccagcaaagaagcatagcttttagctctaataattctgtagcaaagccaatacaaaaatcagctaaagctgccacagaagaggcatcttcaagatcaccaaaaatagatcagaaaaaaagtccatatggactgtggatacctatctaaaagaagaaaactgatggctaagtttgcatgaaaactgcactttattgcaagttagtgtttctagcattatcccatccctttgagccattcaggggtacttgtgcatttaaaaaccaacacaaaaagatgtaaatacttaacactcaaatattaacattttaggtttctcttgcagatatgagagatagcacagatggaccaaaggttatgcacaggtgggagtcttttgtatatagttgtaaatattgtcttggttatgtaaaaatgaaattttttagacacagtaattgaactgtattcctgttttgtatatttaataaatttcttgttttcattc

SEQ ID NO: 420555 - DNA, 4121 bp, Homo sapiens
  misc_feature (965)..(965): n is a, c, g, or t
  misc_feature (1627)..(1627): n is a, c, g, or t
gcttctggtacttttgacgcgtctgctaacgtagtccctcagtgcgcatccggacgtaggaggtggaggttgtggaattcgccgttcgaaagcagggactaaaagccccacttcgtcttacgttccgaaaggaaggcgtctgttgagcctttctctcagtcgtgagggaggcgtcgacggcgtgcggaagtcctgagttgaggcttgcgggatcctttccggagaaagcgcaggctaaagccgcaggtgaagatgtccaactacgtgaacgacatgtggccgggctcgccgcaggagaaggattcgccctcgacctcgcggtcgggcgggtccagccggctgtcgtcgcggtctaggagccgctctttttccagaagctctcggtcccattcccgcgtctcgagccggttttcgtccaggagtcggaggagcaagtccaggtcccgttcccgaaggcgccaccagcggaagtacaggcgctactcgcggtcatactcgcggagccggtcgcgatcccgcagccgccgttaccgagagaggcgctacgggttcaccaggagatactaccggtctccttcgcggtaccggtcccggtcccgtagcaggtcgcgctctcggggaaggtcgtactgcggaagggcgtacgcgatcgcgcggggacagcgctactacggctttggtcgcacagtgtacccggaggagcacagcagatggagggacagatccaggacgaggtcgcggagcagaaccccctttcgcttaagtgaaaaaggtgggtgggtcatttacctttccatttgtggtaatgtatggtggcagtatatgagtaggctagggaaccaacgttgctgtgtagtttcaatattagttcctttagtgcccgaaatctttttggaggaaagagggaggacattacctgtatttaagtggacagcattctctttagggttaaaggtcaactggangttaaatggctcaggatgtagggaactttttttcctattggctgactgttcttagtgggtggagccttttaaatgttatgattaagttaaaggttctaagttaacgtgattgggaagaacaatatcaaaacacgccttcttttagttgacattattactgaataaaattggattgtcgagtatcctaagtgacctaggaggccgggcgcggcggctcacctctgtaatcccagcacttggggaggcggaggcggaggcgggtgggtcacttgaggccaggcgttccataccagcctggccaacatagctcactatctagtaaaagtacaaaaattagccgggggtggtggtagaaatacactttagtagtgtatcagtattggttcagtggttgtgataattatataaagaatctacagcagaaaaacctggttttcagaaatacatctttgaagagaaagcaaaataatatcactattagctagagaaaattaagtacaacaaaaagacaaaataataggacgctcaggcctttagtcaagaaaacaaaactaattgttgagataatttaagaattttattcttttcagcaagaaatgagctggagaatagaattttcagtgaataaagttacacagttgtccctctgttcactcgggggnttggtgccaggatgcatatggaaccctcgcgcacacttggggtttacagtctctcaaacactgtggtactttctatctgcatttagtaagggggagaaaaaacaagtataaagtggaccagcgcagctactagtgttcaagggcaaccttagtttacctattataaaacaagtgacttaatatatttaataccacaaaataacatatttattgtgtaattctgagttctcttgggaaataactaccagattaatgagtattttaaaatctctctcttttttttttagatcgaatggagctgttagaaatagcaaaaaccaatgcagcgaaagctctaggaacaaccaacattgacttgccagctagtctcagaactgttccttcagccaaagaaacaagccgtggaataggtgtatcaagtaatggtgcaaagcctgaagtaagtattctaggtttgtcggaacaaaactttcagaaagccaactgtcaaatctgattagccacttatatcttagactatactttttgggaagtctagagatgtatataatgtgctaaattcaaagtagcaaatctgaagataggcaatgtcaaacccatgaaaatgggagattaatgagctttatttggccgtgcatggtgcctcatgcctgtaatgaggcagatggcttgagtccaggagttcaagactagcctgggcaatgtggcaaaaccgcgtgtttacaaaaaatacaaaaattagccaggcatggtggtgcatgcctgtagtcccagctgtttgggaggctgaggcaggaggatctttgagcctaggatgctaaggttgcagtgagccaagatggcaccattgcactctagcctgggcagcagagcgagaccctgtctcaaaaaatacatttatttttttcattttcagttaacagtgtactcttataacaccgttattagctggtactttggtgatttctattactagtttttctaagctatttacagagtgtttgtagctttcatttgcagcattatgttcccacaaattctgtactcagcatatacagtatagtttatctgctctatttctgtcttatagaaatcatgaatgtggtctgcagacattgatgaagaaaatctgttggtaattgatacatgggctaaagcatcagaggtttaatttgaagtttatgttcacacactgaaaacttagtttttttgttggtagatccatgtgcatgctagaatttgggacaggcactatttgcataaagtattaaagtcaatttttaaactaagcaaaggtacacgttgtaacggtggggcatctgtgaaaaagatgtccctttcataatatatgcaatatattccagatgttttgagagattacagaagaggaggcctgcttcacttgcagataagtttattataattctccagaaatgtgcaggatgtgcattagcaaattgcactgtacttttcactccagcctgggtgacagagcaagactcccgtctcgggggcttaaaaaaaaaaaaatgctgtatctaaatgaatctgtgtaattgggcccagatgtgggtttgctcagtattagtagacaaggtctttgttcagacgattaggtgcctaactggcaaatgccttagtttcttaaaacgtattttctgatgtggctttacatttcaaaagtgaacttgattcaacctgagaaaactgattaaaaaattagtttaaatttgccagcagggaagtaaaataattatgggaagagtgtcttaagcctaatattaaatcagttttgttaaggggaaaactcaatagttctgttacttaggctgttagatccaagttgatttttgtgtctacagctaaattttgtttacaattaggctattttttaatataggatttagaaaccaagggtatgtgttttaaaattacactttttcttaacctgtctagctgtcggaaaaggtaacagaagatggaactcgaaatcccaatgaaaaacctacccagcaaagaagcatagcttttagctctaataattctgtagcaaagccaatacaaaaatcagctaaagctgccacagaagaggcatcttcaagatcaccaaaaatagatcagaaaaaaagtccatatggactgtggatacctatctaaaagaagaaaactgatggctaagtttgcatgaaaactgcactttattgcaagttagtgtttctagcattatcccatccctttgagccattcaggggtacttgtgcatttaaaaaccaacacaaaaagatgtaaatacttaacactcaaatattaacattttaggtttctcttgcagatatgagagatagcacagatggaccaaaggttatgcacaggtgggagtcttttgtatatagttgtaaatattgtcttggttatgtaaaaatgaaattttttagacacagtaattgaactgtattcctgttttgtatatttaataaatttcttgttttcattc

SEQ ID NO: 420556 - DNA, 4067 bp, Homo sapiens
  misc_feature (911)..(911): n is a, c, g, or t
  misc_feature (1573)..(1573): n is a, c, g, or t
gcttctggtacttttgacgcgtctgctaacgtagtccctcagtgcgcatccggacgtaggaggtggaggttgtggaattcgccgttcgaaagcagggactctcagtcgtgagggaggcgtcgacggcgtgcggaagtcctgagttgaggcttgcgggatcctttccggagaaagcgcaggctaaagccgcaggtgaagatgtccaactacgtgaacgacatgtggccgggctcgccgcaggagaaggattcgccctcgacctcgcggtcgggcgggtccagccggctgtcgtcgcggtctaggagccgctctttttccagaagctctcggtcccattcccgcgtctcgagccggttttcgtccaggagtcggaggagcaagtccaggtcccgttcccgaaggcgccaccagcggaagtacaggcgctactcgcggtcatactcgcggagccggtcgcgatcccgcagccgccgttaccgagagaggcgctacgggttcaccaggagatactaccggtctccttcgcggtaccggtcccggtcccgtagcaggtcgcgctctcggggaaggtcgtactgcggaagggcgtacgcgatcgcgcggggacagcgctactacggctttggtcgcacagtgtacccggaggagcacagcagatggagggacagatccaggacgaggtcgcggagcagaaccccctttcgcttaagtgaaaaaggtgggtgggtcatttacctttccatttgtggtaatgtatggtggcagtatatgagtaggctagggaaccaacgttgctgtgtagtttcaatattagttcctttagtgcccgaaatctttttggaggaaagagggaggacattacctgtatttaagtggacagcattctctttagggttaaaggtcaactggangttaaatggctcaggatgtagggaactttttttcctattggctgactgttcttagtgggtggagccttttaaatgttatgattaagttaaaggttctaagttaacgtgattgggaagaacaatatcaaaacacgccttcttttagttgacattattactgaataaaattggattgtcgagtatcctaagtgacctaggaggccgggcgcggcggctcacctctgtaatcccagcacttggggaggcggaggcggaggcgggtgggtcacttgaggccaggcgttccataccagcctggccaacatagctcactatctagtaaaagtacaaaaattagccgggggtggtggtagaaatacactttagtagtgtatcagtattggttcagtggttgtgataattatataaagaatctacagcagaaaaacctggttttcagaaatacatctttgaagagaaagcaaaataatatcactattagctagagaaaattaagtacaacaaaaagacaaaataataggacgctcaggcctttagtcaagaaaacaaaactaattgttgagataatttaagaattttattcttttcagcaagaaatgagctggagaatagaattttcagtgaataaagttacacagttgtccctctgttcactcgggggnttggtgccaggatgcatatggaaccctcgcgcacacttggggtttacagtctctcaaacactgtggtactttctatctgcatttagtaagggggagaaaaaacaagtataaagtggaccagcgcagctactagtgttcaagggcaaccttagtttacctattataaaacaagtgacttaatatatttaataccacaaaataacatatttattgtgtaattctgagttctcttgggaaataactaccagattaatgagtattttaaaatctctctcttttttttttagatcgaatggagctgttagaaatagcaaaaaccaatgcagcgaaagctctaggaacaaccaacattgacttgccagctagtctcagaactgttccttcagccaaagaaacaagccgtggaataggtgtatcaagtaatggtgcaaagcctgaagtaagtattctaggtttgtcggaacaaaactttcagaaagccaactgtcaaatctgattagccacttatatcttagactatactttttgggaagtctagagatgtatataatgtgctaaattcaaagtagcaaatctgaagataggcaatgtcaaacccatgaaaatgggagattaatgagctttatttggccgtgcatggtgcctcatgcctgtaatgaggcagatggcttgagtccaggagttcaagactagcctgggcaatgtggcaaaaccgcgtgtttacaaaaaatacaaaaattagccaggcatggtggtgcatgcctgtagtcccagctgtttgggaggctgaggcaggaggatctttgagcctaggatgctaaggttgcagtgagccaagatggcaccattgcactctagcctgggcagcagagcgagaccctgtctcaaaaaatacatttatttttttcattttcagttaacagtgtactcttataacaccgttattagctggtactttggtgatttctattactagtttttctaagctatttacagagtgtttgtagctttcatttgcagcattatgttcccacaaattctgtactcagcatatacagtatagtttatctgctctatttctgtcttatagaaatcatgaatgtggtctgcagacattgatgaagaaaatctgttggtaattgatacatgggctaaagcatcagaggtttaatttgaagtttatgttcacacactgaaaacttagtttttttgttggtagatccatgtgcatgctagaatttgggacaggcactatttgcataaagtattaaagtcaatttttaaactaagcaaaggtacacgttgtaacggtggggcatctgtgaaaaagatgtccctttcataatatatgcaatatattccagatgttttgagagattacagaagaggaggcctgcttcacttgcagataagtttattataattctccagaaatgtgcaggatgtgcattagcaaattgcactgtacttttcactccagcctgggtgacagagcaagactcccgtctcgggggcttaaaaaaaaaaaaatgctgtatctaaatgaatctgtgtaattgggcccagatgtgggtttgctcagtattagtagacaaggtctttgttcagacgattaggtgcctaactggcaaatgccttagtttcttaaaacgtattttctgatgtggctttacatttcaaaagtgaacttgattcaacctgagaaaactgattaaaaaattagtttaaatttgccagcagggaagtaaaataattatgggaagagtgtcttaagcctaatattaaatcagttttgttaaggggaaaactcaatagttctgttacttaggctgttagatccaagttgatttttgtgtctacagctaaattttgtttacaattaggctattttttaatataggatttagaaaccaagggtatgtgttttaaaattacactttttcttaacctgtctagctgtcggaaaaggtaacagaagatggaactcgaaatcccaatgaaaaacctacccagcaaagaagcatagcttttagctctaataattctgtagcaaagccaatacaaaaatcagctaaagctgccacagaagaggcatcttcaagatcaccaaaaatagatcagaaaaaaagtccatatggactgtggatacctatctaaaagaagaaaactgatggctaagtttgcatgaaaactgcactttattgcaagttagtgtttctagcattatcccatccctttgagccattcaggggtacttgtgcatttaaaaaccaacacaaaaagatgtaaatacttaacactcaaatattaacattttaggtttctcttgcagatatgagagatagcacagatggaccaaaggttatgcacaggtgggagtcttttgtatatagttgtaaatattgtcttggttatgtaaaaatgaaattttttagacacagtaattgaactgtattcctgttttgtatatttaataaatttcttgttttcattc

SEQ ID NO: 420557 - DNA, 2431 bp, Homo sapiens
gcttctggtacttttgacgcgtctgctaacgtagtccctcagtgcgcatccggacgtaggaggtggaggttgtggaattcgccgttcgaaagcagggactaaaagccccacttcgtcttacgttccgaaaggaaggcgtctgttgagcctttctctcagtcgtgagggaggcgtcgacggcgtgcggaagtcctgagttgaggcttgcgggatcctttccggagaaagcgcaggctaaagccgcaggtgaagatgtccaactacgtgaacgacatgtggccgggctcgccgcaggagaaggattcgccctcgacctcgcggtcgggcgggtccagccggctgtcgtcgcggtctaggagccgctctttttccagaagctctcggtcccattcccgcgtctcgagccggttttcgtccaggagtcggaggagcaagtccaggtcccgttcccgaaggcgccaccagcggaagtacaggcgctactcgcggtcatactcgcggagccggtcgcgatcccgcagccgccgttaccgagagaggcgctacgggttcaccaggagatactaccggtctccttcgcggtaccggtcccggtcccgtagcaggtcgcgctctcggggaaggtcgtactgcggaagggcgtacgcgatcgcgcggggacagcgctactacggctttggtcgcacagtgtacccggaggagcacagcagatggagggacagatccaggacgaggtcgcggagcagaaccccctttcgcttaagtgaaaaagatcgaatggagctgttagaaatagcaaaaaccaatgcagcgaaagctctaggaacaaccaacattgacttgccagctagtctcagaactgttccttcagccaaagaaacaagccgtggaataggtgtatcaagtaatggtgcaaagcctgaagtaagtattctaggtttgtcggaacaaaactttcagaaagccaactgtcaaatctgattagccacttatatcttagactatactttttgggaagtctagagatgtatataatgtgctaaattcaaagtagcaaatctgaagataggcaatgtcaaacccatgaaaatgggagattaatgagctttatttggccgtgcatggtgcctcatgcctgtaatgaggcagatggcttgagtccaggagttcaagactagcctgggcaatgtggcaaaaccgcgtgtttacaaaaaatacaaaaattagccaggcatggtggtgcatgcctgtagtcccagctgtttgggaggctgaggcaggaggatctttgagcctaggatgctaaggttgcagtgagccaagatggcaccattgcactctagcctgggcagcagagcgagaccctgtctcaaaaaatacatttatttttttcattttcagttaacagtgtactcttataacaccgttattagctggtactttggtgatttctattactagtttttctaagctatttacagagtgtttgtagctttcatttgcagcattatgttcccacaaattctgtactcagcatatacagtatagtttatctgctctatttctgtcttatagaaatcatgaatgtggtctgcagacattgatgaagaaaatctgttggtaattgatacatgggctaaagcatcagaggtttaatttgaagtttatgttcacacactgaaaacttagtttttttgttggtagatccatgtgcatgctagaatttgggacaggcactatttgcataaagtattaaagtcaatttttaaactaagcaaaggtacacgttgtaacggtggggcatctgtgaaaaagatgtccctttcataatatatgcaatatattccagatgttttgagagattacagaagaggaggcctgcttcacttgcagctgtcggaaaaggtaacagaagatggaactcgaaatcccaatgaaaaacctacccagcaaagaagcatagcttttagctctaataattctgtagcaaagccaatacaaaaatcagctaaagctgccacagaagaggcatcttcaagatcaccaaaaatagatcagaaaaaaagtccatatggactgtggatacctatctaaaagaagaaaactgatggctaagtttgcatgaaaactgcactttattgcaagttagtgtttctagcattatcccatccctttgagccattcaggggtacttgtgcatttaaaaaccaacacaaaaagatgtaaatacttaacactcaaatattaacattttaggtttctcttgcagatatgagagatagcacagatggaccaaaggttatgcacaggtgggagtcttttgtatatagttgtaaatattgtcttggttatgtaaaaatgaaattttttagacacagtaattgaactgtattcctgttttgtatatttaataaatttcttgttttcattc

SEQ ID NO: 420558 - DNA, 3010 bp, Homo sapiens
  misc_feature (965)..(965): n is a, c, g, or t
gcttctggtacttttgacgcgtctgctaacgtagtccctcagtgcgcatccggacgtaggaggtggaggttgtggaattcgccgttcgaaagcagggactaaaagccccacttcgtcttacgttccgaaaggaaggcgtctgttgagcctttctctcagtcgtgagggaggcgtcgacggcgtgcggaagtcctgagttgaggcttgcgggatcctttccggagaaagcgcaggctaaagccgcaggtgaagatgtccaactacgtgaacgacatgtggccgggctcgccgcaggagaaggattcgccctcgacctcgcggtcgggcgggtccagccggctgtcgtcgcggtctaggagccgctctttttccagaagctctcggtcccattcccgcgtctcgagccggttttcgtccaggagtcggaggagcaagtccaggtcccgttcccgaaggcgccaccagcggaagtacaggcgctactcgcggtcatactcgcggagccggtcgcgatcccgcagccgccgttaccgagagaggcgctacgggttcaccaggagatactaccggtctccttcgcggtaccggtcccggtcccgtagcaggtcgcgctctcggggaaggtcgtactgcggaagggcgtacgcgatcgcgcggggacagcgctactacggctttggtcgcacagtgtacccggaggagcacagcagatggagggacagatccaggacgaggtcgcggagcagaaccccctttcgcttaagtgaaaaaggtgggtgggtcatttacctttccatttgtggtaatgtatggtggcagtatatgagtaggctagggaaccaacgttgctgtgtagtttcaatattagttcctttagtgcccgaaatctttttggaggaaagagggaggacattacctgtatttaagtggacagcattctctttagggttaaaggtcaactggangttaaatggctcaggatgtagggaactttttttcctattggctgactgttcttagtgggtggagccttttaaatgttatgattaagttaaaggttctaagttaacgtgattgggaagaacaatatcaaaacacgccttcttttagttgacattattactgaataaaattggattgtcgagtatcctaagtgacctaggaggccgggcgcggcggctcacctctgtaatcccagcacttggggaggcggaggcggaggcgggtgggtcacttgaggccaggcgttccataccagcctggccaacatagctcactatctagtaaaagtacaaaaattagccgggggtggtggtagaaatacactttagtagtgtatcagtattggttcagtggttgtgataattatataaagaatctacacagagcgagaccctgtctcaaaaaatacatttatttttttcattttcagttaacagtgtactcttataacaccgttattagctggtactttggtgatttctattactagtttttctaagctatttacagagtgtttgtagctttcatttgcagcattatgttcccacaaattctgtactcagcatatacagtatagtttatctgctctatttctgtcttatagaaatcatgaatgtggtctgcagacattgatgaagaaaatctgttggtaattgatacatgggctaaagcatcagaggtttaatttgaagtttatgttcacacactgaaaacttagtttttttgttggtagatccatgtgcatgctagaatttgggacaggcactatttgcataaagtattaaagtcaatttttaaactaagcaaaggtacacgttgtaacggtggggcatctgtgaaaaagatgtccctttcataatatatgcaatatattccagatgttttgagagattacagaagaggaggcctgcttcacttgcagataagtttattataattctccagaaatgtgcaggatgtgcattagcaaattgcactgtacttttcactccagcctgggtgacagagcaagactcccgtctcgggggcttaaaaaaaaaaaaatgctgtatctaaatgaatctgtgtaattgggcccagatgtgggtttgctcagtattagtagacaaggtctttgttcagacgattaggtgcctaactggcaaatgccttagtttcttaaaacgtattttctgatgtggctttacatttcaaaagtgaacttgattcaacctgagaaaactgattaaaaaattagtttaaatttgccagcagggaagtaaaataattatgggaagagtgtcttaagcctaatattaaatcagttttgttaaggggaaaactcaatagttctgttacttaggctgttagatccaagttgatttttgtgtctacagctaaattttgtttacaattaggctattttttaatataggatttagaaaccaagggtatgtgttttaaaattacactttttcttaacctgtctagctgtcggaaaaggtaacagaagatggaactcgaaatcccaatgaaaaacctacccagcaaagaagcatagcttttagctctaataattctgtagcaaagccaatacaaaaatcagctaaagctgccacagaagaggcatcttcaagatcaccaaaaatagatcagaaaaaaagtccatatggactgtggatacctatctaaaagaagaaaactgatggctaagtttgcatgaaaactgcactttattgcaagttagtgtttctagcattatcccatccctttgagccattcaggggtacttgtgcatttaaaaaccaacacaaaaagatgtaaatacttaacactcaaatattaacattttaggtttctcttgcagatatgagagatagcacagatggaccaaaggttatgcacaggtgggagtcttttgtatatagttgtaaatattgtcttggttatgtaaaaatgaaattttttagacacagtaattgaactgtattcctgttttgtatatttaataaatttcttgttttcattc

SEQ ID NO: 420559 - DNA, 2738 bp, Homo sapiens
gcttctggtacttttgacgcgtctgctaacgtagtccctcagtgcgcatccggacgtaggaggtggaggttgtggaattcgccgttcgaaagcagggactaaaagccccacttcgtcttacgttccgaaaggaaggcgtctgttgagcctttctctcagtcgtgagggaggcgtcgacggcgtgcggaagtcctgagttgaggcttgcgggatcctttccggagaaagcgcaggctaaagccgcaggtgaagatgtccaactacgtgaacgacatgtggccgggctcgccgcaggagaaggattcgccctcgacctcgcggtcgggcgggtccagccggctgtcgtcgcggtctaggagccgctctttttccagaagctctcggtcccattcccgcgtctcgagccggttttcgtccaggagtcggaggagcaagtccaggtcccgttcccgaaggcgccaccagcggaagtacaggcgctactcgcggtcatactcgcggacagaaccccctttcgcttaagtgaaaaagatcgaatggagctgttagaaatagcaaaaaccaatgcagcgaaagctctaggaacaaccaacattgacttgccagctagtctcagaactgttccttcagccaaagaaacaagccgtggaataggtgtatcaagtaatggtgcaaagcctgaagtaagtattctaggtttgtcggaacaaaactttcagaaagccaactgtcaaatctgattagccacttatatcttagactatactttttgggaagtctagagatgtatataatgtgctaaattcaaagtagcaaatctgaagataggcaatgtcaaacccatgaaaatgggagattaatgagctttatttggccgtgcatggtgcctcatgcctgtaatgaggcagatggcttgagtccaggagttcaagactagcctgggcaatgtggcaaaaccgcgtgtttacaaaaaatacaaaaattagccaggcatggtggtgcatgcctgtagtcccagctgtttgggaggctgaggcaggaggatctttgagcctaggatgctaaggttgcagtgagccaagatggcaccattgcactctagcctgggcagcagagcgagaccctgtctcaaaaaatacatttatttttttcattttcagttaacagtgtactcttataacaccgttattagctggtactttggtgatttctattactagtttttctaagctatttacagagtgtttgtagctttcatttgcagcattatgttcccacaaattctgtactcagcatatacagtatagtttatctgctctatttctgtcttatagaaatcatgaatgtggtctgcagacattgatgaagaaaatctgttggtaattgatacatgggctaaagcatcagaggtttaatttgaagtttatgttcacacactgaaaacttagtttttttgttggtagatccatgtgcatgctagaatttgggacaggcactatttgcataaagtattaaagtcaatttttaaactaagcaaaggtacacgttgtaacggtggggcatctgtgaaaaagatgtccctttcataatatatgcaatatattccagatgttttgagagattacagaagaggaggcctgcttcacttgcagataagtttattataattctccagaaatgtgcaggatgtgcattagcaaattgcactgtacttttcactccagcctgggtgacagagcaagactcccgtctcgggggcttaaaaaaaaaaaaatgctgtatctaaatgaatctgtgtaattgggcccagatgtgggtttgctcagtattagtagacaaggtctttgttcagacgattaggtgcctaactggcaaatgccttagtttcttaaaacgtattttctgatgtggctttacatttcaaaagtgaacttgattcaacctgagaaaactgattaaaaaattagtttaaatttgccagcagggaagtaaaataattatgggaagagtgtcttaagcctaatattaaatcagttttgttaaggggaaaactcaatagttctgttacttaggctgttagatccaagttgatttttgtgtctacagctaaattttgtttacaattaggctattttttaatataggatttagaaaccaagggtatgtgttttaaaattacactttttcttaacctgtctagctgtcggaaaaggtaacagaagatggaactcgaaatcccaatgaaaaacctacccagcaaagaagcatagcttttagctctaataattctgtagcaaagccaatacaaaaatcagctaaagctgccacagaagaggcatcttcaagatcaccaaaaatagatcagaaaaaaagtccatatggactgtggatacctatctaaaagaagaaaactgatggctaagtttgcatgaaaactgcactttattgcaagttagtgtttctagcattatcccatccctttgagccattcaggggtacttgtgcatttaaaaaccaacacaaaaagatgtaaatacttaacactcaaatattaacattttaggtttctcttgcagatatgagagatagcacagatggaccaaaggttatgcacaggtgggagtcttttgtatatagttgtaaatattgtcttggttatgtaaaaatgaaattttttagacacagtaattgaactgtattcctgttttgtatatttaataaatttcttgttttcattc

SEQ ID NO: 420560 - DNA, 3056 bp, Homo sapiens
gcttctggtacttttgacgcgtctgctaacgtagtccctcagtgcgcatccggacgtaggaggtggaggttgtggaattcgccgttcgaaagcagggactaaaagccccacttcgtcttacgttccgaaaggaaggcgtctgttgagcctttctctcagtcgtgagggaggcgtcgacggcgtgcggaagtcctgagttgaggcttgcgggatcctttccggagaaagcgcaggctaaagccgcaggtgaagatgtccaactacgtgaacgacatgtggccgggctcgccgcaggagaaggattcgccctcgacctcgcggtcgggcgggtccagccggctgtcgtcgcggtctaggagccgctctttttccagaagctctcggtcccattcccgcgtctcgagccggttttcgtccaggagtcggaggagcaagtccaggtcccgttcccgaaggcgccaccagcggaagtacaggcgctactcgcggtcatactcgcggagccggtcgcgatcccgcagccgccgttaccgagagaggcgctacgggttcaccaggagatactaccggtctccttcgcggtaccggtcccggtcccgtagcaggtcgcgctctcggggaaggtcgtactgcggaagggcgtacgcgatcgcgcggggacagcgctactacggctttggtcgcacagtgtacccggaggagcacagcagatggagggacagatccaggacgaggtcgcggagcagaaccccctttcgcttaagtgaaaaagatcgaatggagctgttagaaatagcaaaaaccaatgcagcgaaagctctaggaacaaccaacattgacttgccagctagtctcagaactgttccttcagccaaagaaacaagccgtggaataggtgtatcaagtaatggtgcaaagcctgaagtaagtattctaggtttgtcggaacaaaactttcagaaagccaactgtcaaatctgattagccacttatatcttagactatactttttgggaagtctagagatgtatataatgtgctaaattcaaagtagcaaatctgaagataggcaatgtcaaacccatgaaaatgggagattaatgagctttatttggccgtgcatggtgcctcatgcctgtaatgaggcagatggcttgagtccaggagttcaagactagcctgggcaatgtggcaaaaccgcgtgtttacaaaaaatacaaaaattagccaggcatggtggtgcatgcctgtagtcccagctgtttgggaggctgaggcaggaggatctttgagcctaggatgctaaggttgcagtgagccaagatggcaccattgcactctagcctgggcagcagagcgagaccctgtctcaaaaaatacatttatttttttcattttcagttaacagtgtactcttataacaccgttattagctggtactttggtgatttctattactagtttttctaagctatttacagagtgtttgtagctttcatttgcagcattatgttcccacaaattctgtactcagcatatacagtatagtttatctgctctatttctgtcttatagaaatcatgaatgtggtctgcagacattgatgaagaaaatctgttggtaattgatacatgggctaaagcatcagaggtttaatttgaagtttatgttcacacactgaaaacttagtttttttgttggtagatccatgtgcatgctagaatttgggacaggcactatttgcataaagtattaaagtcaatttttaaactaagcaaaggtacacgttgtaacggtggggcatctgtgaaaaagatgtccctttcataatatatgcaatatattccagatgttttgagagattacagaagaggaggcctgcttcacttgcagataagtttattataattctccagaaatgtgcaggatgtgcattagcaaattgcactgtacttttcactccagcctgggtgacagagcaagactcccgtctcgggggcttaaaaaaaaaaaaatgctgtatctaaatgaatctgtgtaattgggcccagatgtgggtttgctcagtattagtagacaaggtctttgttcagacgattaggtgcctaactggcaaatgccttagtttcttaaaacgtattttctgatgtggctttacatttcaaaagtgaacttgattcaacctgagaaaactgattaaaaaattagtttaaatttgccagcagggaagtaaaataattatgggaagagtgtcttaagcctaatattaaatcagttttgttaaggggaaaactcaatagttctgttacttaggctgttagatccaagttgatttttgtgtctacagctaaattttgtttacaattaggctattttttaatataggatttagaaaccaagggtatgtgttttaaaattacactttttcttaacctgtctagctgtcggaaaaggtaacagaagatggaactcgaaatcccaatgaaaaacctacccagcaaagaagcatagcttttagctctaataattctgtagcaaagccaatacaaaaatcagctaaagctgccacagaagaggcatcttcaagatcaccaaaaatagatcagaaaaaaagtccatatggactgtggatacctatctaaaagaagaaaactgatggctaagtttgcatgaaaactgcactttattgcaagttagtgtttctagcattatcccatccctttgagccattcaggggtacttgtgcatttaaaaaccaacacaaaaagatgtaaatacttaacactcaaatattaacattttaggtttctcttgcagatatgagagatagcacagatggaccaaaggttatgcacaggtgggagtcttttgtggcagctttagctgatttttgtattggctttgctacagaattattagagctaaaagctatgcttctttgctgggtaggttttccattgggatttcgagttccatcttctgttaccttttccgacagctagacaggttaagaaaaagtgtaattttaaaacacatacccttggtttctaaatgtc

SEQ ID NO: 420561 - DNA, 2869 bp, Homo sapiens
gcttctggtacttttgacgcgtctgctaacgtagtccctcagtgcgcatccggacgtaggaggtggaggttgtggaattcgccgttcgaaagcagggactaaaagccccacttcgtcttacgttccgaaaggaaggcgtctgttgagcctttctctcagtcgtgagggaggcgtcgacggcgtgcggaagtcctgagttgaggcttgcgggatcctttccggagaaagcgcaggctaaagccgcaggtgaagatgtccaactacgtgaacgacatgtggccgggctcgccgcaggagaaggattcgccctcgacctcgcggtcgggcgggtccagccggctgtcgtcgcggtctaggagccgctctttttccagaagctctcggtcccattcccgcgtctcgagccggttttcgtccaggagtcggaggagcaagtccaggtcccgttcccgaaggcgccaccagcggaagtacaggcgctactcgcggtcatactcgcggagccggtcgcgatcccgcagccgccgttaccgagagaggcgctacgggttcaccaggagatactaccggtctccttcgcggtaccggtcccggtcccgtagcaggtcgcgctctcggggaaggtcgtactgcggaagggcgtacgcgatcgcgcggggacagcgctactacggctttggtcgcacagtgtacccggaggagcacagcagatggagggacagatccaggacgaggtcgcggagcagaaccccctttcgcttaagtgaaaaagatcgaatggagctgttagaaatagcaaaaaccaatgcagcgaaagctctaggaacaaccaacattgacttgccagctagtctcagaactgttccttcagccaaagaaacaagccgtggaataggtgtatcaagtaatggtgcaaagcctgaagtaagtattctaggtttgtcggaacaaaactttcagaaagccaactgtcaaatctgattagccacttatatcttagactatactttttgggaagtctagagatgtatataatgtgctaaattcaaagtagcaaatctgaagataggcaatgtcaaacccatgaaaatgggagattaatgagctttatttggccgtgcatggtgcctcatgcctgtaatgaggcagatggcttgagtccaggagttcaagactagcctgggcaatgtggcaaaaccgcgtgtttacaaaaaatacaaaaattagccaggcatggtggtgcatgcctgtagtcccagctgtttgggaggctgaggcaggaggatctttgagcctaggatgctaaggttgcagtgagccaagatggcaccattgcactctagcctgggcagcagagcgagaccctgtctcaaaaaatacatttatttttttcattttcagttaacagtgtactcttataacaccgttattagctggtactttggtgatttctattactagtttttctaagctatttacagagtgtttgtagctttcatttgcagcattatgttcccacaaattctgtactcagcatatacagtatagtttatctgctctatttctgtcttatagaaatcatgaatgtggtctgcagacattgatgaagaaaatctgttggtaattgatacatgggctaaagcatcagaggtttaatttgaagtttatgttcacacactgaaaacttagtttttttgttggtagatccatgtgcatgctagaatttgggacaggcactatttgcataaagtattaaagtcaatttttaaactaagcaaaggtacacgttgtaacggtggggcatctgtgaaaaagatgtccctttcataatatatgcaatatattccagatgttttgagagattacagaagaggaggcctgcttcacttgcagataagtttattataattctccagaaatgtgcaggatgtgcattagcaaattgcactgtacttttcactccagcctgggtgacagagcaagactcccgtctcgggggcttaaaaaaaaaaaaatgctgtatctaaatgaatctgtgtaattgggcccagatgtgggtttgctcagtattagtagacaaggtctttgttcagacgattaggtgcctaactggcaaatgccttagtttcttaaaacgtattttctgatgtggctttacatttcaaaagtgaacttgattcaacctgagaaaactgattaaaaaattagtttaaatttgccagcagggaagtaaaataattatgggaagagtgtcttaagcctaatattaaatcagttttgttaaggggaaaactcaatagttctgttacttaggctgttagatccaagttgatttttgtgtctacagctaaattttgtttacaattaggctattttttaatataggatttagaaaccaagggtatgtgttttaaaattacactttttcttaacctgtctagctgtcggaaaaggtaacagaagatggaactcgaaatcccaatgaaaaacctacccagcaaagaagcatagcttttagctctaataattctgtagcaaagccaatacaaaaatcagctaaagctgccacagaagaggcatcttcaagatcaccaaaaatagatcagaaaaaaagtccatatggactgtggatacctatctaaaagaagaaaactgatggctaagtttgcatgaaaactgcactttattgcaaaggtttctcttgcagatatgagagatagcacagatggaccaaaggttatgcacaggtgggagtcttttgtatatagttgtaaatattgtcttggttatgtaaaaatgaaattttttagacacagtaattgaactgtattcctgttttgtatatttaataaatttcttgttttcattc

SEQ ID NO: 420562 - DNA, 1714 bp, Homo sapiens
ccatgcaataacctccaggcgtgagccaccatgcctggccttacattgatttattgtattttttcttttctgttcttcttttttttccagagcgagaccctgtctcaaaaaatacatttatttttttcattttcagttaacagtgtactcttataacaccgttattagctggtactttggtgatttctattactagtttttctaagctatttacagagtgtttgtagctttcatttgcagcattatgttcccacaaattctgtactcagcatatacagtatagtttatctgctctatttctgtcttatagaaatcatgaatgtggtctgcagacattgatgaagaaaatctgttggtaattgatacatgggctaaagcatcagaggtttaatttgaagtttatgttcacacactgaaaacttagtttttttgttggtagatccatgtgcatgctagaatttgggacaggcactatttgcataaagtattaaagtcaatttttaaactaagcaaaggtacacgttgtaacggtggggcatctgtgaaaaagatgtccctttcataatatatgcaatatattccagatgttttgagagattacagaagaggaggcctgcttcacttgcagataagtttattataattctccagaaatgtgcaggatgtgcattagcaaattgcactgtacttttcactccagcctgggtgacagagcaagactcccgtctcgggggcttaaaaaaaaaaaaatgctgtatctaaatgaatctgtgtaattgggcccagatgtgggtttgctcagtattagtagacaaggtctttgttcagacgattaggtgcctaactggcaaatgccttagtttcttaaaacgtattttctgatgtggctttacatttcaaaagtgaacttgattcaacctgagaaaactgattaaaaaattagtttaaatttgccagcagggaagtaaaataattatgggaagagtgtcttaagcctaatattaaatcagttttgttaaggggaaaactcaatagttctgttacttaggctgttagatccaagttgatttttgtgtctacagctaaattttgtttacaattaggctattttttaatataggatttagaaaccaagggtatgtgttttaaaattacactttttcttaacctgtctagctgtcggaaaaggtaacagaagatggaactcgaaatcccaatgaaaaacctacccagcaaagaagcatagcttttagctctaataattctgtagcaaagccaatacaaaaatcagctaaagctgccacagaagaggcatcttcaagatcaccaaaaatagatcagaaaaaaagtccatatggactgtggatacctatctaaaagaagaaaactgatggctaagtttgcatgaaaactgcactttattgcaagttagtgtttctagcattatcccatccctttgagccattcaggggtacttgtgcatttaaaaaccaacacaaaaagatgtaaatacttaacactcaaatattaacattttaggtttctcttgcagatatgagagatagcacagatggaccaaaggttatgcacaggtgggagtcttttgtatatagttgtaaatattgtcttggttatgtaaaaatgaaattttttagacacagtaattgaactgtattcctgttttgtatatttaataaatttcttgttttcattc

SEQ ID NO: 420563 - DNA, 1813 bp, Homo sapiens
gcttctggtacttttgacgcgtctgctaacgtagtccctcagtgcgcatccggacgtaggaggtggaggttgtggaattcgccgttcgaaagcagggactaaaagccccacttcgtcttacgttccgaaaggaaggcgtctgttgagcctttctctcagtcgtgagggaggcgtcgacggcgtgcggaagtcctgagttgaggcttgcgggatcctttccggagaaagcgcaggctaaagccgcaggtgaagatgtccaactacgtgaacgacatgtggccgggctcgccgcaggagaaggattcgccctcgacctcgcggtcgggcgggtccagccggctgtcgtcgcggtctaggagccgctctttttccagaagctctcggtcccattcccgcgtctcgagccggttttcgtccaggagtcggaggagcaagtccaggtcccgttcccgaaggcgccaccagcggaagtacaggcgctactcgcggtcatactcgcggacagaaccccctttcgcttaagtgaaaaagatcgaatggagctgttagaaatagcaaaaaccaatgcagcgaaagctctaggaacaaccaacattgacttgccagctagtctcagaactgttccttcagccaaagaaacaagccgtggaataggtgtatcaagtaatggtgcaaagcctgaaatgttttgagagattacagaagaggaggcctgcttcacttgcagataagtttattataattctccagaaatgtgcaggatgtgcattagcaaattgcactgtacttttcactccagcctgggtgacagagcaagactcccgtctcgggggcttaaaaaaaaaaaaatgctgtatctaaatgaatctgtgtaattgggcccagatgtgggtttgctcagtattagtagacaaggtctttgttcagacgattaggtgcctaactggcaaatgccttagtttcttaaaacgtattttctgatgtggctttacatttcaaaagtgaacttgattcaacctgagaaaactgattaaaaaattagtttaaatttgccagcagggaagtaaaataattatgggaagagtgtcttaagcctaatattaaatcagttttgttaaggggaaaactcaatagttctgttacttaggctgttagatccaagttgatttttgtgtctacagctaaattttgtttacaattaggctattttttaatataggatttagaaaccaagggtatgtgttttaaaattacactttttcttaacctgtctagctgtcggaaaaggtaacagaagatggaactcgaaatcccaatgaaaaacctacccagcaaagaagcatagcttttagctctaataattctgtagcaaagccaatacaaaaatcagctaaagctgccacagaagaggcatcttcaagatcaccaaaaatagatcagaaaaaaagtccatatggactgtggatacctatctaaaagaagaaaactgatggctaagtttgcatgaaaactgcactttattgcaagttagtgtttctagcattatcccatccctttgagccattcaggggtacttgtgcatttaaaaaccaacacaaaaagatgtaaatacttaacactcaaatattaacattttaggtttctcttgcagatatgagagatagcacagatggaccaaaggttatgcacaggtgggagtcttttgtatatagttgtaaatattgtcttggttatgtaaaaatgaaattttttagacacagtaattgaactgtattcctgttttgtatatttaataaatttcttgttttcattc

SEQ ID NO: 420564 - DNA, 387 bp, Homo sapiens
aagagtgtcttaagcctaatattaaatcagttttgttaaggggaaaactcaatagttctgttacttaggctgttagatccaagttgatttttgtgtctacagctaaattttgtttacaattaggctattttttaatataggatttagaaaccaagggtatgtgttttaaaattacactttttcttaacctgtctagctgtcggaaaaggtaacagaagatggaactcgaaatcccaatgaaaaacctacccagcaaagaagcatagcttttagctctaatgtaagtatatccaggcattgaacactcaaaaattggatttaggatgtatttttgcatctttgtgtttttatctttgtggtgatagttgggggcctactgacacactt

SEQ ID NO: 420565 - DNA, 1462 bp, Homo sapiens
gcttctggtacttttgacgcgtctgctaacgtagtccctcagtgcgcatccggacgtaggaggtggaggttgtggaattcgccgttcgaaagcagggactaaaagccccacttcgtcttacgttccgaaaggaaggcgtctgttgagcctttctctcagtcgtgagggaggcgtcgacggcgtgcggaagtcctgagttgaggcttgcgggatcctttccggagaaagcgcaggctaaagccgcaggtgaagatgtccaactacgtgaacgacatgtggccgggctcgccgcaggagaaggattcgccctcgacctcgcggtcgggcgggtccagccggctgtcgtcgcggtctaggagccgctctttttccagaagctctcggtcccattcccgcgtctcgagccggttttcgtccaggagtcggaggagcaagtccaggtcccgttcccgaaggcgccaccagcggaagtacaggcgctactcgcggtcatactcgcggagccggtcgcgatcccgcagccgccgttaccgagagaggcgctacgggttcaccaggagatactaccggtctccttcgcggtaccggtcccggtcccgtagcaggtcgcgctctcggggaaggtcgtactgcggaagggcgtacgcgatcgcgcggggacagcgctactacggctttggtcgcacagtgtacccggaggagcacagcagatggagggacagatccaggacgaggtcgcggagcagaaccccctttcgcttaagtgaaaaagatcgaatggagctgttagaaatagcaaaaaccaatgcagcgaaagctctaggaacaaccaacattgacttgccagctagtctcagaactgttccttcagccaaagaaacaagccgtggaataggtgtatcaagtaatggtgcaaagcctgaactgtcggaaaaggtaacagaagatggaactcgaaatcccaatgaaaaacctacccagcaaagaagcatagcttttagctctaataattctgtagcaaagccaatacaaaaatcagctaaagctgccacagaagaggcatcttcaagatcaccaaaaatagatcagaaaaaaagtccatatggactgtggatacctatctaaaagaagaaaactgatggctaagtttgcatgaaaactgcactttattgcaagttagtgtttctagcattatcccatccctttgagccattcaggggtacttgtgcatttaaaaaccaacacaaaaagatgtaaatacttaacactcaaatattaacattttaggtttctcttgcagatatgagagatagcacagatggaccaaaggttatgcacaggtgggagtcttttgtatatagttgtaaatattgtcttggttatgtaaaaatgaaattttttagacacagtaattgaactgtattcctgttttgtatatttaataaatttcttgttttcattc

SEQ ID NO: 420566 - DNA, 2328 bp, Homo sapiens
gcttctggtacttttgacgcgtctgctaacgtagtccctcagtgcgcatccggacgtaggaggtggaggttgtggaattcgccgttcgaaagcagggactaaaagccccacttcgtcttacgttccgaaaggaaggcgtctgttgagcctttctctcagtcgtgagggaggcgtcgacggcgtgcggaagtcctgagttgaggcttgcgggatcctttccggagaaagcgcaggctaaagccgcaggtgaagatgtccaactacgtgaacgacatgtggccgggctcgccgcaggagaaggattcgccctcgacctcgcggtcgggcgggtccagccggctgtcgtcgcggtctaggagccgctctttttccagaagctctcggtcccattcccgcgtctcgagccggttttcgtccaggagtcggaggagcaagtccaggtcccgttcccgaaggcgccaccagcggaagtacaggcgctactcgcggtcatactcgcggagccggtcgcgatcccgcagccgccgttaccgagagaggcgctacgggttcaccaggagatactaccggtctccttcgcggtaccggtcccggtcccgtagcaggtcgcgctctcggggaaggtcgtactgcggaagggcgtacgcgatcgcgcggggacagcgctactacggctttggtcgcacagtgtacccggaggagcacagcagatggagggacagatccaggacgaggtcgcggagcagaaccccctttcgcttaagtgaaaaagatcgaatggagctgttagaaatagcaaaaaccaatgcagcgaaagctctaggaacaaccaacattgacttgccagctagtctcagaactgttccttcagccaaagaaacaagccgtggaataggtgtatcaagtaatggtgcaaagcctgaaaaatcatgaatgtggtctgcagacattgatgaagaaaatctgttggtaattgatacatgggctaaagcatcagaggtttaatttgaagtttatgttcacacactgaaaacttagtttttttgttggtagatccatgtgcatgctagaatttgggacaggcactatttgcataaagtattaaagtcaatttttaaactaagcaaaggtacacgttgtaacggtggggcatctgtgaaaaagatgtccctttcataatatatgcaatatattccagatgttttgagagattacagaagaggaggcctgcttcacttgcagataagtttattataattctccagaaatgtgcaggatgtgcattagcaaattgcactgtacttttcactccagcctgggtgacagagcaagactcccgtctcgggggcttaaaaaaaaaaaaatgctgtatctaaatgaatctgtgtaattgggcccagatgtgggtttgctcagtattagtagacaaggtctttgttcagacgattaggtgcctaactggcaaatgccttagtttcttaaaacgtattttctgatgtggctttacatttcaaaagtgaacttgattcaacctgagaaaactgattaaaaaattagtttaaatttgccagcagggaagtaaaataattatgggaagagtgtcttaagcctaatattaaatcagttttgttaaggggaaaactcaatagttctgttacttaggctgttagatccaagttgatttttgtgtctacagctaaattttgtttacaattaggctattttttaatataggatttagaaaccaagggtatgtgttttaaaattacactttttcttaacctgtctagctgtcggaaaaggtaacagaagatggaactcgaaatcccaatgaaaaacctacccagcaaagaagcatagcttttagctctaataattctgtagcaaagccaatacaaaaatcagctaaagctgccacagaagaggcatcttcaagatcaccaaaaatagatcagaaaaaaagtccatatggactgtggatacctatctaaaagaagaaaactgatggctaagtttgcatgaaaactgcactttattgcaagttagtgtttctagcattatcccatccctttgagccattcaggggtacttgtgcatttaaaaaccaacacaaaaagatgtaaatacttaacactcaaatattaacattttaggtttctcttgcagatatgagagatagcacagatggaccaaaggttatgcacaggtgggagtcttttgtatatagttgtaaatattgtcttggttatgtaaaaatgaaattttttagacacagtaattgaactgtattcctgttttgtatatttaataaatttcttgttttcattc

SEQ ID NO: 420567 - DNA, 2099 bp, Homo sapiens
gcttctggtacttttgacgcgtctgctaacgtagtccctcagtgcgcatccggacgtaggaggtggaggttgtggaattcgccgttcgaaagcagggactaaaagccccacttcgtcttacgttccgaaaggaaggcgtctgttgagcctttctctcagtcgtgagggaggcgtcgacggcgtgcggaagtcctgagttgaggcttgcgggatcctttccggagaaagcgcaggctaaagccgcaggtgaagatgtccaactacgtgaacgacatgtggccgggctcgccgcaggagaaggattcgccctcgacctcgcggtcgggcgggtccagccggctgtcgtcgcggtctaggagccgctctttttccagaagctctcggtcccattcccgcgtctcgagccggttttcgtccaggagtcggaggagcaagtccaggtcccgttcccgaaggcgccaccagcggaagtacaggcgctactcgcggtcatactcgcggagccggtcgcgatcccgcagccgccgttaccgagagaggcgctacgggttcaccaggagatactaccggtctccttcgcggtaccggtcccggtcccgtagcaggtcgcgctctcggggaaggtcgtactgcggaagggcgtacgcgatcgcgcggggacagcgctactacggctttggtcgcacagtgtacccggaggagcacagcagatggagggacagatccaggacgaggtcgcggagcagaaccccctttcgcttaagtgaaaaagatcgaatggagctgttagaaatagcaaaaaccaatgcagcgaaagctctaggaacaaccaacattgacttgccagctagtctcagaactgttccttcagccaaagaaacaagccgtggaataggtgtatcaagtaatggtgcaaagcctgaaaaatcatgaatgtggtctgcagacattgatgaagaaaatctgttgatgttttgagagattacagaagaggaggcctgcttcacttgcagataagtttattataattctccagaaatgtgcaggatgtgcattagcaaattgcactgtacttttcactccagcctgggtgacagagcaagactcccgtctcgggggcttaaaaaaaaaaaaatgctgtatctaaatgaatctgtgtaattgggcccagatgtgggtttgctcagtattagtagacaaggtctttgttcagacgattaggtgcctaactggcaaatgccttagtttcttaaaacgtattttctgatgtggctttacatttcaaaagtgaacttgattcaacctgagaaaactgattaaaaaattagtttaaatttgccagcagggaagtaaaataattatgggaagagtgtcttaagcctaatattaaatcagttttgttaaggggaaaactcaatagttctgttacttaggctgttagatccaagttgatttttgtgtctacagctaaattttgtttacaattaggctattttttaatataggatttagaaaccaagggtatgtgttttaaaattacactttttcttaacctgtctagctgtcggaaaaggtaacagaagatggaactcgaaatcccaatgaaaaacctacccagcaaagaagcatagcttttagctctaataattctgtagcaaagccaatacaaaaatcagctaaagctgccacagaagaggcatcttcaagatcaccaaaaatagatcagaaaaaaagtccatatggactgtggatacctatctaaaagaagaaaactgatggctaagtttgcatgaaaactgcactttattgcaagttagtgtttctagcattatcccatccctttgagccattcaggggtacttgtgcatttaaaaaccaacacaaaaagatgtaaatacttaacactcaaatattaacattttaggtttctcttgcagatatgagagatagcacagatggaccaaaggttatgcacaggtgggagtcttttgtatatagttgtaaatattgtcttggttatgtaaaaatgaaattttttagacacagtaattgaactgtattcctgttttgtatatttaataaatttcttgttttcattc

SEQ ID NO: 420568 - DNA, 3311 bp, Homo sapiens
gcttctggtacttttgacgcgtctgctaacgtagtccctcagtgcgcatccggacgtaggaggtggaggttgtggaattcgccgttcgaaagcagggactaaaagccccacttcgtcttacgttccgaaaggaaggcgtctgttgagcctttctctcagtcgtgagggaggcgtcgacggcgtgcggaagtcctgagttgaggcttgcgggatcctttccggagaaagcgcaggctaaagccgcaggtgaagatgtccaactacgtgaacgacatgtggccgggctcgccgcaggagaaggattcgccctcgacctcgcggtcgggcgggtccagccggctgtcgtcgcggtctaggagccgctctttttccagaagctctcggtcccattcccgcgtctcgagccggttttcgtccaggagtcggaggagcaagtccaggtcccgttcccgaaggcgccaccagcggaagtacaggcgctactcgcggtcatactcgcggagccggtcgcgatcccgcagccgccgttaccgagagaggcgctacgggttcaccaggagatactaccggtctccttcgcggtaccggtcccggtcccgtagcaggtcgcgctctcggggaaggtcgtactgcggaagggcgtacgcgatcgcgcggggacagcgctactacggctttggtcgcacagtgtacccggaggagcacagcagatggagggacagatccaggacgaggtcgcggagcagaaccccctttcgcttaagtgaaaaagatcgaatggagctgttagaaatagcaaaaaccaatgcagcgaaagctctaggaacaaccaacattgacttgccagctagtctcagaactgttccttcagccaaagaaacaagccgtggaataggtgtatcaagtaatggtgcaaagcctgaagtaagtattctaggtttgtcggaacaaaactttcagaaagccaactgtcaaatctgattagccacttatatcttagactatactttttgggaagtctagagatgtatataatgtgctaaattcaaagtagcaaatctgaagataggcaatgtcaaacccatgaaaatgggagattaatgagctttatttggccgtgcatggtgcctcatgcctgtaatgaggcagatggcttgagtccaggagttcaagactagcctgggcaatgtggcaaaaccgcgtgtttacaaaaaatacaaaaattagccaggcatggtggtgcatgcctgtagtcccagctgtttgggaggctgaggcaggaggatctttgagcctaggatgctaaggttgcagtgagccaagatggcaccattgcactctagcctgggcagcagagcgagaccctgtctcaaaaaatacatttatttttttcattttcagttaacagtgtactcttataacaccgttattagctggtactttggtgatttctattactagtttttctaagctatttacagagtgtttgtagctttcatttgcagcattatgttcccacaaattctgtactcagcatatacagtatagtttatctgctctatttctgtcttatagaaatcatgaatgtggtctgcagacattgatgaagaaaatctgttggtaattgatacatgggctaaagcatcagaggtttaatttgaagtttatgttcacacactgaaaacttagtttttttgttggtagatccatgtgcatgctagaatttgggacaggcactatttgcataaagtattaaagtcaatttttaaactaagcaaaggtacacgttgtaacggtggggcatctgtgaaaaagatgtccctttcataatatatgcaatatattccagatgttttgagagattacagaagaggaggcctgcttcacttgcagataagtttattataattctccagaaatgtgcaggatgtgcattagcaaattgcactgtacttttcactccagcctgggtgacagagcaagactcccgtctcgggggcttaaaaaaaaaaaaatgctgtatctaaatgaatctgtgtaattgggcccagatgtgggtttgctcagtattagtagacaaggtctttgttcagacgattaggtgcctaactggcaaatgccttagtttcttaaaacgtattttctgatgtggctttacatttcaaaagtgaacttgattcaacctgagaaaactgattaaaaaattagtttaaatttgccagcagggaagtaaaataattatgggaagagtgtcttaagcctaatattaaatcagttttgttaaggggaaaactcaatagttctgttacttaggctgttagatccaagttgatttttgtgtctacagctaaattttgtttacaattaggctattttttaatataggatttagaaaccaagggtatgtgttttaaaattacactttttcttaacctgtctagctgtcggaaaaggtaacagaagatggaactcgaaatcccaatgaaaaacctacccagcaaagaagcatagcttttagctctaataattctgtagcaaagccaatacaaaaatcagctaaagctgccacagaagaggcatcttcaagatcaccaaaaatagatcagaaaaaaagtccatatggactgtggatacctatctaaaagaagaaaactgatggctaagtttgcatgaaaactgcactttattgcaagttagtgtttctagcattatcccatccctttgagccattcaggggtacttgtgcatttaaaaaccaacacaaaaagatgtaaatacttaacactcaaatattaacattttaggtttctcttgcagatatgagagatagcacagatggaccaaaggttatgcacaggtgggagtcttttgtatatagttgtaaatattgtcttggttatgtaaaaatgaaattttttagacacagtaattgaactgtattcctgttttgtatatttaataaatttcttgttttcattcaaaaaaaaaaaaaaaaaaaaaaaaaaaaaaaaaaaaaaaaaaaaaaaaaaagaaaaaaaaaaaaaaaagagggcagaaacaaggaagaagaaggagaggagaaagagagagaagaaaaaagaaagaagagagagaggggaagagagagggctggagagatacgaggagaggtaggccacgaacacacagaagaaagaatacgagagagagaaaacaagaagaaaagaaaaaacagagaaagaagcaaagaagaaagagaaagaagagagaaaacagagagaagaaaagaacacagaagagacagaaagaggaaaggagaagaggaagagacg

SEQ ID NO: 420569 - DNA, 1507 bp, Homo sapiens
gcttctggtacttttgacgcgtctgctaacgtagtccctcagtgcgcatccggacgtaggaggtggaggttgtggaattcgccgttcgaaagcagggactaaaagccccacttcgtcttacgttccgaaaggaaggcgtctgttgagcctttctctcagtcgtgagggaggcgtcgacggcgtgcggaagtcctgagttgaggcttgcgggatcctttccggagaaagcgcaggctaaagccgcaggtgaagatgtccaactacgtgaacgacatgtggccgggctcgccgcaggagaaggattcgccctcgacctcgcggtcgggcgggtccagccggctgtcgtcgcggtctaggagccgctctttttccagaagctctcggtcccattcccgcgtctcgagccggttttcgtccaggagtcggaggagcaagtccaggtcccgttcccgaaggcgccaccagcggaagtacaggcgctactcgcggtcatactcgcggagccggtcgcgatcccgcagccgccgttaccgagagaggcgctacgggttcaccaggagatactaccggtctccttcgcggtaccggtcccggtcccgtagcaggtcgcgctctcggggaaggtcgtactgcggaagggcgtacgcgatcgcgcggggacagcgctactacggctttggtcgcacagtgtacccggaggagcacagcagatggagggacagatccaggacgaggtcgcggagcagaaccccctttcgcttaagtgaaaaagatcgaatggagctgttagaaatagcaaaaaccaatgcagcgaaagctctaggaacaaccaacattgacttgccagctagtctcagaactgttccttcagccaaagaaacaagccgtggaataggtgtatcaagtaatggtgcaaagcctgaaaaatcatgaatgtggtctgcagacattgatgaagaaaatctgttgctgtcggaaaaggtaacagaagatggaactcgaaatcccaatgaaaaacctacccagcaaagaagcatagcttttagctctaataattctgtagcaaagccaatacaaaaatcagctaaagctgccacagaagaggcatcttcaagatcaccaaaaatagatcagaaaaaaagtccatatggactgtggatacctatctaaaagaagaaaactgatggctaagtttgcatgaaaactgcactttattgcaagttagtgtttctagcattatcccatccctttgagccattcaggggtacttgtgcatttaaaaaccaacacaaaaagatgtaaatacttaacactcaaatattaacattttaggtttctcttgcagatatgagagatagcacagatggaccaaaggttatgcacaggtgggagtcttttgtatatagttgtaaatattgtcttggttatgtaaaaatgaaattttttagacacagtaattgaactgtattcctgttttgtatatttaataaatttcttgttttcattc

SEQ ID NO: 420570 - DNA, 2924 bp, Homo sapiens
gcttctggtacttttgacgcgtctgctaacgtagtccctcagtgcgcatccggacgtaggaggtggaggttgtggaattcgccgttcgaaagcagggactaaaagccccacttcgtcttacgttccgaaaggaaggcgtctgttgagcctttctctcagtcgtgagggaggcgtcgacggcgtgcggaagtcctgagttgaggcttgcgggatcctttccggagaaagcgcaggctaaagccgcaggtgaagatgtccaactacgtgaacgacatgtggccgggctcgccgcaggagaaggattcgccctcgacctcgcggtcgggcgggtccagccggctgtcgtcgcggtctaggagccgctctttttccagaagctctcggtcccattcccgcgtctcgagccggttttcgtccaggagtcggaggagcaagtccaggtcccgttcccgaaggcgccaccagcggaagtacaggcgctactcgcggtcatactcgcggagccggtcgcgatcccgcagccgccgttaccgagagaggcgctacgggttcaccaggagatactaccggtctccttcgcggtaccggtcccggtcccgtagcaggtcgcgctctcggggaaggtcgtactgcggaagggcgtacgcgatcgcgcggggacagcgctactacggctttggtcgcacagtgtacccggaggagcacagcagatggagggacagatccaggacgaggtcgcggagcagaaccccctttcgcttaagtgaaaaagatcgaatggagctgttagaaatagcaaaaaccaatgcagcgaaagctctaggaacaaccaacattgacttgccagctagtctcagaactgttccttcagccaaagaaacaagccgtggaataggtgtatcaagtaatggtgcaaagcctgaagtaagtattctaggtttgtcggaacaaaactttcagaaagccaactgtcaaatctgattagccacttatatcttagactatactttttgggaagtctagagatgtatataatgtgctaaattcaaagtagcaaatctgaagataggcaatgtcaaacccatgaaaatgggagattaatgagctttatttggccgtgcatggtgcctcatgcctgtaatgaggcagatggcttgagtccaggagttcaagactagcctgggcaatgtggcaaaaccgcgtgtttacaaaaaatacaaaaattagccaggcatggtggtgcatgcctgtagtcccagctgtttgggaggctgaggcaggaggatctttgagcctaggatgctaaggttgcagtgagccaagatggcaccattgcactctagcctgggcagcagagcgagaccctgtctcaaaaaatacatttatttttttcattttcagttaacagtgtactcttataacaccgttattagctggtactttggtgatttctattactagtttttctaagctatttacagagtgtttgtagctttcatttgcagcattatgttcccacaaattctgtactcagcatatacagtatagtttatctgctctatttctgtcttatagaaatcatgaatgtggtctgcagacattgatgaagaaaatctgttggtaattgatacatgggctaaagcatcagaggtttaatttgaagtttatgttcacacactgaaaacttagtttttttgttggtagatccatgtgcatgctagaatttgggacaggcactatttgcataaagtattaaagtcaatttttaaactaagcaaaggtacacgttgtaacggtggggcatctgtgaaaaagatgtccctttcataatatatgcaatatattccagatgttttgagagattacagaagaggaggcctgcttcacttgcagataagtttattataattctccagaaatgtgcaggatgtgcattagcaaattgcactgtacttttcactccagcctgggtgacagagcaagactcccgtctcgggggcttaaaaaaaaaaaaatgctgtatctaaatgaatctgtgtaattgggcccagatgtgggtttgctcagtattagtagacaaggtctttgttcagacgattaggtgcctaactggcaaatgccttagtttcttaaaacgtattttctgatgtggctttacatttcaaaagtgaacttgattcaacctgagaaaactgattaaaaaattagtttaaatttgccagcagggaagtaaaataattatgggaagagtgtcttaagcctaatattaaatcagttttgttaaggggaaaactcaatagttctgttacttaggctgttagatccaagttgatttttgtgtctacagctaaattttgtttacaattaggctattttttaatataggatttagaaaccaagggtatgtgttttaaaattacactttttcttaacctgtctagctgtcggaaaaggtaacagaagatggaactcgaaatcccaatgaaaaacctacccagcaaagaagcatagcttttagctctaataattctgtagcaaagccaatacaaaaatcagctaaagctgccacagaagaggcatcttcaagatcaccaaaaatagatcagaaaaaaagtccatatggactgtggatacctatctaaaagaagaaaactgatggctaagtttgcatgaaaactgcactttattgcaagttagtgtttctagcattatcccatccctttgagccattcaggggtacttgtgcaaggtttctcttgcagatatgagagatagcacagatggaccaaaggttatgcacaggtgggagtcttttgtatatagttgtaaatattgtcttggttatgtaaaaatgaaattttttagacacagtaattgaactgtattcctgttttgtatatttaataaatttcttgttttcattc

SEQ ID NO: 420571 - DNA, 728 bp, Homo sapiens
ccctttgaatctggagctgacttagtcatgtttctgccttcagagagctacccagtgggggagatggacatgcaggggatgaggcaccagagagaacacaacactctctgccctcaaggagcttggagtcaagagaaaagggagacaactaagcaaaaatgcatgaggagatgaagagcatgggggaaatgaggaagcccctgtctagcctgggcaggagggagatggtaaggaagtgataatagcagaggcctattctgaggagtccactgtacctgtgaagagccttgtctggcacatgctccagaagtattccaggtgtacatggacagaggccccggatactcgtaccctgtcgactggtggtccctgggcatcacagcctatgagctgctgcggggctgggtaagacaggcacctgtgcggtacacacgaggggctgtgcagtgggggctcacgttgtacctggacgggcagagtcggcagggcccgcggtgcaggaaggagcactgggggagtcactgccccccaggtttcagtcctgatgcctgtgtgccgcctatgaacgccctgaacttctggtccaacccactcattgtacagatgggaaagaggcattcagtgggggagggtcttacacaaaggcccacagcggatcagtgacaagtcaaacatcaaagcgccttggcctcgtggtttcaaacactgtcctctttgaacccacaaca

SEQ ID NO: 420572 - DNA, 324 bp, Homo sapiens
tctctgtccttctgtgctcctaggtactccttccaggatgaggaggacatgttcatggtggtggacctgctcctgggaggcgacctgcgctaccatctgcagcagaatgtgcatttcacagaggggactgtgaaactctacatctgtgagctggcactggccctggagtatcttcagaggtaccacatcatccacagcattttcatgaatttaaagcagatgcttcaaactctgtctttaaattcctcgttcctgttcccatggaccacttaattttaaaatgttaactcactaaaaggcaaataaacgatacactaaaagcac

SEQ ID NO: 420573 - DNA, 3455 bp, Homo sapiens
gtcccacatcccgcatccggcatcccagcggccgggcatgtagcagcggcagcaacggcggaatatgggcgggaaccactcccacaagccccccgtgtttgacgagaatgaggaagtcaactttgaccattttcagattctgcgggccattggtaaagggagttttggaaaggtatgcatcgtgcagaagcgagacactaagaaaatgtatgcaatgaagtacatgaacaagcagaagtgcatcgagagggatgaggttcggaatgttttccgggagctgcagatcatgcaagggctggagcaccccttcctggtcaatctgtggtactccttccaggatgaggaggacatgttcatggtggtggacctgctcctgggaggcgacctgcgctaccatctgcagcagaatgtgcatttcacagaggggactgtgaaactctacatctgtgagctggcactggccctggagtatcttcagaggtaccacatcatccacagagacatcaagccagacaatatcctgctggatgaacacggacatgttcacattacagacttcaacatagcgacggtagtgaaaggagcagaaagggcttcctccatggctggcaccaagccctacatggctccagaagtattccaggtgtacatggacagaggccccggatactcgtaccctgtcgactggtggtccctgggcatcacagcctatgagctgctgcggggctggaggccgtacgaaatccactcggtcacgcccatcgatgaaatcctcaacatgttcaaggtggagcgtgtccactactcctccacgtggtgcaaggggatggtggccctgctgaggaagctcctgaccaaggatcctgagagccgcgtgtccagccttcatgacatacagagcgtgccctacttggccgacatgaactgggacgcggtgttcaagaaggcactgatgcccggctttgtgcccaataaagggaggttgaactgcgatcccacatttgagcttgaagagatgattctagaatccaagccacttcacaaaaagaagaagcgattggcaaagaacagatccagggatggcacaaaggacagctgcccgctgaatggacacctgcagcactgtttggagactgtccgggaggaattcatcatattcaacagagagaagctcaggaggcagcagggacagggcagccagctcttggacaccgacagccgagggggaggccaggcccaaagcaagctccaggacgggtgcaacaacaacctcctcacccacacctgcacccgtggctgcagcagctgagcccacacttgttgctgctcaacaggactgcactcgtctctgccctgcccacccagagcccctctttgtgccctgatggtccctgtctcacccctgaaaacatcagatgcagaaaaagccctggacttggagctgggaagcctgggttctggtcccatctccatgactgattcacgtgtgacctcagacaagtcacgccctctctgtgcctccgttttctgcatctgccaaaggggttaaacacttctgccccacttcaaattacaagattatggggagaacccaattaggtaggaaacatgaaaaacctttgatatttataaaatcatttttacgtgcaaaatataaccttaatatttgaagtgacccccattccccaaagcaatcaaaccgtcatgactttgcaatttggcacatcctagcttgttagagggcacttccgaaaaacacagccctgacagcaaaataaaggtctgatatgttggccccttctatggaaacaacgctgccaaatcctggagcaaaacctgaagtgtcttcatgtgcattctctggcaggccacagtccttctgagcttgtaagatggtgcagcatgcagaccagacttgtccccaaggtctcagcgctgcggtctcactcctcccctcatttaagaagactatccttaccttttagtttcagcagtcctcaccaccaccatatccccagtgctgggatggcacacaggtgtccattcagatgagagttgggtcgctgagcattggttactcctgcagagtgtaatcagcaccccatccaactggcccgaaagcccagacctgcagcagaactctccaactctctatcagctttcagggttttctctcctgggaagggtgtaaaatcagcttgtcagattcttcttacagagagtatccaatcggtattggtggagcggctccctatttatacaataggaagcatgggtgcttagaaagtttatttcaggaggaaaatgggttcacacaaaaagcaaactacattctgatctgctcagggagaagcttgcctttgaactggaagatgttgggatgagcagggaaagcttagactttggagtcaggtttgtgttcagaatccagccctgctggctactaactaactgggagaccttaggcaaagcatgcaatcgctctgaatggcagtttcctcatttttaaacagggataataaaactaatattgcaggggagttacagggttaaataagatcctgtgtgtaaccccaagcattggatgactcatagaatggccttttttgtcagcataatcgtcatcattatttagatactttcttccttcactcacccagcaggtcagttttctgtgcaaacaaacctgtttaggattcttccaaatgttcttcctggggtctttgatatttgtttgttacatcctgctgaagttcgactgtgtttttattttttcatccaacttccatttttcactttttacatgattactcaatccttggggctgtccatgtcatctcttagatttcttaaaagacattttaatgtatggttaggttttatatttttattttttaaaaaagaaatagtcagtgttttcctcctttcaaccgagactatttctggattgtgtgctcctcgtcagttgacttgttttgcacacttttctttacttcatgtccccatcaacaaccgtcctgctccccacctcccccaggaaataaggggcctgctcctctccctactgtgaccctggaggctcttaagatgatgatggttttttttattgggctgagttcacgaattaggggcaggagctggaagtcgccctaggaacaccagatttcctggttctgttcaagttggcatttcttgtttggaataaactatttcttggacattccttttccaaaaaaaaaaaaaaaaaaaaaaaaaacacaacaatacatatcctacccaaacacaaccacacacacccaccacccaccaccctcccaacaccatcacaacaccaaccgcgcgcaccctacaaaatatttctccgagcgacccccacttaactaccacccccttttttcaaacacgcacccccataggatactttataaccgaccccccccttttaacacttctcc

SEQ ID NO: 420574 - DNA, 3084 bp, Homo sapiens
ctcccctgctgccatgtgtaaatgccgtttacttctcctttgccttccgccatgattgtactccttccaggatgaggaggacatgttcatggtggtggacctgctcctgggaggcgacctgcgctaccatctgcagcagaatgtgcatttcacagaggggactgtgaaactctacatctgtgagctggcactggccctggagtatcttcagaggtaccacatcatccacagagacatcaagccagacaatatcctgctggatgaacacggacatgttcacattacagacttcaacatagcgacggtagtgaaaggagcagaaagggcttcctccatggctggcaccaagccctacatggaggccgtacgaaatccactcggtcacgcccatcgatgaaatcctcaacatgttcaaggtggagcgtgtccactactcctccacgtggtgcaaggggatggtggccctgctgaggaagctcctgaccaaggatcctgagagccgcgtgtccagccttcatgacatacagagcgtgccctacttggccgacatgaactgggacgcggtgttcaagaaggcactgatgcccggctttgtgcccaataaagggaggttgaactgcgatcccacatttgagcttgaagagatgattctagaatccaagccacttcacaaaaagaagaagcgattggcaaagaacagatccagggatggcacaaaggacagctgcccgctgaatggacacctgcagcactgtttggagactgtccgggaggaattcatcatattcaacagagagaagctcaggaggcagcagggacagggcagccagctcttggacaccgacagccgagggggaggccaggcccaaagcaagctccaggacgggtgcaacaacaacctcctcacccacacctgcacccgtggctgcagcagctgagcccacacttgttgctgctcaacaggactgcactcgtctctgccctgcccacccagagcccctctttgtgccctgatggtccctgtctcacccctgaaaacatcagatgcagaaaaagccctggacttggagctgggaagcctgggttctggtcccatctccatgactgattcacgtgtgacctcagacaagtcacgccctctctgtgcctccgttttctgcatctgccaaaggggttaaacacttctgccccacttcaaattacaagattatggggagaacccaattaggtaggaaacatgaaaaacctttgatatttataaaatcatttttacgtgcaaaatataaccttaatatttgaagtgacccccattccccaaagcaatcaaaccgtcatgactttgcaatttggcacatcctagcttgttagagggcacttccgaaaaacacagccctgacagcaaaataaaggtctgatatgttggccccttctatggaaacaacgctgccaaatcctggagcaaaacctgaagtgtcttcatgtgcattctctggcaggccacagtccttctgagcttgtaagatggtgcagcatgcagaccagacttgtccccaaggtctcagcgctgcggtctcactcctcccctcatttaagaagactatccttaccttttagtttcagcagtcctcaccaccaccatatccccagtgctgggatggcacacaggtgtccattcagatgagagttgggtcgctgagcattggttactcctgcagagtgtaatcagcaccccatccaactggcccgaaagcccagacctgcagcagaactctccaactctctatcagctttcagggttttctctcctgggaagggtgtaaaatcagcttgtcagattcttcttacagagagtatccaatcggtattggtggagcggctccctatttatacaataggaagcatgggtgcttagaaagtttatttcaggaggaaaatgggttcacacaaaaagcaaactacattctgatctgctcagggagaagcttgcctttgaactggaagatgttgggatgagcagggaaagcttagactttggagtcaggtttgtgttcagaatccagccctgctggctactaactaactgggagaccttaggcaaagcatgcaatcgctctgaatggcagtttcctcatttttaaacagggataataaaactaatattgcaggggagttacagggttaaataagatcctgtgtgtaaccccaagcattggatgactcatagaatggccttttttgtcagcataatcgtcatcattatttagatactttcttccttcactcacccagcaggtcagttttctgtgcaaacaaacctgtttaggattcttccaaatgttcttcctggggtctttgatatttgtttgttacatcctgctgaagttcgactgtgtttttattttttcatccaacttccatttttcactttttacatgattactcaatccttggggctgtccatgtcatctcttagatttcttaaaagacattttaatgtatggttaggttttatatttttattttttaaaaaagaaatagtcagtgttttcctcctttcaaccgagactatttctggattgtgtgctcctcgtcagttgacttgttttgcacacttttctttacttcatgtccccatcaacaaccgtcctgctccccacctcccccaggaaataaggggcctgctcctctccctactgtgaccctggaggctcttaagatgatgatggttttttttattgggctgagttcacgaattaggggcaggagctggaagtcgccctaggaacaccagatttcctggttctgttcaagttggcatttcttgtttggaataaactatttcttggacattccttttccaaaaaaaaaaaaaaaaaaaaaaaaaacacaacaatacatatcctacccaaacacaaccacacacacccaccacccaccaccctcccaacaccatcacaacaccaaccgcgcgcaccctacaaaatatttctccgagcgacccccacttaactaccacccccttttttcaaacacgcacccccataggatactttataaccgaccccccccttttaacacttctcc

SEQ ID NO: 420575 - DNA, 386 bp, Homo sapiens
ttgctatttttattatgactgtttatttatttagtcagttaacaaatttttcctgcatatcttcttggtaccaggcaggggatgaggcaccagagagaacacaacactctctgccctcaaggagcttggagtcaagagaaaagggagacaactaagcaaaaatgcatgaggagatgaagagcatgggggaaatgaggaagcccctgtctagcctgggcaggagggagatggtaaggaagtgataatagcagaggcctattctgaggagtccactgtacctgtgaagagccttgtctggcacatggtaggttcctggaggacgaaaccctagggctgcaccttctgtgagttgggaaagagtgtcaggaacagagacagagacaggg

SEQ ID NO: 420576 - DNA, 2998 bp, Homo sapiens
tgttgtgttctaccatcagctccaagtgtgtgggggaggagggaatgtcaccttctctaggactgcagacatttgtcgcttgtctgatcatgacagccaggacaggatcactctgctgctgcttctaccctgagttctgaatggacttggggctgccaggcatgacaagctccagaagtattccaggtgtacatggacagaggccccggatactcgtaccctgtcgactggtggtccctgggcatcacagcctatgagctgctgcggggctggaggccgtacgaaatccactcggtcacgcccatcgatgaaatcctcaacatgttcaaggtggagcgtgtccactactcctccacgtggtgcaaggggatggtggccctgctgaggaagctcctgaccaaggatcctgagagccgcgtgtccagccttcatgacatacagagcgtgccctacttggccgacatgaactgggacgcggtgttcaagaaggcactgatgcccggctttgtgcccaataaagggaggttgaactgcgatcccacatttgagcttgaagagatgattctagaatccaagccacttcacaaaaagaagaagcgattggcaaagaacagatccagggatggcacaaaggacagctgcccgctgaatggacacctgcagcactgtttggagactgtccgggaggaattcatcatattcaacagagagaagctcaggaggcagcagggacagggcagccagctcttggacaccgacagccgagggggaggccaggcccaaagcaagctccaggacgggtgcaacaacaacctcctcacccacacctgcacccgtggctgcagcagctgagcccacacttgttgctgctcaacaggactgcactcgtctctgccctgcccacccagagcccctctttgtgccctgatggtccctgtctcacccctgaaaacatcagatgcagaaaaagccctggacttggagctgggaagcctgggttctggtcccatctccatgactgattcacgtgtgacctcagacaagtcacgccctctctgtgcctccgttttctgcatctgccaaaggggttaaacacttctgccccacttcaaattacaagattatggggagaacccaattaggtaggaaacatgaaaaacctttgatatttataaaatcatttttacgtgcaaaatataaccttaatatttgaagtgacccccattccccaaagcaatcaaaccgtcatgactttgcaatttggcacatcctagcttgttagagggcacttccgaaaaacacagccctgacagcaaaataaaggtctgatatgttggccccttctatggaaacaacgctgccaaatcctggagcaaaacctgaagtgtcttcatgtgcattctctggcaggccacagtccttctgagcttgtaagatggtgcagcatgcagaccagacttgtccccaaggtctcagcgctgcggtctcactcctcccctcatttaagaagactatccttaccttttagtttcagcagtcctcaccaccaccatatccccagtgctgggatggcacacaggtgtccattcagatgagagttgggtcgctgagcattggttactcctgcagagtgtaatcagcaccccatccaactggcccgaaagcccagacctgcagcagaactctccaactctctatcagctttcagggttttctctcctgggaagggtgtaaaatcagcttgtcagattcttcttacagagagtatccaatcggtattggtggagcggctccctatttatacaataggaagcatgggtgcttagaaagtttatttcaggaggaaaatgggttcacacaaaaagcaaactacattctgatctgctcagggagaagcttgcctttgaactggaagatgttgggatgagcagggaaagcttagactttggagtcaggtttgtgttcagaatccagccctgctggctactaactaactgggagaccttaggcaaagcatgcaatcgctctgaatggcagtttcctcatttttaaacagggataataaaactaatattgcaggggagttacagggttaaataagatcctgtgtgtaaccccaagcattggatgactcatagaatggccttttttgtcagcataatcgtcatcattatttagatactttcttccttcactcacccagcaggtcagttttctgtgcaaacaaacctgtttaggattcttccaaatgttcttcctggggtctttgatatttgtttgttacatcctgctgaagttcgactgtgtttttattttttcatccaacttccatttttcactttttacatgattactcaatccttggggctgtccatgtcatctcttagatttcttaaaagacattttaatgtatggttaggttttatatttttattttttaaaaaagaaatagtcagtgttttcctcctttcaaccgagactatttctggattgtgtgctcctcgtcagttgacttgttttgcacacttttctttacttcatgtccccatcaacaaccgtcctgctccccacctcccccaggaaataaggggcctgctcctctccctactgtgaccctggaggctcttaagatgatgatggttttttttattgggctgagttcacgaattaggggcaggagctggaagtcgccctaggaacaccagatttcctggttctgttcaagttggcatttcttgtttggaataaactatttcttggacattccttttccaaaaaaaaaaaaaaaaaaaaaaaaaacacaacaatacatatcctacccaaacacaaccacacacacccaccacccaccaccctcccaacaccatcacaacaccaaccgcgcgcaccctacaaaatatttctccgagcgacccccacttaactaccacccccttttttcaaacacgcacccccataggatactttataaccgaccccccccttttaacacttctcc

SEQ ID NO: 420577 - DNA, 5949 bp, Homo sapiens
ggaaggggacgaggacaacgagcgactgggcggcggaggacgaggaggaggaagaggaggccgagcaacaagatggcccctgctgcaggagcagcctcagcagcagcaggtgggaggccggaggcggtgctggcggtggcggcggcagccgtggcccggcggcctgggacagaatcagagtcaacggtggcctcggcggcggcggcggctgccgcggcggtggcgacggccgcggggactcggagctgagaggagctgctgctcggaccagcgcggtgagcgagcggcgggcggcgacttggggagcggggctgccgcggccggggcctcagtcgggaacaataggcagctgtggtcgggaagggtttgtcctcgcccgccctctgctcctccgcggcagcggcagcccggccggccccaggctcctcagggcccccgccggctgttctggggcttgtcagtggccggcgtcctttaggcctcaggcctctgcatgccgcctgtagggcctgtcggggtaggtaggccgagaggaggacgaagggaggctcggacgagagggagggggcgaaagggctacctggctcctgtggtactcccagggcctgggccaggcggggaatgcgcacgggaactgctttttggacccctagtctgtgggggtgggggagggcgaaggcgtctgtaaacaggcgccgcctcggcctcccagcacctcagggctgcttcctcccccagcccctgaagcgctccccttctttggccaagtggatttcacggtgtctgtttccctgaagtccctggagatctagcctggtagtcttctccctgctggcgatgggaaaattgtgtgtgtgcaggtgtctttaaaaaaaaaaaacaaaaaacttaaatgcaacaaaaacatataaaatgtggttatcggtaaaggatggagtggtaagggatgcgcctctctaaacatctctaagtatcagttctataaacatcagttatgcccgcatcccaggtgagagtggattgaaacaagggctcttttggaacagtaataacacaactcttgacataccagaatagcctatgaaactggaaacaaacactggcaacgcggagacaaactgtaatgtttaaagaggacttttattccagctaggcgttttgaattactaacatgcagtataagaagcaacattaactagcataaagtggacctcaggaagcacttcgaaaggagacaggtggttcatctccggccatagagcttcttgtgccttgtctcgtgtttcagtaatttttcctgaaattgttcaagaccagtcttttctctgagtttgaaatttgatttcgtttttgttttgttttgcgacggagtcttgctctgtcacccaggctggattgcagtggcacaatctcggctcactacagcctccacctcccggattcaagcgattctcctgcctcaccatccggagtagctgggattacaggcgcccgccaccatgcccggctgatttttgtatttttagtagagacggggtttcaccatgttggccaggctggtctggaactcctgacctcaagtcatctgccctcctccgcctcccaaagtgcttggattacaggcgtgagccacctcgctcagccttaaacttaatttttcaaggcttctaccacattttcttacaagtgagggaaaaggtagatttatttctaaagtactttctacctaggtatgcagaaatttatattaaaatcgcttggatacatccaaggagattgcttttcacttgttaacattcaactgcaaggcctaagggttataggttgtgttcttttcagcactgacctgtgctgaaaagatgccagttaatatctttcacctcttctaagggtaaatttctaagtagaattggtccaagtctgttctaattaaaaacattataagcagcactagtctagttcttagttcttccacaacaattgacactgaatagattagcaattgaataaacataaaggttgaattttcttgtttaggatttgaagtatagtgaatgaatatcaatactgaccttcattttatgcttagcataaataatgttggagatgttttgattttttgaatgatggagaaataacaactttctatggctcctgatgttgtgacttttttgcagatatttcagaaaggacaccgtttttcaggtgctcaaatctgtgattttttttttttttctgtgctaattttgttaggtcagcacagattccaagtaaagtctgtgttataatgatacttaaatttatgtatggccctaaacctattagaacaattgtagtaatttataggttgtaagttttaagtggttcatgtgctgtgttatgaaaacaatctcaccgtgttatgtcaagggcagatttacctcatatttaatatcattttcctgaaaataaatatttttaagtggtaaggttttgtatttcagattggttattgacccagcaatttatgggcttagtctgggtccgtatttctgttcaataggaaaaaaatttagggaattgtttttatttattttgtgtcaaaacagttttaagttttgacacaaactcaactgtcccttcttcagtatcaatacttattacttaagttcacattttctcaggtaataaaaatttacttctaagaagttttggaaccagagcttaagaattagatttatattttcttggtaatattaaaagttaatatatgcttgatttatttgaagaaataaaaaagggtaatttgtacacaacgcctttcagaacatatttgttgaatgaataaaaatatttaagcttcctcattatgctgcagtattagttctgttgtcctcattttttcatatgaagaatgtgaagctaagagtagctatgtaaccagcaaaaagatcacataattaataggtaaaagagcttactcagactcagatcttgtgacacaaattagattctttgccactaccacatgtgtcacagttaaactttgaagcatcttctgtgttgacagattcctttttttgcctgtgaacttaccctattatcattatttgtatcctgtcagatatctacttgtaagaccaagaaagtatttgttcatgtgaatcacaaaagaaacacttaaatttttgtttttagcatatctgaatgctataaaatataaaaactcatactgtttacataggacagatttatcatactgctgtaattgttttcatggttaatttgttacataggcaattactaaattgtgcctttgaaatactttataaatttttttaaataattaaagatattcaatgatgttaaagttgggtcagctaatatttgaagttcttaatttataattttttttctttaagccatagataatttagaattctgcagtatttttcatctccagatcttagggcttgaaatggattctgatgggtctaatcagtccactcttgcatatatcttgaaaatggtcagcatccaacaaagtgaagaataaactgataaatgatccctgtttggtgaacacctcagatcaggatgttccttggcagggtattctgacctggtttagctttggccccgtctgtgctcagggttcaggtattctgcaggattgggttcagagggattaaaattctcagattggcctgtatcaaaacagtcacagattttggtcagccttttcccagaaccgtctccaagattttttcttttgtgtaattctggaatctaggctggatttggactagctttagaggttatgataaaagattaattttgtcaggcatttatacaaaggaggttttcttactacagagtttcttaaggtagattccttctatttttgaagtgtgacatttaccaatctgaagtaatgttgccctacatcccccagacacttaactttagcatatttatttctgtccatttttggtcaggattgtgcctgtttacttatataatattcttgtttactttttgtttattagatacttcttattagtttatattgttttcctgattgaggcttggggaaagaattttcctcaaatttaaagtcaccttacttatttgcagatgtatgtcagagcaatattcttttgacagttatcaagcattttagcaatgctgtatgtatatattatgaatgaatgacagagtcactcatggtctgtcacccaggctggagtgcagtggcattatcatagctcacttcagcctcaaactccttggtttaagtgttattcccgccttacctggctactttttttaatttttattatttttatagagatagcattttgctgtgttgcccagggtggtctcaaactcctgggagcaaggtgatcctcccacttctgcctcccaaagtgctgagattacaggcataacaatgttttaaactgacactggtataccttcactgattattactgtgcacatgtggtaataatttaacttataagtgcattttatctaaaaaatttccaagatctaaatagcatttgaacatggtagcagttttttttttttttttttttttttttgagcaagaaaagagttctaaaggggtcagttttatctacagattaacataattttttttattgaggttaagtcacataacattaaccattttaaagtaaacagtttaggtggcactttatacattcacaatgttgttcaaccaccagctctaattccagaatgtgttcattaccccaaaaggaaacactgtacccattaagcagttactctgtattcccctcttccctaatccctagcaaacgccattctgctttctgtctctaatttgagccaacatcgaggaagagtactctgtacaattgaaattgcagaaaaaactttgggatgtgattgttaggaataaaaaaccacctaattctttgcatgcttctctaagtacagtagacatgctgccagggactctttatggaagaaaagttgagactcatagaagtttgcagttttgttttgatcaccccagagggttttgctcaaactcttaggactcatttgtattttcttcattgggttataagaactaaaatttaatgttctatacaaatgtgaacaactaatacttggtctcctatctagaacttgtttgccttttaggttttcttaatgtatagaagaaactaggaatattcacaaaggatttatttgaagttacactgggaaacgatttttagaatttgaagctctttgatccctgtgaatctaactttatgactattttattcagctaatctttgagaatatttagagttttgatttgcgtggcactctgcttttaatcccttgttgaataagtgttagaaaccttgatcttggccctatacctgatcacctctaaaaacatgaacagtgttacaaaggcagttgtttagtaagcttttttggattgttttaattggctgactgagggagacaaaattagtttttttttttctttctagaataaagggtaataaacttggactttagagttactgctaagattgacatttccatttggggctttagaaatatattgttatcttaaattcaaaatggtactttatctaattgaattgaaatcttaaaatttatgagaaacaaaagtcactttatgttcttagtaaatatttctaatggggttataggagatctaagtacaaaaaaaatttaaaattttgttattaatctcccctccttaaggaaaattttattaatatacataattataatttagttataagaacaacttaagttgagtacagtggctcaagcctgtaatcctagcactttaggaggccaaggcaggaggatctcatgaagccaggagttccagaccagcctgggcaatagagtgaaaccccacctcaaaaaaaaaaaaaaaaaaaa

SEQ ID NO: 420578 - DNA, 508 bp, Homo sapiens
tctaattctgtaaaagtgtaaaaagatggattacagtgatacaaatgtggtataaaaagttgtggaataagactggacttgtggttctttttcaacagtttaattgaaaagaaagacactcaatttttttcctttttctttattttcaggttatatttcacactatgtgctgactgtatctacagaagatatttaaaaaaaaaaaagataaactttttttcaaagattttgattccagtggaatctttgctttagatttgtgtgtgtgtttgtgttcgtgaattgtaactccagaagcaatgcctgtacaagctccacaatggacggatttcctctcctgcccaatttgcactcagactttcgacgaaacaattcgaaagcccatcagtttgggttgtggccatactgtctgcaagatgtgcctgaataaactccaccgcaaggcttgcccatttgaccagaccactatcaatacagacattgagctcctccctgtgaaaagtagcat

SEQ ID NO: 420579 - DNA, 634 bp, Homo sapiens
ggaaggggacgaggacaacgagcgactgggcggcggaggacgaggaggaggaagaggaggccgagcaacaagatggcccctgctgcaggagcagcctcagcagcagcaggtgggaggccggaggcggtgctggcggtggcggcggcagccgtggcccggcggcctgggacagaatcagagtcaacggtggcctcggcggcggcggcggctgccgcggcggtggcgacggccgcggggactcggagctgagaggagctgctgctcggaccagcgcggttatatttcacactatgtgctgactgtatctacagaagatatttaaaaaaaaaaaagataaactttttttcaaagattttgattccagtggaatctttgctttagatttgtgtgtgtgtttgtgttcgtgaattgtaactccagaagcaatgcctgtacaagctccacaatggacggatttcctctcctgcccaatttgcactcagactttcgacgaaacaattcgaaagcccatcagtttgggttgtggccatactgtctgcaagatgtgcctgaataaactccaccgcaaggcttgcccatttgaccagaccactatcaatacagacattgagctcctccctgtgaaaagtagcat

SEQ ID NO: 420580 - DNA, 3445 bp, Homo sapiens
ttttactaataactttatttaaataagacacaggaacttctatactgaaaaaatacaaaacaaaagccacacatttccttgtgtaaagccatattatatggtaactcaaatactgttcagcgcaatggctagaattaaacagtacaattatatacaaaatttaaacaatttctgacaaatttctacagctggatgtaggatacatttgagctcaacaacttctgggaaatttacatggcaaagcgtaagctttaacacatttggttcaaaactttaatatatgctaagaacaaatgtacaacacaattaatatttagtatctcatgagaaaataaaagcacatcactataaatatcgtacatgagatttcatcaccaaaaaagcatattcagtccatttttctgaaattgatattgatactattgcattttatttggacaaaagcagagtgtaagatcaacatattatgtaatgctaaaccagacatcagaagtcaaatggagctcatatttatcttacggaactagtaattttccccctttaaccataatctacaaaatatagtattttcatcaaggcctgagattattagggttaaaggtatctgctgctgaaaagattgttttaaaaggttcccctgtgaaaatgacgaaagtaaactgagtccttttttccatgacagtctcctacaatataacactgactaatttaaaggagccagaatgcaccttcaggagaaaatattacgacaaactttggtggaaagaagagaattgagatcatgacaaaataatgcacagaatacacacacacacactacacacacacacacacgaacatatacatatatatatcatttcttaaaaaaaaaaatcaatggtgttgctttcttctctatcactcatccttcttcaaccttcttagaaaataaaagaaaaacccaggaatgaatgaaaggaactgaaacgttcctttaactgtaggcacctggttcccctaattcttaagaaaattgtgccatacactttaggcgcagatgaaacaactctaggttttattgaactgaaagtagtggaatacaaaaacttagcttttggatactctttgtactgaagaaaacaatgaaagttaggctctcccattgaccaatcaggaatgcctggggctctcttcacactttgtggagaacttgtgtcaaaagtctgcaagttcaaggctattttcttgagtttatgctctacctcacaggttgcaaatttcaaaactactcatgattatgcattatgagaggcttaaatgagatagcttcaaactattgctcttgtaagtcaccaaaaaaacctgcttatgttgcatcaattctgagacccaagtattctatgtaaatgaagatcatgcacctaaactgcttgaggaagacaataacaaaaagtatgtcactttttcacctgcaaaataaagaatttccaagggagaaactaaatataaatatgtctttagataaaatggtaacagttatgaccctgatggctaacataaacaaaaaaatctcaaccattccgtcaaacacttcacttattttgaaattaactctagacattcttgtctttaaatttcatcacacacaatgtggaatgtttatgtacagtccagtactgaacactttatttgcaacattgtcacagtcctttactgagcaacacctgaacttttaaaaaagccacatgtacacatgttgaaacagtgaatgcaacagttgttttacttgtaaccacatgacaaagtgatgtcaaacaccacagattttgctggttctcctcatgttcacccatgtccaggattatcattctcctaggattgaatgcacttcttattctaagaatgtggaatgtaatgaggaaagggaaatgcataaaataaggaaaggcaaaagagtgatgttccctctttagctttttagctgtgaaatatttaatatcccaatatgatatacattccaagttacctgagtttagacttcaactgaagtacctgaagctaggccatagggtgggcactgtgcaactgttgtggccatttttttttttttttttgcattgtatgtattacagaagttagaaacaaacacctggatcaattgtaaacataatcctgaattacagtattttccataggacaaaacacagcaagacattttctatttagacaggcaactttttgatatagagcttatttatactgaagaatctggaacaaaacacaggacacagtactaatctgtcaaatatactatgaaatgcatagtctccacttaaaatgctgaatgacacacacgttttgcaagcattactgctttccacaaaaactgctgaataggagttccgtccctgccaagatcagtgtttaagagatactttatgatgctgataagtattattggtggtggtggtgttcagaaagtttgtcactcatgcagatgtctgaaatcttgttccgaatccatggaacatagggtggaggccagctcccccttttttagatgatcacatagttctgagcagagatgtggtcctcaccctgcagttcctgcaggagctgctgctgctgggatggctgctggacagaggcctccatggagcccgctgtgctggtgtcatcagaaagagacgtaaaggaaacccgggatgagagctgctcaacggtcagagttgccaaagctgagctctggccagagttaggggagttcttgagcataaggtcagaagcaggtaagagggggcctagaagttttacaggacagaaagctgatccggttgggatgaaattaaccttgtttttgtcaggacatgaaaagagaggggccgagataggctgacgagacgccatttcctcaaagaccttcactcgctcacatccctctgggggctcccgtttgaacatgtagctgttgtttggtttgggagatgaagcatacttgggtaacggtgagctactcccactgtctgtaaatttaaagcagttatattaactagtgattgaaagctcttttaaatttgatttccaaacaaacagccttttgcacaatttatccactactgcccctatgctttgaccagtctcctttattgcaaagctatttcttataccctgtgtagcacatttcttctaaataaaaactgcaatgcaacagtcatctgccacaccatagaacataaaaaggacattttggtccagaaaactgcattttgaatacaacagagctgtaatcctgaaaacaaatatgttatttattacgtatttcaagaatgcaaatgatggggcaatgtgcttaagtcacacagaagaataaaacagattataatgatacagggttctctacatgccttctcactgcccaaccaatttaacgaaaatgaataatgttcattacaaaagttcttagcag

SEQ ID NO: 420581 - DNA, 3786 bp, Homo sapiens
ttttactaataactttatttaaataagacacaggaacttctatactgaaaaaatacaaaacaaaagccacacatttccttgtgtaaagccatattatatggtaactcaaatactgttcagcgcaatggctagaattaaacagtacaattatatacaaaatttaaacaatttctgacaaatttctacagctggatgtaggatacatttgagctcaacaacttctgggaaatttacatggcaaagcgtaagctttaacacatttggttcaaaactttaatatatgctaagaacaaatgtacaacacaattaatatttagtatctcatgagaaaataaaagcacatcactataaatatcgtacatgagatttcatcaccaaaaaagcatattcagtccatttttctgaaattgatattgatactattgcattttatttggacaaaagcagagtgtaagatcaacatattatgtaatgctaaaccagacatcagaagtcaaatggagctcatatttatcttacggaactagtaattttccccctttaaccataatctacaaaatatagtattttcatcaaggcctgagattattagggttaaaggtatctgctgctgaaaagattgttttaaaaggttcccctgtgaaaatgacgaaagtaaactgagtccttttttccatgacagtctcctacaatataacactgactaatttaaaggagccagaatgcaccttcaggagaaaatattacgacaaactttggtggaaagaagagaattgagatcatgacaaaataatgcacagaatacacacacacacactacacacacacacacacgaacatatacatatatatatcatttcttaaaaaaaaaaatcaatggtgttgctttcttctctatcactcatccttcttcaaccttcttagaaaataaaagaaaaacccaggaatgaatgaaaggaactgaaacgttcctttaactgtaggcacctggttcccctaattcttaagaaaattgtgccatacactttaggcgcagatgaaacaactctaggttttattgaactgaaagtagtggaatacaaaaacttagcttttggatactctttgtactgaagaaaacaatgaaagttaggctctcccattgaccaatcaggaatgcctggggctctcttcacactttgtggagaacttgtgtcaaaagtctgcaagttcaaggctattttcttgagtttatgctctacctcacaggttgcaaatttcaaaactactcatgattatgcattatgagaggcttaaatgagatagcttcaaactattgctcttgtaagtcaccaaaaaaacctgcttatgttgcatcaattctgagacccaagtattctatgtaaatgaagatcatgcacctaaactgcttgaggaagacaataacaaaaagtatgtcactttttcacctgcaaaataaagaatttccaagggagaaactaaatataaatatgtctttagataaaatggtaacagttatgaccctgatggctaacataaacaaaaaaatctcaaccattccgtcaaacacttcacttattttgaaattaactctagacattcttgtctttaaatttcatcacacacaatgtggaatgtttatgtacagtccagtactgaacactttatttgcaacattgtcacagtcctttactgagcaacacctgaacttttaaaaaagccacatgtacacatgttgaaacagtgaatgcaacagttgttttacttgtaaccacatgacaaagtgatgtcaaacaccacagattttgctggttctcctcatgttcacccatgtccaggattatcattctcctaggattgaatgcacttcttattctaagaatgtggaatgtaatgaggaaagggaaatgcataaaataaggaaaggcaaaagagtgatgttccctctttagctttttagctgtgaaatatttaatatcccaatatgatatacattccaagttacctgagtttagacttcaactgaagtacctgaagctaggccatagggtgggcactgtgcaactgttgtggccatttttttttttttttttgcattgtatgtattacagaagttagaaacaaacacctggatcaattgtaaacataatcctgaattacagtattttccataggacaaaacacagcaagacattttctatttagacaggcaactttttgatatagagcttatttatactgaagaatctggaacaaaacacaggacacagtactaatctgtcaaatatactatgaaatgcatagtctccacttaaaatgctgaatgacacacacgttttgcaagcattactgctttccacaaaaactgctgaataggagttccgtccctgccaagatcagtgtttaagagatactttatgatgctgataagtattattggtggtggtggtgttcagaaagtttgtcactcatgcagatgtctgaaatcttgttccgaatccatggaacatagggtggaggccagctcccccttttttagatgatcacatagttctgagcagagatgtggtcctcaccctgcagttcctgcaggagctgctgctgctgggatggctgctggacagaggcctccatggagcccgctgtgctggtgtcatcagaaagagacgtaaaggaaacccgggatgagagctgctcaacggtcagagttgccaaagctgagctctggccagagttaggggagttcttgagcataaggtcagaagcaggtaagagggggcctagaagttttacaggacagaaagctgatccggttgggatgaaattaaccttgtttttgtcaggacatgaaaagagaggggccgagataggctgacgagacctaaaaccataaaacaaaattagatttataatcatgaacacagaaaaagttaagcattttctgaattaactggagttctctaaaacagctaaaatgtaaatggcaggagatgggttaagtgtatacagaggggtaaacatcttccatagcacaagtcagctggcagactattcatgcacacagcactgaagtggtatttgagacaaaaggattttcaaaagaaccaggaaggcaaatatttagagatcattagtttgcttttaattatttaggaaggtggaaaagtcttctacattataattgaagattatgcaaagttagaatgaccttttctgttaagaaaaagtataccagaggcagggggcattcgtccatcacgtatttaaacactttctccttttttctttctagatagacttccgctagcacagatggggggtggagtggggaggggagtttcagtggtctctcaaaaagccagtcaattcaacagaggttgggtccacaagcccttcctctcctcccgttcccaggagctaagccatcagctcctgcaagatgggtccttctatgttgcaagagcactgcaccctccactaggcacctgcactggaacaaaggcatgagggcatccaagaaccacagtcttcttctgagctactctgcccagtgtttacagcaagaacctctttttctaatttcatttctaacttacacatattaaaatttcatgaagataacaaaccccttgtgaacagaaagtctgaataagtaagctagatgaggctacagggaaggagactaatcttctggcttgtggagtacactgtctttaagctagtcacacacggatattaactttgctcctaaagtctctttgttaccatctaaactaagagttcctg

SEQ ID NO: 420582 - DNA, 1444 bp, Homo sapiens
tttggatacaataacaggaccttacctcacaggacagtggccacgggatcctcatgttcactacccttcatgcatgaaagacaaagctactcagacacctagctgttgggcagaagagggtgcagaaaagaggtcacatcacttctcgtcatgggggagtgctgatcaactaaaagagcagatcccaaactgaggcagcaactacaacgagtaaacagagtagtgtacttatttatactgaagaatctggaacaaaacacaggacacagtactaatctgtcaaatatactatgaaatgcatagtctccacttaaaatgctgaatgacacacacgttttgcaagcattactgctttccacaaaaactgctgaataggagttccgtccctgccaagatcagtgtttaagagatactttatgatgctgataagtattattggtggtggtggtgttcagaaagtttgtcactcatgcagatgtctgaaatcttgttccgaatccatggaacatagggtggaggccagctcccccttttttagatgatcacatagttctgagcagagatgtggtcctcaccctgcagttcctgcaggagctgctgctgctgggatggctgctggacagaggcctccatggagcccgctgtgctggtgtcatcagaaagagacgtaaaggaaacccgggatgagagctgctcaacggtcagagttgccaaagctgagctctggccagagttaggggagttcttgagcataaggtcagaagcaggtaagagggggcctagaagttttacaggacagaaagctgatccggttgggatgaaattaaccttgtttttgtcaggacatgaaaagagaggggccgagataggctgacgagacgccatttcctcaaagaccttcactcgctcacatccctctgggggctcccgtttgaacatgtagctgttgtttggtttgggagatgaagcatacttgggtaacggtgagctactcccactgtctgtaaatttaaagcagttatattaactagtgattgaaagctcttttaaatttgatttccaaacaaacagccttttgcacaatttatccactactgcccctatgctttgaccagtctcctttattgcaaagctatttcttataccctgtgtagcacatttcttctaaataaaaactgcaatgcaacagtcatctgccacaccatagaacataaaaaggacattttggtccagaaaactgcattttgaatacaacagagctgtaatcctgaaaacaaatatgttatttattacgtatttcaagaatgcaaatgatggggcaatgtgcttaagtcacacagaagaataaaacagattataatgatacagggttctctacatgccttctcactgcccaaccaatttaacgaaaatgaataatgttcattacaaaagttcttagcag

SEQ ID NO: 420583 - DNA, 1034 bp, Homo sapiens
ggcgagtgtgtcgccgcggcatcaggcacttctccttcctgcccttgtatgaagaaggatgtgtttgcttccccttgtgccatgattgtaaatttcctgaggcctcctcagccctgcagaactggctagagcaatgtatcttaggctcacttaaggaagctgtagagatgagcccaaggagggaaaccagaagagccccccaggctcaccagttgtttgttggctccctacaaacatgtcattcaagtggctaatcttacaacagcacaaattcatctaaccagaaagagaagaggaggctccaaaggcacttgactactgagcatcaccctggacgtgtacaagtctgcgtccttattgttttcttcattgggccgaactttctggtcctcatccaacagctcttctatcacgtgttcgaaagtgtcagccaatgatgtcaagcctcttgaacctgccttgggcccattcacgctctccagagtcccatgggtccgcacacctggagatactctattatagcaaagaagaatgataatttcattgagccatcctgttttacaggaaattctgcaagtggcaacgtgggtccattccgtgtgtgtcactagagctggcgcaagcccatggccatggtgaggcagcgtttccactggaactaatctgatacctgcaccagctcttgcaactgtgcagtgttcccactgcaaactacggatgggaggattttccctcctggtgagtcaaaatgaacaagaaataccccaggacctcccttccctccttggccattaatgagatgaaggcaattaactcacatagtataaatgaatcatttgaggtgatgactgcattttaggcaaatgatgactttcttggttccattggtttgcaagtaaaagttacacacattgaaaagacactgaaacagatttcctaaatgcttcattttctggatgcaccaatgttgacctactatacatgttaaatggttttaaaatatcaccttaaaataaaggaaacttccagctact

SEQ ID NO: 420584 - DNA, 798 bp, Homo sapiens
tcatcgctgtctggaacagcgatgactcgatcgcgagatcaggaaggtggccgagtgtgtcgccgcggccatcaggcacttctccttcctgcccttgtatgaagaaggatgtgtttgcttccccttgtgccatgattgtaaatttcctgaggcctcctcagccctgcagaactggggttatagccatgtgactgatcttcgtccaagaatatgtaaagaaaaagtgttgagttggcttttagggctagagcaatgtatcttaggctcacttaaggaagctgtagagatgagcccaaggagggaaaccagaagagccccccaggctcaccagttgtttgttggctccctacaaacatgtcattcaagtggctaatcttacaacagcacaaattcatctaaccagaaagagaagaggaggctccaaaggcacttgactactgagcatcaccctggacgtgtacaagtctgcgtccttattgttttcttcattgggccgaactttctggtcctcatccaacagctcttctatcacgtgttcgaaagtgtcagccaatgatgtcaagcctcttgaacctgccttgggcccattcacgctctccagagtcccatgggtccgcacacctggagatactctattatagcaaagaagaatgataatttcattgagccatcctgttttacagtattgaattattaccacaaggtaccaaccatatatgcatacttaatagggtatttgtcaaaactatgcatgaaggtcatttgtttgagatgtcagaacattttcccgtgagaaga

SEQ ID NO: 420585 - DNA, 972 bp, Homo sapiens
ggcgagtgtgtcgccgcggcatcaggcacttctccttcctgcccttgtatgaagaaggatgtgtttgcttccccttgtgccatgattgtaaatttcctgaggcctcctcagccctgcagaactggctagagcaatgtatcttaggctcacttaaggaagctgtagagatgagcccaaggagggaaaccagaagagccccccaggctcaccagttgtttgttggctccctacaaacatgtcattcaagtggctaatcttacaacagcacaaattcatctaaccagaaagagaagaggaggctccaaaggcacttgactactgagcatcaccctggacgtgtacaagtctgcgtccttattgttttcttcattgggccgaactttctggtcctcatccaacagctcttctatcacgtgttcgaaagtgtcagccaatgatgtcaagcctcttgaacctgccttgggcccattcacgctctccagagtcccatgggtccgcacacctggagatactctattatagcaaagaagaatgataatttcattgagccatcctgttttacagcacccaacagaatcccttcaaagcctcgtggtctgacaccctatgctacgtgacttgtgacccatccatttgtcatgttcttcgggaatgtggctaaggggctaagatgtgacttgaaaagaaaggtagaacaagatcatctcaaatttattatcaaggaatagttcagaaaacgacttcagaccacagagacagcagaacagatggtccggcatggatagagcatcagacactcacagactgtgccaacaagagccatcgagtcaaaacagccaaaggaaggagggtcatggaatgggttctctcacaccaaactgatgcccagaggccctcagcatgaataacaaaggcaaccagacccacaagccatactgagtggatacaaaacctatacctaggctgacatcc

SEQ ID NO: 420586 - DNA, 613 bp, Homo sapiens
caagttagatgatgatggcacaaaagacagaacaccttgcttctggccattgtcagctcttggaagagagcacacttttagaggagcagctgcaaggagcctgagaacaaaactggaaatgtctgttatgaaagccttcacaggaaattctgcaagtggcaacgtgggtccattccgtgtgtgtcactagagctggcgcaagcccatggccatggtgaggcagcgtttccactggaactaatctgatacctgcaccagctcttgcaactgtgcagtgttcccactgcaaactacggatgggaggattttccctcctggtgagtcaaaatgaacaagaaataccccaggacctcccttccctccttggccattaatgagatgaaggcaattaactcacatagtataaatgaatcatttgaggtgatgactgcattttaggcaaatgatgactttcttggttccattggtttgcaagtaaaagttacacacattgaaaagacactgaaacagatttcctaaatgcttcattttctggatgcaccaatgttgacctactatacatgttaaatggttttaaaatatcaccttaaaataaaggaaacttccagctact

SEQ ID NO: 420587 - DNA, 1328 bp, Homo sapiens
tcatcgctgtctggaacagcgatgactcgatcgcgagatcaggaaggtggccgagtgtgtcgccgcggccatcaggcacttctccttcctgcccttgtatgaagaaggatgtgtttgcttccccttgtgccatgattgtaaatttcctgaggcctcctcagccctgcagaactggggttatagccatgtgactgatcttcgtccaagaatatgtaaagaaaaagtgttgagttggcttttagggctagagcaatgtatcttaggctcacttaaggaagctgtagagatgagcccaaggagggaaaccagaagagccccccaggctcaccagttgtttgttggctccctacaaacatgtcattcaagtggctaatcttacaacagcacaaattcatctaaccagaaagagaagaggaggctccaaaggcacttgactactgagcatcaccctggacgtgtacaagtctgcgtccttattgttttcttcattgggccgaactttctggtcctcatccaacagctcttctatcacgtgttcgaaagtgtcagccaatgatgtcaagcctcttgaacctgccttgggcccattcacgctctccagagtcccatgggtccgcacacctggagatactctattatagcaaagaagaatgataatttcattgagccatcctgttttacagtttcagtgacccactctgtaataaagaacttggaaagggaggttccaagatggccaaatatgaacagctccagtctacagcccccagcgtgagtgatgcagaagacgggtgatttctgcatttccaactgaggaaattctgcaagtggcaacgtgggtccattccgtgtgtgtcactagagctggcgcaagcccatggccatggtgaggcagcgtttccactggaactaatctgatacctgcaccagctcttgcaactgtgcagtgttcccactgcaaactacggatggggtaaaagactgctcacctcctatttctcatctaatctcacacactctgtttgatgaggctatggagaaacaggtcttctcatacactaaaggtgggagtacaaacaattcaagccctgtgcaggacaattaggcaatacctatcaaaattatacatgatttttcctgctgacccagcaattccacttctgggaataattgacagatataggtgcatatgtacaaaatgatggaaagctctctggtatatattagtaagtgataaaacaaggtgtaaaatagtgtatatatggctactaccttttgttttaaaaatgggggaaaatggtggagcttgcggtgagccgagatcgtgc

SEQ ID NO: 420588 - DNA, 1196 bp, Homo sapiens
tcatcgctgtctggaacagcgatgactcgatcgcgagatcaggaaggtggccgagtgtgtcgccgcggccatcaggcacttctccttcctgcccttgtatgaagaaggatgtgtttgcttccccttgtgccatgattgtaaatttcctgaggcctcctcagccctgcagaactggggttatagccatgtgactgatcttcgtccaagaatatgtaaagaaaaagtgttgagttggcttttagggctagagcaatgtatcttaggctcacttaaggaagctgtagagatgagcccaaggagggaaaccagaagagccccccaggctcaccagttgtttgttggctccctacaaacatgtcattcaagtggctaatcttacaacagcacaaattcatctaaccagaaagagaagaggaggctccaaaggcacttgactactgagcatcaccctggacgtgtacaagtctgcgtccttattgttttcttcattgggccgaactttctggtcctcatccaacagctcttctatcacgtgttcgaaagtgtcagccaatgatgtcaagcctcttgaacctgccttgggcccattcacgctctccagagtcccatgggtccgcacacctggagatactctattatagcaaagaagaatgataatttcattgagccatcctgttttacaggaaattctgcaagtggcaacgtgggtccattccgtgtgtgtcactagagctggcgcaagcccatggccatggtgaggcagcgtttccactggaactaatctgatacctgcaccagctcttgcaactgtgcagtgttcccactgcaaactacggatggggtaaaagactgctcacctcctatttctcatctaatctcacacactctgtttgatgaggctatggagaaacaggtcttctcatacactaaaggtgggagtacaaacaattcaagccctgtgcaggacaattaggcaatacctatcaaaattatacatgatttttcctgctgacccagcaattccacttctgggaataattgacagatataggtgcatatgtacaaaatgatggaaagctctctggtatatattagtaagtgataaaacaaggtgtaaaatagtgtatatatggctactaccttttgttttaaaaatgggggaaaatggtggagcttgcggtgagccgagatcgtgc

SEQ ID NO: 420589 - DNA, 2268 bp, Homo sapiens
agtggttgctcaatggcattactggatccaggttaggattatctgagaatacatttatctgcattttacggaaggcaaccgaggttcatagagatagtgatttggccagcgtcacaggcccagtaaaagggattgaaaatccaggtccgtccgaccctaaagcagggaactctgcctagtgtctcgctgtggaatgttagggatcctggggtacccttcagggtcttggctcggaaggaaaacattcccctccgaggggatggactatattaccaagggggtggagccagatgcctgagggggtgtggccagagcctggggcgtgtcacagccgaaggggcagggcggcagcagcaggcgtctaagtaacttcagcgcctgcgcagaggctccccagcgtcgccctaggctgggactctagtaggtcttcggctcagttttggctgcagcgcccgcgtagatcgcttcggccgggttctacgcccggctcaactatgagccggtgcgcccaggcggcggaagtggcggccacagtgccaggtgccggcgtcgggaacgtggggctgcggccgcccatggtgccccgtcaggcgtccttcttcccgccgccggtgccgaaccccttcgtgcagcagacgcagatcggctccgcgaggcgggtccagattgtccttcttgggattatcttgcttccaattcgtgtcttattggttgcgttaattttattacttgcatggccatttgctgcaatttcaacagtatgctgtcctgaaaagctgacccacccaataactggttggaggaggaaaattactcaaacagctttgaaatttctgggtcgtgctatgttcttttcaatgggatttatagttgctgtaaaaggaaagattgcaagtcctttggaagcaccagtttttgttgctgcccctcattcaacattctttgatggaattgcctgtgttgtagctgggttaccttctatggtatctcgaaatgagaatgcacaagtccctctgattggcagactgttacgggctgtgcaaccagttttggtgtcccgtgtagatccggattcccgaaaaaacacaataaatgaaataataaagcgaacaacatcaggaggagaatggccccagatactagttttcccagaaggtacttgtactaatcgttcctgtttgattacttttaaaccaggagccttcattccaggagttccagtgcagccagtcctcctcagatacccaaacaagctggatactgtgacctggacatggcaaggatatacattcattcagctttgtatgcttactttctgccagctcttcacaaaggtagaagttgagtttatgccagttcaagtaccaaatgatgaagaaaaaaatgatcctgtcctttttgccaataaagtccggaatttaatggcagaagctctgggaataccagtaacagatcatacctatgaagactgcagattgatgatttcagcaggacagctaacattgcctatggaagctgggctggtggaatttactaaaattagccgaaaattgaaattagattgggatggtgttcgtaagcatttggatgaatatgcatctattgcgagttcctcaaaaggaggaagaattggaattgaagaattcgccaagtatttaaagttgcctgtttcagatgtcttgagacaactttttgcactctttgacaggaaccatgatggcagcattgacttccgagagtatgtgattggcctggctgtcttgtgcaacccttccaacacagaggagatcatccaggtggcatttaagctgtttgacgttgatgaggatggctacataacggaggaagagttctccaccattctacaggcttcccttggagtgcctgaccttgatgtttctggtctcttcaaggaaatagcccaaggggactcaatttcctatgaggaatttaaaagttttgccttaaagcatccagaatatgctaagatatttacaacatacctagacctccagacgtgccatgtgttttcattaccaaaagaagtccagacaaccccctccaccgccagtaataaagtcagccctgaaaagcatgaagagagtacctcagacaaaaaagatgactgaaagcagtatttccaataaggaaaacacagtagcttttgcttgaaattgtaaaggcacttattgataatacttttaatgtgttggtaatgatgtttaaaattgaaagatttttaaaataaaaatgatagattttcttact

SEQ ID NO: 420590 - DNA, 1218 bp, Homo sapiens
agtggttgctcaatggcattactggatccaggttaggattatctgagaatacatttatctgcattttacggaaggcaaccgaggttcatagagatagtgatttggccagcgtcacaggcccagtaaaagggattgaaaatccaggtccgtccgaccctaaagcagggaactctgcctagtgtctcgctgtggaatgttagggatcctggggtacccttcagggtcttggctcggaaggaaaacattcccctccgaggggatggactatattaccaagggggtggagccagatgcctgagggggtgtggccagagcctggggcgtgtcacagccgaaggggcagggcggcagcagcaggcgtctaagtaacttcagcgcctgcgcagaggctccccagcgtcgccctaggctgggactctagtaggtcttcggctcagttttggctgcagcgcccgcgtagatcgcttcggccgggttctacgcccggctcaactatgagccggtgcgcccaggcggcggaagtggcggccacagtgccaggtgccggcgtcgggaacgtggggctgcggccgcccatggtgccccgtcaggcgtccttcttcccgccgccggtgccgaaccccttcgtgcagcagacgcagatcggctccgcgaggcgggtccagattgtccttcttgggattatcttgcttccaattcgtgtcttattggttgcgttaattttattacttgcatggccatttgctgcaatttcaacagtatgctgtcctgaaaagctgacccacccaataactggttggaggaggtaagaaataattttgtccaaaatattaggacataatattaaattaagatatactaaatcaatataagaagagttcatcatagtttagtcagtgatctaactgctgttagataaaactattttatctgcctactcaataataaattttacagttttatctgcctactcaataataaataatttatttttatttctcatatgaaatacgtagaaattactgcccaaatgccaactacattatgataatcttctaaaagttataattgcctaatgttaaaatattttgttttctgagttattgccaaatgcgatacatccctagttcggaaagatacccaactactatacttgaaaccactgaagctacaaaataccttgctctcagttttcacatttgcttttctccctctaca

SEQ ID NO: 420591 - DNA, 4234 bp, Homo sapiens
  misc_feature (2321)..(2321): n is a, c, g, or t
agtggttgctcaatggcattactggatccaggttaggattatctgagaatacatttatctgcattttacggaaggcaaccgaggttcatagagatagtgatttggccagcgtcacaggcccagtaaaagggattgaaaatccaggtccgtccgaccctaaagcagggaactctgcctagtgtctcgctgtggaatgttagggatcctggggtacccttcagggtcttggctcggaaggaaaacattcccctccgaggggatggactatattaccaagggggtggagccagatgcctgagggggtgtggccagagcctggggcgtgtcacagccgaaggggcagggcggcagcagcaggcgtctaagtaacttcagcgcctgcgcagaggctccccagcgtcgccctaggctgggactctagtaggtcttcggctcagttttggctgcagcgcccgcgtagatcgcttcggccgggttctacgcccggctcaactatgagccggtgcgcccaggcggcggaagtggcggccacagtgccaggtgccggcgtcgggaacgtggggctgcggccgcccatggtgccccgtcaggcgtccttcttcccgccgccggtgccgaaccccttcgtgcagcagacgcagatcggctccgcgaggcgggtccagattgtccttcttgggattatcttgcttccaattcgtgtcttattggttgcgttaattttattacttgcatggccatttgctgcaatttcaacagtatgctgtcctgaaaagctgacccacccaataactggttggaggaggaaaattactcaaacagctttgaaatttctgggtcgtgctatgttcttttcaatgggatttatagttgctgtaaaaggaaagattgcaagtcctttggaagcaccagtttttgttgctgcccctcattcaacattctttgatggaattgcctgtgttgtagctgggttaccttctatggtatctcgaaatgagaatgcacaagtccctctgattggcagactgttacgggctgtgcaaccagttttggtgtcccgtgtagatccggattcccgaaaaaacacaataaatgaaataataaagcgaacaacatcaggaggagaatggccccagatactagttttcccagaaggtacttgtactaatcgttcctgtttgattacttttaaaccaggagccttcattccaggagttccagtgcagccagtcctcctcagatacccaaacaagctggatactgtgacctggacatggcaaggatatacattcattcagctttgtatgcttactttctgccagctcttcacaaaggtagaagttgagtttatgccagttcaagtaccaaatgatgaagaaaaaaatgatcctgtcctttttgccaataaagtccggaatttaatggcagaagctctgggaataccagtaacagatcatacctatgaagactgcagattgatgatttcagcaggacagctaacattgcctatggaagctgggctggtggaatttactaaaattagccgaaaattgaaattagattgggatggtgttcgtaagcatttggatgaatatgcatctattgcgagttcctcaaaaggaggaagaattggaattgaagaattcgccaagtatttaaagttgcctgtttcagatgtcttgagacaactttttgcactctttgacaggaaccatgatggcagcattgacttccgagagtatgtgattggcctggctgtcttgtgcaacccttccaacacagaggagatcatccaggtggcatttaagctgtttgacgttgatgaggatggctacataacggaggaagagttctccaccattctacaggcttcccttggagtgcctgaccttgatgtttctggtctcttcaaggaaatagcccaaggggactcaatttcctatgaggaatttaaaagttttgccttaaagcatccagaatatgctaagatatttacaacatacctagacctccagacgtgccatgtgttttcattaccaaaagaagtccagacaaccccctccaccgccagtaataaagtcagccctgaaaagcatgaagagagtacctcagacaaaaaagatgactgaaagcagtatttccaataaggaaaacacagtagcttttgcttgaaattgtaaaggcacttattgataatacttttaatgtgttggtaatgatgtttaaaattgaaagatttttaaaataaaaatgatagattttcttactaaaaatgtttttattaaccttgcttttattggaaaaaatcaagcaatatttcnttttcttttgtgttatattgtactttactgattcatttactggtgatacatatgtttttatggattttccagtttaatttgcatatacaaatgaatgcaatggtctattggtgagcattgagcaacactgtataaagttttaaaaatgtaaacactttttaatctactttcctctaaaaatcaataatattctattatttctaatccttttccacttgggaaataacaatgaagaatctgagaatttgacatctataactttacagattcatttttccatttaaatttcagtttcttggatcactgaatatgggaagggagagcttcactaattagacgcagcttcttaagaacttatattctctttgacatacatctctattgtagttttttgttttgttttgttttttgagatggagtcttgctctgtcacccaggctggagtgcagtggtgcaatctcagctcactgcaacctctgcctcctgggttcaagtgattctcgtacctcagactcccgagtagttgggattacaggtgcccaccaccacacccgactaatttttgtatttttagtagccatgtggttttgccatgttggccaggctggtttcgaactcctgacctcaggtgatccacccacctcagcctcccaaagtgctgggattacaggtgtgagccaccgttcccggcctattgtagattttcttaactacttgctaaggaaatcatatccttttacatgaactacaggtttagaacttggttttaagacaactgctatggccagaaggtaaatgggaattgccttattgaaggtaacattgattgcctaataagaaaatgaattgtttgccacagagttgaatttaatttgagttagatagttcagaatgtagcacttgccctataaatgaatcagatttgttctatttatataatattagaattaatatattatcatgtaagtgggaattttattttgttaagtggactctcaaattttagaacttgtgtgaaatatctcccagaaaacacaaaaggtttcaaggtatcacccaaagctagggaatcaacaaacgtactttattaatgcaagaccacaatttaagccccaggcaggaatccaacagtaacatttttcctttaggttaagcagtaatttttttgaattgtcatttttaatgggtctcacacatgcatattgctaatatcattcatgtttgaggttttcaacaaagaaccaatttattaatataatgtacaaaaatagttggttcattttctgaattcagtctttgaaataaaactccttgttttggccgtgtttctgaatgtattggtgattcacccccaagctaattttttaaagtcatttttgaagttgggaagtctcatgagagatgttgaagtatgtatttaatcaagagtcatgatttcaaactagttttacatattaagcagttagtgttctaatttaatgggtaaatgtgtgtttggataaatatctgaaaattttatccttaagtatatataattatttgcctcttatatgtcttaaagctatttaaacaaggtgttaaatgagccaaaacaattaagtaattagaacagtacatttttatcagagtgtctgtcatatgcaatgaatgtatgtaatactaaaaaatcatgactacttttatcaaagaaaaaccacacattaatcctattaatcatgaaagcgtagcattgtaaattaaaggttttctttgaggctcttgaaagtgatcccattgctttcctgttttaaaaatattttatgctctttatttccacttctgtgaatgtgatatttctattttgtgattatgttactgaataaacaaacttgctacataaaattcttagcaattaaaaaaattctgattctgcc

SEQ ID NO: 420592 - DNA, 2922 bp, Homo sapiens
  misc_feature (1009)..(1009): n is a, c, g, or t
tgctgcctccctcgtcacaaaggtagaagtagagtttatgccagttcaagtaccaaatgatgaagaaaaaaatgatcctgtcctttttgccaataaagtccggaatttaatggcagaagctctgggaataccagtaacagatcatacctatgaagactgcagattgatgatttcagcaggacagctaacattgcctatggaagctgggctggtggaatttactaaaattagccgaaaattgaaattagattgggatggtgttcgtaagcatttggatgaatatgcatctattgcgagttcctcaaaaggaggaagaattggaattgaagaattcgccaagtatttaaagttgcctgtttcagatgtcttgagacaactttttgcactctttgacaggaaccatgatggcagcattgacttccgagagtatgtgattggcctggctgtcttgtgcaacccttccaacacagaggagatcatccaggtggcatttaagctgtttgacgttgatgaggatggctacataacggaggaagagttctccaccattctacaggcttcccttggagtgcctgaccttgatgtttctggtctcttcaaggaaatagcccaaggggactcaatttcctatgaggaatttaaaagttttgccttaaagcatccagaatatgctaagatatttacaacatacctagacctccagacgtgccatgtgttttcattaccaaaagaagtccagacaaccccctccaccgccagtaataaagtcagccctgaaaagcatgaagagagtacctcagacaaaaaagatgactgaaagcagtatttccaataaggaaaacacagtagcttttgcttgaaattgtaaaggcacttattgataatacttttaatgtgttggtaatgatgtttaaaattgaaagatttttaaaataaaaatgatagattttcttactaaaaatgtttttattaaccttgcttttattggaaaaaatcaagcaatatttcnttttcttttgtgttatattgtactttactgattcatttactggtgatacatatgtttttatggattttccagtttaatttgcatatacaaatgaatgcaatggtctattggtgagcattgagcaacactgtataaagttttaaaaatgtaaacactttttaatctactttcctctaaaaatcaataatattctattatttctaatccttttccacttgggaaataacaatgaagaatctgagaatttgacatctataactttacagattcatttttccatttaaatttcagtttcttggatcactgaatatgggaagggagagcttcactaattagacgcagcttcttaagaacttatattctctttgacatacatctctattgtagttttttgttttgttttgttttttgagatggagtcttgctctgtcacccaggctggagtgcagtggtgcaatctcagctcactgcaacctctgcctcctgggttcaagtgattctcgtacctcagactcccgagtagttgggattacaggtgcccaccaccacacccgactaatttttgtatttttagtagccatgtggttttgccatgttggccaggctggtttcgaactcctgacctcaggtgatccacccacctcagcctcccaaagtgctgggattacaggtgtgagccaccgttcccggcctattgtagattttcttaactacttgctaaggaaatcatatccttttacatgaactacaggtttagaacttggttttaagacaactgctatggccagaaggtaaatgggaattgccttattgaaggtaacattgattgcctaataagaaaatgaattgtttgccacagagttgaatttaatttgagttagatagttcagaatgtagcacttgccctataaatgaatcagatttgttctatttatataatattagaattaatatattatcatgtaagtgggaattttattttgttaagtggactctcaaattttagaacttgtgtgaaatatctcccagaaaacacaaaaggtttcaaggtatcacccaaagctagggaatcaacaaacgtactttattaatgcaagaccacaatttaagccccaggcaggaatccaacagtaacatttttcctttaggttaagcagtaatttttttgaattgtcatttttaatgggtctcacacatgcatattgctaatatcattcatgtttgaggttttcaacaaagaaccaatttattaatataatgtacaaaaatagttggttcattttctgaattcagtctttgaaataaaactccttgttttggccgtgtttctgaatgtattggtgattcacccccaagctaattttttaaagtcatttttgaagttgggaagtctcatgagagatgttgaagtatgtatttaatcaagagtcatgatttcaaactagttttacatattaagcagttagtgttctaatttaatgggtaaatgtgtgtttggataaatatctgaaaattttatccttaagtatatataattatttgcctcttatatgtcttaaagctatttaaacaaggtgttaaatgagccaaaacaattaagtaattagaacagtacatttttatcagagtgtctgtcatatgcaatgaatgtatgtaatactaaaaaatcatgactacttttatcaaagaaaaaccacacattaatcctattaatcatgaaagcgtagcattgtaaattaaaggttttctttgaggctcttgaaagtgatcccattgctttcctgttttaaaaatattttatgctctttatttccacttctgtgaatgtgatatttctattttgtgattatgttactgaataaacaaacttgctacataaaattcttagcaattaaaaaaattctgattctgcc

SEQ ID NO: 420593 - DNA, 1538 bp, Homo sapiens
agtggttgctcaatggcattactggatccaggttaggattatctgagaatacatttatctgcattttacggaaggcaaccgaggttcatagagatagtgatttggccagcgtcacaggcccagtaaaagggattgaaaatccaggtccgtccgaccctaaagcagggaactctgcctagtgtctcgctgtggaatgttagggatcctggggtacccttcagggtcttggctcggaaggaaaacattcccctccgaggggatggactatattaccaagggggtggagccagatgcctgagggggtgtggccagagcctggggcgtgtcacagccgaaggggcagggcggcagcagcaggcgtctaagtaacttcagcgcctgcgcagaggctccccagcgtcgccctaggctgggactctagtaggtcttcggctcagttttggctgcagcgcccgcgtagatcgcttcggccgggttctacgcccggctcaactatgagccggtgcgcccaggcggcggaagtggcggccacagtgccaggtgccggcgtcgggaacgtggggctgcggccgcccatggtgccccgtcaggcgtccttcttcccgccgccggtgccgaaccccttcgtgcagcagacgcagatcggctccgcgaggcgggtccagattgtccttcttgggattatcttgcttccaattcgtgtcttattggttgcgttaattttattacttgcatggccatttgctgcaatttcaacagtatgctgtcctgaaaagctgacccacccaataactggttggaggaggaaaattactcaaacagctttgaaatttctgggtcgtgctatgttcttttcaatgggatttatagttgctgtaaaaggaaagattgcaagtcctttggaagcaccagtttttgttgctgcccctcattcaacattctttgatggaattgcctgtgttgtagctgggttaccttctatggtatctcgaaatgagaatgcacaagtccctctgattggcagactgttacgggctgtgcaaccagttttggtgtcccgtgtagatccggattcccgaaaaaacacaataaatgaaataataaagcgaacaacatcaggaggagaatggccccagatactagttttcccagaaggtacttgtactaatcgttcctgtttgattacttttaaaccaggagccttcattccaggagttccagtgcagccagtcctcctcagatacccaaacaagctggatactgtgacctggacatggcaaggatatacattcattcagctttgtatgcttactttctgccagctcttcacaaaggtagaagttgagatgtttctgttcttttgggaaggaagcagcaagcattgtttaaaaatatcttccttcttttgcattttttctcttcgaagatttaaaagaagaattacacaaagaactagaactgcacatttgttaagattgtccttttaaaattattttctgttacaaggaaaaaataaaagattgattatagtgtcataa

SEQ ID NO: 420594 - DNA, 1950 bp, Homo sapiens
agtggttgctcaatggcattactggatccaggttaggattatctgagaatacatttatctgcattttacggaaggcaaccgaggttcatagagatagtgatttggccagcgtcacaggcccagtaaaagggattgaaaatccaggtccgtccgaccctaaagcagggaactctgcctagtgtctcgctgtggaatgttagggatcctggggtacccttcagggtcttggctcggaaggaaaacattcccctccgaggggatggactatattaccaagggggtggagccagatgcctgagggggtgtggccagagcctggggcgtgtcacagccgaaggggcagggcggcagcagcaggcgtctaagtaacttcagcgcctgcgcagaggctccccagcgtcgccctaggctgggactctagtaggtcttcggctcagttttggctgcagcgcccgcgtagatcgcttcggccgggttctacgcccggctcaactatgagccggtgcgcccaggcggcggaagtggcggccacagtgccaggtgccggcgtcgggaacgtggggctgcggccgcccatggtgccccgtcaggcgtccttcttcccgccgccggtgccgaaccccttcgtgcagcagacgcagatcggctccgcgaggcgggtccagattgtccttcttgggattatcttgcttccaattcgtgtcttattggttgcgttaattttattacttgcatggccatttgctgcaatttcaacagtatgctgtcctgaaaagctgacccacccaataactggttggaggaggaaaattactcaaacagctttgaaatttctgggtcgtgctatgttcttttcaatgggatttatagttgctgtaaaaggaaagattgcaagtcctttggaagcaccagtttttgttgctgcccctcattcaacattctttgatggaattgcctgtgttgtagctgggttaccttctatggtatctcgaaatgagaatgcacaagtccctctgattggcagactgttacgggctgtgcaaccagttttggtgtcccgtgtagatccggattcccgaaaaaacacaataaatgaaataataaagcgaacaacatcaggaggagaatggccccagatactagttttcccagaaggtacttgtactaatcgttcctgtttgattacttttaaaccaggagccttcattccaggagttccagtgcagccagtcctcctcagatacccaaacaagctggatactgtgacctggacatggcaaggatatacattcattcagctttgtatgcttactttctgccagctcttcacaaaggtagaagttgagtttatgccagttcaagtaccaaatgatgaagaaaaaaatgatcctgtcctttttgccaataaagtccggaatttaatggcagaagctctgggaataccagtaacagatcatacctatgaagactgcagattgatgatttcagcaggacagctaacattgcctatggaagctgggctggtggaatttactaaaattagccgaaaattgaaattagattgggatggtgttcgtaagcatttggatgaatatgcatctattgcgagttcctcaaaaggaggaagaattggaattgaagaattcgccaagtatttaaagttgcctgtttcagatgtcttgagacaactttttgcactctttgacagggtatgttaaaatttaatctttcacatttttactctgtcagtcctacagtgagtaaatcaatatggtaggcaatttgaaaaacttgataggtcagtgttagaagaatcaaggctgagcctatggtttaattgcatgattttgtttttttctccttaatagtaatattaataattgtgtgtgtgtattgtaacatttattatactgtcatatataataaaatatcatatcatatcatatcata

SEQ ID NO: 420595 - DNA, 1300 bp, Homo sapiens
gccgggcgcggtggcgcgtgcctgtagtctcagcctcccaaagtgctgggattacaggtgtgagccaccgttcccggcctattgtagattttcttaactacttgctaaggaaatcatatccttttacatgaactacaggtttagaacttggttttaagacaactgctatggccagaaggtaaatgggaattgccttattgaaggtaacattgattgcctaataagaaaatgaattgtttgccacagagttgaatttaatttgagttagatagttcagaatgtagcacttgccctataaatgaatcagatttgttctatttatataatattagaattaatatattatcatgtaagtgggaattttattttgttaagtggactctcaaattttagaacttgtgtgaaatatctcccagaaaacacaaaaggtttcaaggtatcacccaaagctagggaatcaacaaacgtactttattaatgcaagaccacaatttaagccccaggcaggaatccaacagtaacatttttcctttaggttaagcagtaatttttttgaattgtcatttttaatgggtctcacacatgcatattgctaatatcattcatgtttgaggttttcaacaaagaaccaatttattaatataatgtacaaaaatagttggttcattttctgaattcagtctttgaaataaaactccttgttttggccgtgtttctgaatgtattggtgattcacccccaagctaattttttaaagtcatttttgaagttgggaagtctcatgagagatgttgaagtatgtatttaatcaagagtcatgatttcaaactagttttacatattaagcagttagtgttctaatttaatgggtaaatgtgtgtttggataaatatctgaaaattttatccttaagtatatataattatttgcctcttatatgtcttaaagctatttaaacaaggtgttaaatgagccaaaacaattaagtaattagaacagtacatttttatcagagtgtctgtcatatgcaatgaatgtatgtaatactaaaaaatcatgactacttttatcaaagaaaaaccacacattaatcctattaatcatgaaagcgtagcattgtaaattaaaggttttctttgaggctcttgaaagtgatcccattgctttcctgttttaaaaatattttatgctctttatttccacttctgtgaatgtgatatttctattttgtgattatgttactgaataaacaaacttgctacataaaattcttagcaattaaaaaaattctgattctgcc

SEQ ID NO: 420596 - DNA, 571 bp, Homo sapiens
tgctgcttctctctcggatacccaaacaagctggatactgtgacctggacatggcaaggatatacattcattcagctttgtatgcttactttctgccagctcttcacaaaggtagaagttgagtttatgccagttcaagtaccaaatgatgaagaaaaaaatgatcctgtcctttttgccaataaagtccggaatttaatggcagaagctctgggaataccagtaacagatcatacctatgaagactgcagattgatgatttcagcaggacagctaacattgcctatggaagctgggctggtggaatttactaaaattagccgaaaattgaaattagattgggatggtgttcgtaagcatttggatgaatatgcatctattgcgagttcctcaaaaggaggaagaattggaattgaagaattcgccaagtatttaaagttgcctgtttcagatgtcttgagacaactttttgcactctttgacagggctctattggaaggagcagatcgaggtcttggagaagctcttggaggcctctttggaggaggtggtcagagaagagaaggaggag

SEQ ID NO: 420597 - DNA, 3167 bp, Homo sapiens
  misc_feature (1254)..(1254): n is a, c, g, or t
gtttcaccctcacaatcaccagggaagtagtgatcttagccctctttttagagttgaaatggttcatcaaagttaaatgacatactagttaacacacaagcagacccagggcttagaaacagatctcctgagtacaagcccagtgccccattacctcatataacctatgttctagaaaggtagatgattcaatatattgataatgtataaattaatttacttggcatttaatgtcttaggcttaagacattgttatggaaaggtatatttgtctttcagtttatgccagttcaagtaccaaatgatgaagaaaaaaatgatcctgtcctttttgccaataaagtccggaatttaatggcagaagctctgggaataccagtaacagatcatacctatgaagactgcagattgatgatttcagcaggacagctaacattgcctatggaagctgggctggtggaatttactaaaattagccgaaaattgaaattagattgggatggtgttcgtaagcatttggatgaatatgcatctattgcgagttcctcaaaaggaggaagaattggaattgaagaattcgccaagtatttaaagttgcctgtttcagatgtcttgagacaactttttgcactctttgacaggaaccatgatggcagcattgacttccgagagtatgtgattggcctggctgtcttgtgcaacccttccaacacagaggagatcatccaggtggcatttaagctgtttgacgttgatgaggatggctacataacggaggaagagttctccaccattctacaggcttcccttggagtgcctgaccttgatgtttctggtctcttcaaggaaatagcccaaggggactcaatttcctatgaggaatttaaaagttttgccttaaagcatccagaatatgctaagatatttacaacatacctagacctccagacgtgccatgtgttttcattaccaaaagaagtccagacaaccccctccaccgccagtaataaagtcagccctgaaaagcatgaagagagtacctcagacaaaaaagatgactgaaagcagtatttccaataaggaaaacacagtagcttttgcttgaaattgtaaaggcacttattgataatacttttaatgtgttggtaatgatgtttaaaattgaaagatttttaaaataaaaatgatagattttcttactaaaaatgtttttattaaccttgcttttattggaaaaaatcaagcaatatttcnttttcttttgtgttatattgtactttactgattcatttactggtgatacatatgtttttatggattttccagtttaatttgcatatacaaatgaatgcaatggtctattggtgagcattgagcaacactgtataaagttttaaaaatgtaaacactttttaatctactttcctctaaaaatcaataatattctattatttctaatccttttccacttgggaaataacaatgaagaatctgagaatttgacatctataactttacagattcatttttccatttaaatttcagtttcttggatcactgaatatgggaagggagagcttcactaattagacgcagcttcttaagaacttatattctctttgacatacatctctattgtagttttttgttttgttttgttttttgagatggagtcttgctctgtcacccaggctggagtgcagtggtgcaatctcagctcactgcaacctctgcctcctgggttcaagtgattctcgtacctcagactcccgagtagttgggattacaggtgcccaccaccacacccgactaatttttgtatttttagtagccatgtggttttgccatgttggccaggctggtttcgaactcctgacctcaggtgatccacccacctcagcctcccaaagtgctgggattacaggtgtgagccaccgttcccggcctattgtagattttcttaactacttgctaaggaaatcatatccttttacatgaactacaggtttagaacttggttttaagacaactgctatggccagaaggtaaatgggaattgccttattgaaggtaacattgattgcctaataagaaaatgaattgtttgccacagagttgaatttaatttgagttagatagttcagaatgtagcacttgccctataaatgaatcagatttgttctatttatataatattagaattaatatattatcatgtaagtgggaattttattttgttaagtggactctcaaattttagaacttgtgtgaaatatctcccagaaaacacaaaaggtttcaaggtatcacccaaagctagggaatcaacaaacgtactttattaatgcaagaccacaatttaagccccaggcaggaatccaacagtaacatttttcctttaggttaagcagtaatttttttgaattgtcatttttaatgggtctcacacatgcatattgctaatatcattcatgtttgaggttttcaacaaagaaccaatttattaatataatgtacaaaaatagttggttcattttctgaattcagtctttgaaataaaactccttgttttggccgtgtttctgaatgtattggtgattcacccccaagctaattttttaaagtcatttttgaagttgggaagtctcatgagagatgttgaagtatgtatttaatcaagagtcatgatttcaaactagttttacatattaagcagttagtgttctaatttaatgggtaaatgtgtgtttggataaatatctgaaaattttatccttaagtatatataattatttgcctcttatatgtcttaaagctatttaaacaaggtgttaaatgagccaaaacaattaagtaattagaacagtacatttttatcagagtgtctgtcatatgcaatgaatgtatgtaatactaaaaaatcatgactacttttatcaaagaaaaaccacacattaatcctattaatcatgaaagcgtagcattgtaaattaaaggttttctttgaggctcttgaaagtgatcccattgctttcctgttttaaaaatattttatgctctttatttccacttctgtgaatgtgatatttctattttgtgattatgttactgaataaacaaacttgctacataaaattcttagcaattaaaaaaattctgattctgcc

SEQ ID NO: 420598 - DNA, 4366 bp, Homo sapiens
  misc_feature (2321)..(2321): n is a, c, g, or t
agtggttgctcaatggcattactggatccaggttaggattatctgagaatacatttatctgcattttacggaaggcaaccgaggttcatagagatagtgatttggccagcgtcacaggcccagtaaaagggattgaaaatccaggtccgtccgaccctaaagcagggaactctgcctagtgtctcgctgtggaatgttagggatcctggggtacccttcagggtcttggctcggaaggaaaacattcccctccgaggggatggactatattaccaagggggtggagccagatgcctgagggggtgtggccagagcctggggcgtgtcacagccgaaggggcagggcggcagcagcaggcgtctaagtaacttcagcgcctgcgcagaggctccccagcgtcgccctaggctgggactctagtaggtcttcggctcagttttggctgcagcgcccgcgtagatcgcttcggccgggttctacgcccggctcaactatgagccggtgcgcccaggcggcggaagtggcggccacagtgccaggtgccggcgtcgggaacgtggggctgcggccgcccatggtgccccgtcaggcgtccttcttcccgccgccggtgccgaaccccttcgtgcagcagacgcagatcggctccgcgaggcgggtccagattgtccttcttgggattatcttgcttccaattcgtgtcttattggttgcgttaattttattacttgcatggccatttgctgcaatttcaacagtatgctgtcctgaaaagctgacccacccaataactggttggaggaggaaaattactcaaacagctttgaaatttctgggtcgtgctatgttcttttcaatgggatttatagttgctgtaaaaggaaagattgcaagtcctttggaagcaccagtttttgttgctgcccctcattcaacattctttgatggaattgcctgtgttgtagctgggttaccttctatggtatctcgaaatgagaatgcacaagtccctctgattggcagactgttacgggctgtgcaaccagttttggtgtcccgtgtagatccggattcccgaaaaaacacaataaatgaaataataaagcgaacaacatcaggaggagaatggccccagatactagttttcccagaaggtacttgtactaatcgttcctgtttgattacttttaaaccaggagccttcattccaggagttccagtgcagccagtcctcctcagatacccaaacaagctggatactgtgacctggacatggcaaggatatacattcattcagctttgtatgcttactttctgccagctcttcacaaaggtagaagttgagtttatgccagttcaagtaccaaatgatgaagaaaaaaatgatcctgtcctttttgccaataaagtccggaatttaatggcagaagctctgggaataccagtaacagatcatacctatgaagactgcagattgatgatttcagcaggacagctaacattgcctatggaagctgggctggtggaatttactaaaattagccgaaaattgaaattagattgggatggtgttcgtaagcatttggatgaatatgcatctattgcgagttcctcaaaaggaggaagaattggaattgaagaattcgccaagtatttaaagttgcctgtttcagatgtcttgagacaactttttgcactctttgacaggaaccatgatggcagcattgacttccgagagtatgtgattggcctggctgtcttgtgcaacccttccaacacagaggagatcatccaggtggcatttaagctgtttgacgttgatgaggatggctacataacggaggaagagttctccaccattctacaggcttcccttggagtgcctgaccttgatgtttctggtctcttcaaggaaatagcccaaggggactcaatttcctatgaggaatttaaaagttttgccttaaagcatccagaatatgctaagatatttacaacatacctagacctccagacgtgccatgtgttttcattaccaaaagaagtccagacaaccccctccaccgccagtaataaagtcagccctgaaaagcatgaagagagtacctcagacaaaaaagatgactgaaagcagtatttccaataaggaaaacacagtagcttttgcttgaaattgtaaaggcacttattgataatacttttaatgtgttggtaatgatgtttaaaattgaaagatttttaaaataaaaatgatagattttcttactaaaaatgtttttattaaccttgcttttattggaaaaaatcaagcaatatttcnttttcttttgtgttatattgtactttactgattcatttactggtgatacatatgtttttatggattttccagtttaatttgcatatacaaatgaatgcaatggtctattggtgagcattgagcaacactgtataaagttttaaaaatgtaaacactttttaatctactttcctctaaaaatcaataatattctattatttctaatccttttccacttgggaaataacaatgaagaatctgagaatttgacatctataactttacagattcatttttccatttaaatttcagtttcttggatcactgaatatgggaagggagagcttcactaattagacgcagcttcttaagaacttatattctctttgacatacatctctattgtagttttttgttttgttttgttttttgagatggagtcttgctctgtcacccaggctggagtgcagtggtgcaatctcagctcactgcaacctctgcctcctgggttcaagtgattctcgtacctcagactcccgagtagttgggattacaggtgcccaccaccacacccgactaatttttgtatttttagtagccatgtggttttgccatgttggccaggctggtttcgaactcctgacctcaggtgatccacccacctcagcctcccaaagtgctgggattacaggtgtgagccaccgttcccggcctattgtagattttcttaactacttgctaaggaaatcatatccttttacatgaactacaggtttagaacttggttttaagacaactgctatggccagaaggtaaatgggaattgccttattgaaggtaacattgattgcctaataagaaaatgaattgtttgccacagagttgaatttaatttgagttagatagttcagaatgtagcacttgccctataaatgaatcagatttgttctatttatataatattagaattaatatattatcatgtaagtgggaattttattttgttaagtggactctcaaattttagaacttgtgtgaaatatctcccagaaaacacaaaaggtttcaaggtatcacccaaagctagggaatcaacaaacgtactttattaatgcaagaccacaatttaagccccaggcaggaatccaacagtaacatttttcctttaggttaagcagtaatttttttgaattgtcatttttaatgggtctcacacatgcatattgctaatatcattcatgtttgaggttttcaacaaagaaccaatttattaatataatgtacaaaaatagttggttcattttctgaattcagtctttgaaataaaactccttgttttggccgtgtttctgaatgtattggtgattcacccccaagctaattttttaaagtcatttttgaagttgggaagtctcatgagagatgttgaagtatgtatttaatcaagagtcatgatttcaaactagttttacatattaagcagttagtgttctaatttaatgggtaaatgtgtgtttggataaatatctgaaaattttatccttaagtatatataattatttgcctcttatatgtcttaaagctatttaaacaaggtgttaaatgagccaaaacaattaagtaattagaacagtacatttttatcagagtgtctgtcatatgcaatgaatgtatgtaatactaaaaaatcatgactacttttatcaaagaaaaaccacacattaatcctattaatcatgaaagcgtagcattgtaaattaaaggttttctttgaggctcttgaaagtgatcccattgctttcctgttttaaaaatattttatgctctttatttccacttctgtgaatgtgatatttctattttgtgattatgttactgaataaacaaacttgctacataaaattcttagcaattaaaaaaattctgattctgccattttgtctcaaatgtaatatacccttttaatatcatatgtttacatatttatgaatgattaatcatttttgtttgcattaaactttatgaaatgtcagaaatgattttactctaatgaaactcaaattttg

SEQ ID NO: 420599 - DNA, 1388 bp, Homo sapiens
  misc_feature (2)..(2): n is a, c, g, or t
  misc_feature (5)..(6): n is a, c, g, or t
  misc_feature (183)..(184): n is a, c, g, or t
gnggnngcggctcgttgctcagccaccagtggccttgcggtattgtccaccatccactagagtgggatgaagtccagagtgtgggtatacatctcagatgcccatctacccactggggacttcaatgccagctgcatttggtttggttttcttaactgttggcttctccccacagcgtttttnntttttttttaaacattcatattgttttcaaacttggaattcatagacactctggctctaggttccttaagggggaaaacaaaagatgactttatttcacattcaagaaaatcagttcagttccaaagctgtggtccttccagccacttctagggacactggggaaccttgttaaacgttgacatcagtgctctccagccgtgctgtcaccctcctatcttctggatctgccttcgggatggtcagtgacagcttctggaagctgagcacacacaggtgcacagccatgctgtggtctggcctgctacggcagcatggcagctctggtggagccttctcccttgccatttggttcccctgtgccaagtagctgcaggctgcccctcaaatcttcatttgtcccttttcacttcctgcagaacaagcctgggttagagggtctgctggaaatggcctttgaagaccaaggataccaggatgtgtgcactctgtcgtgttctgtgatgaatgggaaacgtaggcttccagaaagccagctctcttctgaaatgtgacggacctaagcaggaagtcatccaggacaggaagtggctcagtgttggggatggacgctgtcgcccagccatgctccaccagggccaccaatgtgtagttggctggtggtcttcgggcatgtgagacctgctcttcactgtttccaccccacttggtggcctccaggatggtagtggcaccctcagagccccatcttcagcatgttctgaagcctcagagtggaaattcctgctaaggctctgtgtggacgcctttctcccgtgatctataggggacactgtactcaagcttttgacctcatgccttgtgtagtaaaaaaggatttgggggttttgtttggttcctgagagggttgtgttttgtttttgtttccttttgtttatgttttggcctttcctctttgtctttccatgtagaccagcatatttgaaagggcagacgacggctagaggtgtaatgtgcagcttgtttatacggtattttgggaaacttaccttggatgggaaatcgaatcgtggattcaccaggccggtgctggcacactcaccctcgccctttccctccggttcagtacctattgtttctcctttcaaatatgtgattgtactagctctttccatatgaaagaattctccttatttaaataaaaa

SEQ ID NO: 420600 - DNA, 445 bp, Homo sapiens
ttgccatcagcaagggctatgctgtgattctgtctctgagtgacttggaccactgaccctcagatttccagccttaaaatccaccttccttctcatgcgcctctccgaatcacaccctgactcttccagcctccatgtccagacctagtcagcctctctcactcctgcccctactatctatcatggaataacatccaagaaagacaccttgcatattctttcagtttctgttttgttctcccacatattctcttcaatgctcaggaagcctgccctgtgcttgagagttcagggccggacacaggctcacaggtctccacattgggtccctgtctctggtgcccacagtgagctccttcttggctgagcaggcatggagactgtaggtttccagatttcctgaaaaataaaagtttacagcgttatctctccccaacctcactaa

SEQ ID NO: 420601 - DNA, 900 bp, Homo sapiens
ccttgggctccatggtgaacacctgtcagaatccggaaatcttcaaggagatgaacaatgcctttgctcacctaccccaaggggtgatatggaagtgtcagtgttctcattggcccaaagatgtccacctggctgcaaatgtgaaaattgtggactggcttcctcagagtgacctcctggctcacccaagcatccgtctgtttgtcacccacggcgggcagaatagcataatggaggccatccagcatggtgtgcccatggtggggatccctctctttggagaccagcctgaaaacatggtccgagtagaagccaaaaagtttggtgtttctattcagttaaagaagctcaaggcagagacattggctcttaagatgaaacaaatcatggaagacaagagatacaagtccgcggcagtggctgccagtgtcatcctgcgctcccacccgctcagccccacacagcggctggtgggctggattgaccacgtcctccagacagggggcgcgacgcacctcaagccctatgtctttcagcagccctggcatgagcagtacctgctcgacgtttttgtgtttctgctggggctcactctggggactctatggctttgtgggaagctgctgggcatggctgtctggtggctgcgtggggccagaaaggtgaaggagacataaggccaggtgcagccttggcggggtctgtttggtgggcgatgtcaccatttctagggagcttcccactagttctggcagccccattctctagtccttctagttatctcctgttttcttgaagaacaggaaaaatggccaaaaatcatcctttccacttgctaattttgctacaaattcatccttactagctcctgcctgctagcagaattctttccagtcctct

SEQ ID NO: 420602 - DNA, 956 bp, Homo sapiens
ccttgggctccatggtgaacacctgtcagaatccggaaatcttcaaggagatgaacaatgcctttgctcacctaccccaaggggtgatatggaagtgtcagtgttctcattggcccaaagatgtccacctggctgcaaatgtgaaaattgtggactggcttcctcagagtgacctcctggctcacccaagcatccgtctgtttgtcacccacggcgggcagaatagcataatggaggccatccagcatggtgtgcccatggtggggatccctctctttggagaccagcctgaaaacatggtccgagtagaagccaaaaagtttggtgtttctattcagttaaagaagctcaaggcagagacattggctcttaagatgaaacaaatcatggaagacaagagatacaagtccgcggcagtggctgccagtgtcatcctgcgctcccacccgctcagccccacacagcggctggtgggctggattgaccacgtcctccagacagggggcgcgacgcacctcaagccctatgtctttcagcagccctggcatgagcagtacctgctcgacgtttttgtgtttctgctggggctcactctggggactctatggctttgtgggaagctgctgggcatggctgtctggtggctgcgtggggccagaaaggtgaaggagacataaggccaggtgcagccttggcggggtctgtttggtgggcgatgtcaccatttctagggagcttcccactagttctggcagccccattctctagtccttctagttatctcctgttttcttgaagaacaggaaaaatggccaaaaatcatcctttccaattgggtccctgtctctggtgcccacagtgagctccttcttggctgagcaggcatggagactgtaggtttccagatttcctgaaaaataaaagtttacagcgttatctctccccaacctcactaa

SEQ ID NO: 420603 - DNA, 3262 bp, Homo sapiens
tgcggtcagagggccgaggcctgggggcgagctggggtcgtgcagtacagcctctttccggcaaatcacgcgagatttcgttcacccgggctccacagggtcagtgacgcgcgagcggctcccgcgactgtggctcccgaagctgcttcgggccccagcggagtattttatacagaaatcttgtgaaaccactgcccaaccagagcaatgattgttcaaagagtggtattgaattctcgacctggaaaaaatggtaatccagtggcagagaatttccgaatggaagaagtctatttaccagataatattaatgaaggacaagtacaagttagaactctttatctttctgtggatccttacatgcgttgtagaatgaatgaagacactggcactgattatataacaccttggcagctatctcaagtcgttgatggtggaggtattggaattatagaagaaagcaaacacacaaatttgactaaaggcgattttgtgacttctttctattggccctggcaaaccaaggttattctggatggaaatagccttgaaaaggtagacccacaacttgtggatggacacctttcatattttcttggagctataggtatgcctggtttgacttccttgattgggatacaggaaaaaggtcatataactgctggatctaataagacaatggttgtcagtggggccgcaggtgcctgtggatctgtggctgggcagattggccatttcttaggttgttccagagtggtgggaatttgtggaacacatgagaaatgcatcctcttgacctcagaactgggctttgatgctgcaattaattataaaaaagacaatgtggcagaacagctccgtgaatcatgcccagctggagtggatgtttattttgacaatgttggtggtaacatcagtgatacagtgataagtcagatgaatgagaacagccacatcatcctgtgtggtcaaatttctcagtacaacaaagatgtgccttatcctcccccgctatcccctgctatagaggcaatccagaaagaaagaaacatcacaagggaaagatttctggtattaaattataaagacaaatttgagcctggcattctacagctgagtcagtggtttaaagaaggaaagctaaagattaaagagacggtaataaatgggttggaaaacatgggagctgcattccagtccatgatgacaggaggtaacattggaaagcagatagtttgcatttcagaagaaatctctttgtaattgctgtaaatgtcatcaaggcaatcatagatttcttttccattttgcatattttcaaagatatgttaaaaaatccttagactatacatagctcttgatttaaatgtgatcataggtgttatttttagttgcatagggtatttgatacaatcattaatggatcatacacaataggtttttaaaaattaataacttttagtaattacttttattaatttaaaatagaacgcttgagaggcactttgtaaagatttgttaaactggaaacgttttacatgatctgatacaaccattaatgaatcatacacaataggttttttaaaattaatattaataacttttattaatttaaaatagaatgcttaaaataaaatagaatgcttgagaggcactgagtaaagatttgttgaactggaaatgttttacatgattcttaaactgaaacttggtgtaaaaatagaattgagatggcctttttttcacattgtagactgaaaagagacttaatggtatgatgtgtacatagggactgggggcaggattgggggtttcggagcttgtgtaacagtttttgggataggagaccagcggttttgggttgggattagtatgggaagataaataacttaggttggttaagttgacaagatttactccagaggatcatctctttgtatttgccaaataatttactgtatagcctaaaaactccatatatattgagaaaagcatatgtttattttaggttagcaggcacatactgtcaagttgtaaagattgagagggcaaacagatgtaaacatcacttgtaggtgattaaaaagattgacagccgggcctgatgtctcaagcctgtaatcctagcactttgggaggcagaggcgggcagatcacttgaggtcaggagttcaagaccagcctggccaacacggtgaaaccccatctctctaaaaatacaaaaattagctgggcgtggtggcacacgcctgtaatcccagctactcaggaggctgaggctggagaatcatttgaacctgggagggggaggttgccgtgagctgagcttgcaccattgcactccagcctgggcgacaagagtgaaattccatctcaaaaaacaaaaacagattgacaacaaagacagtttcagaaaatgacaggactgggcaaattaacaaatgtttgtaaacatgaatgttcaggaactactgatgtacctccaaagtttgttttattaattgtactcaaccctcgcagaacagtaaaactgaagattattgtttctgaaaaaaaaaaaaaaaaagagggaaaaaaaaaaaaaaaaaaaaaaaaacaaaaaaaaaaaaaaaaaaaaaaaaaaaaaaaaacaaaaaaaaaaaaaaaaaaaaaaaaaaagagagaacagaaaagagaaaagagaaaagaaagacagaggagagggaggcagcggggaggagagagcaggccacagggagggcggggcagcgacgaggaccgaagagggaaggcggaggcacacgaagacagagaaagcaagggagaggagggaggaagggtagagaagagcggggatggaaggagaagaggtaagaccggagaagaagagaagaaaaagaagaggaggcgaaagacgggagaacgaagaggagaagaggacaggagagagggagagagagaaaaggggaggagagaggaagagcagaggcgggaaaagaaaaagagagggaaaaatgagggaggggagacaggaaaggaggagaggagagcaaaaagaaggacaagagaggagagaggaagaggaagagaagaagagaaaaacggaccgagacaaagggaagaacagaagagtcggaaagaacaagaagaggacgaaagaggaggacgagcgaatgaggtcaagagagagaagcaaacaagcagacggaagagagagagaaagaaaaatgagacagaagagaaaacgggagaagaggaagaaaaacgacaacaagacgcgggc

SEQ ID NO: 420604 - DNA, 749 bp, Homo sapiens
gatttttctccctcttcattgggaaacacaaatggacttcttttttatttttaaattgttgaatacttcaaatcttgtgatttaaaaatttttttatttataggagtattttatacagaaatcttgtgaaaccactgcccaaccagagcaatgattgttcaaagagtggtattgaattctcgacctggtatgtatttgcgatgaatgaacaactctgatctttgataagtattaatgcaaatggaggaataaaaactaatgtgatgttcatgtggtaaattaaggtagtaagatattgacactagtaaagatattagaagaaactctttaaacgatgtaataattttcaagtgttagcttatcaagaccatttttaaacagtgtgctagtttttcaagtgataacttatccaggcatttgttgatgaaataaggtattttggaatcataatgtctgaaaggttacattacaaatatatgtggcttttgtttctttagagtatgttattattggtccttaaaatttgcttttcttttttatgtgaaatgtactaacatatcagtgctgacatgtaaactgcatcataaaaacagatatggaaagaacctgagagatttgggtcactgctgcccacttgaggaagtcacttaacttttctgaactcaattttagtaaaatgagcagttagattaagatctttatgtactattcccaccttataaatttaacaattctatgaagagtaaatt

SEQ ID NO: 420605 - DNA, 164 bp, Homo sapiens
tacctccaaagtttgttttattaattgtactcaaccctcgcagaacagtaaaactgaagattattgtttctgaatgttttggcttatgattgtctacacactgccaatatacttttgtatgcaacatttgtaataagtagattcaaactgtgttggtaatcagc

SEQ ID NO: 420606 - DNA, 3378 bp, Homo sapiens
tgcggtcagagggccgaggcctgggggcgagctggggtcgtgcagtacagcctctttccggcaaatcacgcgagatttcgttcacccgggctccacagggtcagtgacgcgcgagcggctcccgcgactgtggctcccgaagctgcttcgggccccagcggtgagggagaagactctcaaccagggtgacttctaggcgtcctccctgagctaccggggacactggcgttattgcccggaacactgagatagggaatgctcgagaaacagaagcaggagtattttatacagaaatcttgtgaaaccactgcccaaccagagcaatgattgttcaaagagtggtattgaattctcgacctggaaaaaatggtaatccagtggcagagaatttccgaatggaagaagtctatttaccagataatattaatgaaggacaagtacaagttagaactctttatctttctgtggatccttacatgcgttgtagaatgaatgaagacactggcactgattatataacaccttggcagctatctcaagtcgttgatggtggaggtattggaattatagaagaaagcaaacacacaaatttgactaaaggcgattttgtgacttctttctattggccctggcaaaccaaggttattctggatggaaatagccttgaaaaggtagacccacaacttgtggatggacacctttcatattttcttggagctataggtatgcctggtttgacttccttgattgggatacaggaaaaaggtcatataactgctggatctaataagacaatggttgtcagtggggccgcaggtgcctgtggatctgtggctgggcagattggccatttcttaggttgttccagagtggtgggaatttgtggaacacatgagaaatgcatcctcttgacctcagaactgggctttgatgctgcaattaattataaaaaagacaatgtggcagaacagctccgtgaatcatgcccagctggagtggatgtttattttgacaatgttggtggtaacatcagtgatacagtgataagtcagatgaatgagaacagccacatcatcctgtgtggtcaaatttctcagtacaacaaagatgtgccttatcctcccccgctatcccctgctatagaggcaatccagaaagaaagaaacatcacaagggaaagatttctggtattaaattataaagacaaatttgagcctggcattctacagctgagtcagtggtttaaagaaggaaagctaaagattaaagagacggtaataaatgggttggaaaacatgggagctgcattccagtccatgatgacaggaggtaacattggaaagcagatagtttgcatttcagaagaaatctctttgtaattgctgtaaatgtcatcaaggcaatcatagatttcttttccattttgcatattttcaaagatatgttaaaaaatccttagactatacatagctcttgatttaaatgtgatcataggtgttatttttagttgcatagggtatttgatacaatcattaatggatcatacacaataggtttttaaaaattaataacttttagtaattacttttattaatttaaaatagaacgcttgagaggcactttgtaaagatttgttaaactggaaacgttttacatgatctgatacaaccattaatgaatcatacacaataggttttttaaaattaatattaataacttttattaatttaaaatagaatgcttaaaataaaatagaatgcttgagaggcactgagtaaagatttgttgaactggaaatgttttacatgattcttaaactgaaacttggtgtaaaaatagaattgagatggcctttttttcacattgtagactgaaaagagacttaatggtatgatgtgtacatagggactgggggcaggattgggggtttcggagcttgtgtaacagtttttgggataggagaccagcggttttgggttgggattagtatgggaagataaataacttaggttggttaagttgacaagatttactccagaggatcatctctttgtatttgccaaataatttactgtatagcctaaaaactccatatatattgagaaaagcatatgtttattttaggttagcaggcacatactgtcaagttgtaaagattgagagggcaaacagatgtaaacatcacttgtaggtgattaaaaagattgacagccgggcctgatgtctcaagcctgtaatcctagcactttgggaggcagaggcgggcagatcacttgaggtcaggagttcaagaccagcctggccaacacggtgaaaccccatctctctaaaaatacaaaaattagctgggcgtggtggcacacgcctgtaatcccagctactcaggaggctgaggctggagaatcatttgaacctgggagggggaggttgccgtgagctgagcttgcaccattgcactccagcctgggcgacaagagtgaaattccatctcaaaaaacaaaaacagattgacaacaaagacagtttcagaaaatgacaggactgggcaaattaacaaatgtttgtaaacatgaatgttcaggaactactgatgtacctccaaagtttgttttattaattgtactcaaccctcgcagaacagtaaaactgaagattattgtttctgaaaaaaaaaaaaaaaaagagggaaaaaaaaaaaaaaaaaaaaaaaaacaaaaaaaaaaaaaaaaaaaaaaaaaaaaaaaaacaaaaaaaaaaaaaaaaaaaaaaaaaaagagagaacagaaaagagaaaagagaaaagaaagacagaggagagggaggcagcggggaggagagagcaggccacagggagggcggggcagcgacgaggaccgaagagggaaggcggaggcacacgaagacagagaaagcaagggagaggagggaggaagggtagagaagagcggggatggaaggagaagaggtaagaccggagaagaagagaagaaaaagaagaggaggcgaaagacgggagaacgaagaggagaagaggacaggagagagggagagagagaaaaggggaggagagaggaagagcagaggcgggaaaagaaaaagagagggaaaaatgagggaggggagacaggaaaggaggagaggagagcaaaaagaaggacaagagaggagagaggaagaggaagagaagaagagaaaaacggaccgagacaaagggaagaacagaagagtcggaaagaacaagaagaggacgaaagaggaggacgagcgaatgaggtcaagagagagaagcaaacaagcagacggaagagagagagaaagaaaaatgagacagaagagaaaacgggagaagaggaagaaaaacgacaacaagacgcgggc

SEQ ID NO: 420607 - DNA, 3201 bp, Homo sapiens
tgcggtcagagggccgaggcctgggggcgagctggggtcgtgcagtacagcctctttccggcaaatcacgcgagatttcgttcacccgggctccacagggagtattttatacagaaatcttgtgaaaccactgcccaaccagagcaatgattgttcaaagagtggtattgaattctcgacctggaaaaaatggtaatccagtggcagagaatttccgaatggaagaagtctatttaccagataatattaatgaaggacaagtacaagttagaactctttatctttctgtggatccttacatgcgttgtagaatgaatgaagacactggcactgattatataacaccttggcagctatctcaagtcgttgatggtggaggtattggaattatagaagaaagcaaacacacaaatttgactaaaggcgattttgtgacttctttctattggccctggcaaaccaaggttattctggatggaaatagccttgaaaaggtagacccacaacttgtggatggacacctttcatattttcttggagctataggtatgcctggtttgacttccttgattgggatacaggaaaaaggtcatataactgctggatctaataagacaatggttgtcagtggggccgcaggtgcctgtggatctgtggctgggcagattggccatttcttaggttgttccagagtggtgggaatttgtggaacacatgagaaatgcatcctcttgacctcagaactgggctttgatgctgcaattaattataaaaaagacaatgtggcagaacagctccgtgaatcatgcccagctggagtggatgtttattttgacaatgttggtggtaacatcagtgatacagtgataagtcagatgaatgagaacagccacatcatcctgtgtggtcaaatttctcagtacaacaaagatgtgccttatcctcccccgctatcccctgctatagaggcaatccagaaagaaagaaacatcacaagggaaagatttctggtattaaattataaagacaaatttgagcctggcattctacagctgagtcagtggtttaaagaaggaaagctaaagattaaagagacggtaataaatgggttggaaaacatgggagctgcattccagtccatgatgacaggaggtaacattggaaagcagatagtttgcatttcagaagaaatctctttgtaattgctgtaaatgtcatcaaggcaatcatagatttcttttccattttgcatattttcaaagatatgttaaaaaatccttagactatacatagctcttgatttaaatgtgatcataggtgttatttttagttgcatagggtatttgatacaatcattaatggatcatacacaataggtttttaaaaattaataacttttagtaattacttttattaatttaaaatagaacgcttgagaggcactttgtaaagatttgttaaactggaaacgttttacatgatctgatacaaccattaatgaatcatacacaataggttttttaaaattaatattaataacttttattaatttaaaatagaatgcttaaaataaaatagaatgcttgagaggcactgagtaaagatttgttgaactggaaatgttttacatgattcttaaactgaaacttggtgtaaaaatagaattgagatggcctttttttcacattgtagactgaaaagagacttaatggtatgatgtgtacatagggactgggggcaggattgggggtttcggagcttgtgtaacagtttttgggataggagaccagcggttttgggttgggattagtatgggaagataaataacttaggttggttaagttgacaagatttactccagaggatcatctctttgtatttgccaaataatttactgtatagcctaaaaactccatatatattgagaaaagcatatgtttattttaggttagcaggcacatactgtcaagttgtaaagattgagagggcaaacagatgtaaacatcacttgtaggtgattaaaaagattgacagccgggcctgatgtctcaagcctgtaatcctagcactttgggaggcagaggcgggcagatcacttgaggtcaggagttcaagaccagcctggccaacacggtgaaaccccatctctctaaaaatacaaaaattagctgggcgtggtggcacacgcctgtaatcccagctactcaggaggctgaggctggagaatcatttgaacctgggagggggaggttgccgtgagctgagcttgcaccattgcactccagcctgggcgacaagagtgaaattccatctcaaaaaacaaaaacagattgacaacaaagacagtttcagaaaatgacaggactgggcaaattaacaaatgtttgtaaacatgaatgttcaggaactactgatgtacctccaaagtttgttttattaattgtactcaaccctcgcagaacagtaaaactgaagattattgtttctgaaaaaaaaaaaaaaaaagagggaaaaaaaaaaaaaaaaaaaaaaaaacaaaaaaaaaaaaaaaaaaaaaaaaaaaaaaaaacaaaaaaaaaaaaaaaaaaaaaaaaaaagagagaacagaaaagagaaaagagaaaagaaagacagaggagagggaggcagcggggaggagagagcaggccacagggagggcggggcagcgacgaggaccgaagagggaaggcggaggcacacgaagacagagaaagcaagggagaggagggaggaagggtagagaagagcggggatggaaggagaagaggtaagaccggagaagaagagaagaaaaagaagaggaggcgaaagacgggagaacgaagaggagaagaggacaggagagagggagagagagaaaaggggaggagagaggaagagcagaggcgggaaaagaaaaagagagggaaaaatgagggaggggagacaggaaaggaggagaggagagcaaaaagaaggacaagagaggagagaggaagaggaagagaagaagagaaaaacggaccgagacaaagggaagaacagaagagtcggaaagaacaagaagaggacgaaagaggaggacgagcgaatgaggtcaagagagagaagcaaacaagcagacggaagagagagagaaagaaaaatgagacagaagagaaaacgggagaagaggaagaaaaacgacaacaagacgcgggc

SEQ ID NO: 420608 - DNA, 2774 bp, Homo sapiens
catgcatgagtagtcatcatatttttcaagtgaaatatcgggacatgatataacacatgacttaacaatggtactgaatatttgaaatcaggcctttcccggaaaatcatgcatgaaggatcattataaacaaacaatagcaaccagttgtctccccgaacttgtcacttttctcataaatgtctggcctggagctccaaaatcatccaaatacttagtagcattttagcctgagtacactttctcagttcctcaactctttgtatacctttccaccaatatagacattctagaatctgcttcagatgcatttgaaattttcacccccatggaactagtgattaatatcagagcccactcttgcagttggtaatggggtggcaatcaaacgttcagatgatgataaaggagagataatggataattctttttcagagttctcacttaacagctctgttgtggaatgttttaaatagtcttataaataatttgtttatagtattgttgttagtttaattgaattttatgtaagaagctgtccaacatcagagaaatgaaattcctcccactttctgtgtagaacaaggtctctgacagtattgattcatggaagtactaatggacttagaaaacattaagagaatgtcatttctcatagtgtttctgtttctgaaaatgaatctcctgaattattatctttctccctgttacttggctggggaaagagatagaagctgtataaacaaattctcttccatgctcaaagcaagtgttccatgtgcacaacctgctgcagactggggcccttctcagttaattgggtttcacaagcaataatttctccacaacaaaaaccacaacttgaagtgagttgaaaagagatcaatagtggaaacagtcgcctcagtactttttctttctggatttcatctctagaaatttgaagtgtttgagacagagtccaccctttgtgcaaggcgagaaccaatgaatggactccttgtgtgaattattgcatcttcttccaaagcaggttcatcaagactttcacagagattcatttttgttgagaagtaagggttaataggaggatagaatttggatccaaatctagtgataaaagtgtccaagcaatcaaaaagtaagatattttagggacataccaacatcttccctttctgctaatttcatgctccaaagatatggcaaaaaaaaaaatcataaaaagtgcttttgccctacttgtgttctagttttcccatggcagaattttgtaattacatccagaatatagtgtatattttgttcctcaaactttattacattggatggatattgttgaactggggcactggtgcctatattcaaggctctttcctatcaacgtgtctgtccacgatttgttgtgtttaaagcttcattttgaaaaatcactgtccccctgtggggtagtgactgtattgttttgttcatgtctatgtgggacacattgcatcacatggcaaaccaactctctgtggatgtgagataagtacttataaaaccagcttgaaaacatcgtcttatgtattatgtcatcctgcatcataatgcaattatgtgtatcataacatgctcatttaaaaaaagagaaaccagcaaattcatgtttgtccatagaagaatgtactcagaactttgtgttgtgaaacgatgagaacagaccacctttaagatacccacctgccacttaaaatgacttagttataattagtagtagtctagacgttgttcttggtgtgtgggggtcaattctaacgtcatgttcttttgaataaatctctcagtcatatttgaaaaaaaaatacatgggaataaagaaaaatatcatctttggccaaatcaagcaggcatcttttttcttttccttgacgtttagctcattatacgtggtgattggatcacgagatctgtccgtgtgaaaatacagaaacatcctttagtttacaaaacagttattctaggcttgaagcctctgaacagcaaattgaatagatgggctgcatctgatttgctttatggatgtaattttacaaaacactcttgggtctctgaccccagggagttaagagtgcccagaggaggtcctacacattaaaggataaagccccccagtgatgctggcaagcaaatgtgttgagttcttaaatcttcatttggttttctgttcaggattttaattgcaaatgaatttatttctccagtttatctaaagacctaatttcccaatagtttcctctgcatttatatactctgtagtgtttaggcaaccctgttataagtttattaatattatgtaagtgttgttcttgtatttatgtatagtgtatgtattgtaaatatactcagagcttttttccttttactgtaaaatggtgatttttttgccctatgataatgtaaagggagaccctcctaatgagattctctcagaggatgattattccagtctattctcagagatttaaatgaacaagtgttattgtttttaatggtgtctcagacatattctgttggtgcattgcttttctgtattcaactttcctatgaattgagctgtgaactgaaatagagtttaaacctttaactgtatgcatttgtataattatctgaatgaaggcatgaaggttaaataaagcattttgtatggaacaaaactccctaactgactcagacactttggaaatcatagttattaaccattctaattaaacctttgttatgaaaagttttac

SEQ ID NO: 420609 - DNA, 2818 bp, Homo sapiens
  misc_feature (905)..(905): n is a, c, g, or t
catgcatgagtagtcatcatatttttcaagtgaaatatcgggacatgatataacacatgacttaacaatggtactgaatatttgaaatcaggcctttcccggaaaatcatgcatgaaggatcattataaacaaacaatagcaaccagttgtctccccgaacttgtcacttttctcataaatgtctggcctggagctccaaaatcatccaaatacttagtagcattttagcctgagtacactttctcagttcctcaactctttgtatacctttccaccaatatagacattctagaatctgcttcagatgcatttgaaattttcacccccatggaactagtgattaatatcagagcccactcttgcagttggtaatggggtggcaatcaaacgttcagatgatgataaaggagagataatggataattctttttcagagttctcacttaacagctctgttgtggaatgttttaaatagtcttataaataatttgtttatagtattgttgttagtttaattgaattttatgtaagaagctgtccaacatcagagaaatgaaattcctcccactttctgtgtagaacaaggtctctgacagtattgattcatggaagtactaatggacttagaaaacattaagagaatgtcatttctcatagtgtttctgtttctgaaaatgaatctcctgaattattatctttctccctgttacttggctggggaaagagatagaagctgtataaacaaattctcttccatgctcaaagcaagtgttccatgtgcacaacctgctgcagactggggcccttctcagttaattgggtttcacaagcaataatttctccacaacaaaaaccacaacttgaagtgagaaagggggtttcttgggaaaaaaaaaaggcaagnatcccaacaattgaaaagagatcaatagtggaaacagtcgcctcagtactttttctttctggatttcatctctagaaatttgaagtgtttgagacagagtccaccctttgtgcaaggcgagaaccaatgaatggactccttgtgtgaattattgcatcttcttccaaagcaggttcatcaagactttcacagagattcatttttgttgagaagtaagggttaataggaggatagaatttggatccaaatctagtgataaaagtgtccaagcaatcaaaaagtaagatattttagggacataccaacatcttccctttctgctaatttcatgctccaaagatatggcaaaaaaaaaaatcataaaaagtgcttttgccctacttgtgttctagttttcccatggcagaattttgtaattacatccagaatatagtgtatattttgttcctcaaactttattacattggatggatattgttgaactggggcactggtgcctatattcaaggctctttcctatcaacgtgtctgtccacgatttgttgtgtttaaagcttcattttgaaaaatcactgtccccctgtggggtagtgactgtattgttttgttcatgtctatgtgggacacattgcatcacatggcaaaccaactctctgtggatgtgagataagtacttataaaaccagcttgaaaacatcgtcttatgtattatgtcatcctgcatcataatgcaattatgtgtatcataacatgctcatttaaaaaaagagaaaccagcaaattcatgtttgtccatagaagaatgtactcagaactttgtgttgtgaaacgatgagaacagaccacctttaagatacccacctgccacttaaaatgacttagttataattagtagtagtctagacgttgttcttggtgtgtgggggtcaattctaacgtcatgttcttttgaataaatctctcagtcatatttgaaaaaaaaatacatgggaataaagaaaaatatcatctttggccaaatcaagcaggcatcttttttcttttccttgacgtttagctcattatacgtggtgattggatcacgagatctgtccgtgtgaaaatacagaaacatcctttagtttacaaaacagttattctaggcttgaagcctctgaacagcaaattgaatagatgggctgcatctgatttgctttatggatgtaattttacaaaacactcttgggtctctgaccccagggagttaagagtgcccagaggaggtcctacacattaaaggataaagccccccagtgatgctggcaagcaaatgtgttgagttcttaaatcttcatttggttttctgttcaggattttaattgcaaatgaatttatttctccagtttatctaaagacctaatttcccaatagtttcctctgcatttatatactctgtagtgtttaggcaaccctgttataagtttattaatattatgtaagtgttgttcttgtatttatgtatagtgtatgtattgtaaatatactcagagcttttttccttttactgtaaaatggtgatttttttgccctatgataatgtaaagggagaccctcctaatgagattctctcagaggatgattattccagtctattctcagagatttaaatgaacaagtgttattgtttttaatggtgtctcagacatattctgttggtgcattgcttttctgtattcaactttcctatgaattgagctgtgaactgaaatagagtttaaacctttaactgtatgcatttgtataattatctgaatgaaggcatgaaggttaaataaagcattttgtatggaacaaaactccctaactgactcagacactttggaaatcatagttattaaccattctaattaaacctttgttatgaaaagttttac

SEQ ID NO: 420610 - DNA, 2717 bp, Homo sapiens
catgcatgagtagtcatcatatttttcaagtgaaatatcgggacatgatataacacatgacttaacaatggtactgaatatttgaaatcaggcctttcccggaaaatcatgcatgaaggatcattataaacaaacaatagcaaccagttgtctccccgaacttgtcacttttctcataaatgtctggcctggagctccaaaatcatccaaatacttagtagcattttagcctgagtacactttctcagttcctcaactctttgtatacctttccaccaatatagacattctagaatctgcttcagatgcatttgaaattttcacccccatggaactagtgattaatatcagagcccactcttgcagttggtaatggggtggcaatcaaacgttcagatgatgataaaggagagataatggataattctttttcagagttctcacttaacagctctgttgtggaatgttttaaatagtcttataaataatttgtttatagtattgttgttagtttaattgaattttatgtaagaagctgtccaacatcagagaaatgaaattcctcccactttctgtgtagaacaaggtctctgacagtattgattcatggaagtactaatggacttagaaaacattaagagaatgtcatttctcatagtgtttctgtttctgaaaatgaatctcctgaattattatctttctccctgttacttggctggggaaagagatagaagctgtataaacaaattctcttccatgctcaaagcaagtgttccatgtgcacaacctgctgcagactggggcccttctcagttaattgggtttcacaagcaataatttctccacaacaaaaaccacaacttgaagtgagttgaaaagagatcaatagtggaaacagtcgcctcagtactttttctttctggatttcatctctagaaatttgaagtgtttgagacagagtccaccctttgtgcaaggcgagaaccaatgaatggactccttgtgtgaattattgcatcttcttccaaagcaggttcatcaagactttcacagagattcatttttgttgagaagtaagggttaataggaggatagaatttggatccaaatctagtgataaaagtgtccaagcaatcaaaaagtaagatattttagggacataccaacatcttccctttctgctaatttcatgctccaaagatatggcaaaaattttgtaattacatccagaatatagtgtatattttgttcctcaaactttattacattggatggatattgttgaactggggcactggtgcctatattcaaggctctttcctatcaacgtgtctgtccacgatttgttgtgtttaaagcttcattttgaaaaatcactgtccccctgtggggtagtgactgtattgttttgttcatgtctatgtgggacacattgcatcacatggcaaaccaactctctgtggatgtgagataagtacttataaaaccagcttgaaaacatcgtcttatgtattatgtcatcctgcatcataatgcaattatgtgtatcataacatgctcatttaaaaaaagagaaaccagcaaattcatgtttgtccatagaagaatgtactcagaactttgtgttgtgaaacgatgagaacagaccacctttaagatacccacctgccacttaaaatgacttagttataattagtagtagtctagacgttgttcttggtgtgtgggggtcaattctaacgtcatgttcttttgaataaatctctcagtcatatttgaaaaaaaaatacatgggaataaagaaaaatatcatctttggccaaatcaagcaggcatcttttttcttttccttgacgtttagctcattatacgtggtgattggatcacgagatctgtccgtgtgaaaatacagaaacatcctttagtttacaaaacagttattctaggcttgaagcctctgaacagcaaattgaatagatgggctgcatctgatttgctttatggatgtaattttacaaaacactcttgggtctctgaccccagggagttaagagtgcccagaggaggtcctacacattaaaggataaagccccccagtgatgctggcaagcaaatgtgttgagttcttaaatcttcatttggttttctgttcaggattttaattgcaaatgaatttatttctccagtttatctaaagacctaatttcccaatagtttcctctgcatttatatactctgtagtgtttaggcaaccctgttataagtttattaatattatgtaagtgttgttcttgtatttatgtatagtgtatgtattgtaaatatactcagagcttttttccttttactgtaaaatggtgatttttttgccctatgataatgtaaagggagaccctcctaatgagattctctcagaggatgattattccagtctattctcagagatttaaatgaacaagtgttattgtttttaatggtgtctcagacatattctgttggtgcattgcttttctgtattcaactttcctatgaattgagctgtgaactgaaatagagtttaaacctttaactgtatgcatttgtataattatctgaatgaaggcatgaaggttaaataaagcattttgtatggaacaaaactccctaactgactcagacactttggaaatcatagttattaaccattctaattaaacctttgttatgaaaagttttac

SEQ ID NO: 420611 - DNA, 1615 bp, Homo sapiens
  misc_feature (41)..(42): n is a, c, g, or t
ccatatctttggagcatgaaattagcagaaagggaagatgnnggtatgtccctaaaaaatcataaaaagtgcttttgccctacttgtgttctagttttcccatggcagaattttgtaattacatccagaatatagtgtatattttgttcctcaaactttattacattggatggatattgttgaactggggcactggtgcctatattcaaggctctttcctatcaacgtgtctgtccacgatttgttgtgtttaaagcttcattttgaaaaatcactgtccccctgtggggtagtgactgtattgttttgttcatgtctatgtgggacacattgcatcacatggcaaaccaactctctgtggatgtgagataagtacttataaaaccagcttgaaaacatcgtcttatgtattatgtcatcctgcatcataatgcaattatgtgtatcataacatgctcatttaaaaaaagagaaaccagcaaattcatgtttgtccatagaagaatgtactcagaactttgtgttgtgaaacgatgagaacagaccacctttaagatacccacctgccacttaaaatgacttagttataattagtagtagtctagacgttgttcttggtgtgtgggggtcaattctaacgtcatgttcttttgaataaatctctcagtcatatttgaaaaaaaaatacatgggaataaagaaaaatatcatctttggccaaatcaagcaggcatcttttttcttttccttgacgtttagctcattatacgtggtgattggatcacgagatctgtccgtgtgaaaatacagaaacatcctttagtttacaaaacagttattctaggcttgaagcctctgaacagcaaattgaatagatgggctgcatctgatttgctttatggatgtaattttacaaaacactcttgggtctctgaccccagggagttaagagtgcccagaggaggtcctacacattaaaggataaagccccccagtgatgctggcaagcaaatgtgttgagttcttaaatcttcatttggttttctgttcaggattttaattgcaaatgaatttatttctccagtttatctaaagacctaatttcccaatagtttcctctgcatttatatactctgtagtgtttaggcaaccctgttataagtttattaatattatgtaagtgttgttcttgtatttatgtatagtgtatgtattgtaaatatactcagagcttttttccttttactgtaaaatggtgatttttttgccctatgataatgtaaagggagaccctcctaatgagattctctcagaggatgattattccagtctattctcagagatttaaatgaacaagtgttattgtttttaatggtgtctcagacatattctgttggtgcattgcttttctgtattcaactttcctatgaattgagctgtgaactgaaatagagtttaaacctttaactgtatgcatttgtataattatctgaatgaaggcatgaaggttaaataaagcattttgtatggaacaaaactccctaactgactcagacactttggaaatcatagttattaaccattctaattaaacctttgttatgaaaagttttac

SEQ ID NO: 420612 - DNA, 695 bp, Homo sapiens
aacgtccgcgggcgcggggtgtgtcgggtgtcgacggcggcgctttgcggccggtcgtgcgggtcgggcgcgggcgggcgcggcggcagtggcgcgcacaggtgattgactggccagctgcctgaaggagcgccaggtcctccttgctggcaggtggcgaagcccattggggcggcggtgcagaccgcggcggcggctgcggcggtctggctcgggaggcgttcctggggccaaggccatggccccgcggctgcagctggagaaggcggcctggcgctgggcggagacggtgcggcccgaggaggtgtcgcaggagcacatcgagaccgcttaccgcatctggctggagccctgcattcgcggcgtgtgcagacgaaactgcaaaggaaatccgaattgcttggttggtattggtgagcatatttggttaggagaaatagatgaaaatagttttcataacatcgatgatcccaactgtgagaggagaaaaaaggtaaaccatcattttttaagcgattgctatatgctgttttttgtttttgtttttgcttttgttttgggcctgtgatcagaaaactctactgatttcaggtaacctgtgcagctttaagataagcagtagaacttaagactctaagccacttgaattggaacacttcttaatgatatgctttaaaacaggcagctgcgtaatt

SEQ ID NO: 420613 - DNA, 2414 bp, Homo sapiens
aacgtccgcgggcgcggggtgtgtcgggtgtcgacggcggcgctttgcggccggtcgtgcgggtcgggcgcgggcgggcgcggcggcagtggcgcgcacaggtgattgactggccagctgcctgaaggagcgccaggtcctccttgctggcaggtggcgaagcccattggggcggcggtgcagaccgcggcggcggctgcggcggtctggctcgggaggcgttcctggggccaaggccatggccccgcggctgcagctggagaaggcggcctggcgctgggcggagacggtgcggcccgaggaggtgtcgcaggagcacatcgagaccgcttaccgcatctggctggagccctgcattcgcggcgtgtgcagacgaaactgcaaaggaaatccgaattgcttggttggtattggtgagcatatttggttaggagaaatagatgaaaatagttttcataacatcgatgatcccaactgtgagaggagaaaaaagaactcatttgtgggcctgactaaccttggagccacttgttatgtcaacacatttcttcaagtgtggtttctcaacttggagcttcggcaggcactctacttatgtccaagcacttgtagtgactacatgctgggagacggcatccaagaagaaaaagattatgagcctcaaacaatttgtgagcatctccagtacttgtttgccttgttgcaaaacagtaataggcgatacattgatccatcaggatttgttaaagccttgggcctggacactggacaacagcaggatgctcaagaattttcaaagctctttatgtctctattggaagatactttgtctaaacaaaagaatccagatgtgcgcaatattgttcaacagcagttctgtggagaatatgcctatgtaactgtttgcaaccagtgtggcagagagtctaagcttttgtcaaaattttatgagctggagttaaatatccaaggccacaaacagttaacagattgtatctcggaatttttgaaggaagaaaaattagaaggagacaatcgctatttttgcgagaactgtcaaagcaaacagaatgcaacaagaaagattcgacttcttagccttccttgcactctgaacttgcagctaatgcgttttgtctttgacaggcaaactggacataagaaaaagctgaatacctacattggcttctcagaaattttggatatggagccttatgtggaacataaaggtgggtcctacgtgtatgaactcagcgcagtcctcatacacagaggagtgagtgcttattctggccactacatcgcccacgtgaaagatccacagtctggtgaatggtataagtttaatgatgaagacatagaaaagatggaggggaagaaattacaactagggattgaggaagatctagcagaaccttctaagtctcagacacgtaaacccaagtgtggcaaaggaactcattgctctcgaaatgcatatatgttggtttatagactgcaaactcaagaaaagcccaacactactgttcaagttccagcctttcttcaagagctggtagatcgggataattccaaatttgaggagtggtgtattgaaatggctgagatgcgtaagcaaagtgtggataaaggaaaagcaaaacacgaagaggttaaggagctgtaccaaaggttacctgctggagctggtctgtaagatattctgggacagcactgttgccattaagtgccttgtttttttatgttcacaaatgtatatgaagaaactttctcaaacttactctttctaataacccactaaagccagcttaaacactctaaaagtactttgtaaaccaacaataacttgatgtgtagcattccatattatttcattacgttgtactcctaaaaatgggaagctgttaataaattataacatttaggtcagcactctgcatccatgagtattgtagatatttatattttgtgagatattaacttgtttaagaaaaatccgattggattactatggaaaaagcaacttgcctgttctgtttctttgcatactttgtgacctaacagttttaacagacattctattatatgaatacagtttttttgatactattagattaacttgaagtttaataccaaatattatgctaagagtagaaaagctttctgctgacccctgatttcttagaaatatcccacataatccagcttatcccttttctgtatatgtttattcaggtttacctgatgtctcaaaatgaaaccaaattaagcctttttaaaggctgatgtgccatttgtattaagttatctttgtcattttaaagacatgaattccccaagcctaattcctacttaaggaagagagacaatttagtccttactttagaaaataaatacttaagcataaaaaaact

SEQ ID NO: 420614 - DNA, 1205 bp, Homo sapiens
cttttaagaatgtccagattatattaaataccatagaggttttatatccaccagcatccttttcaaggataactgaacagcagaaccttctaagtctcagacacgtaaacccaagtgtggcaaaggaactcattgctctcgaaatgcatatatgttggtttatagactgcaaactcaagaaaagcccaacactactgttcaagttccagcctttcttcaagagctggtagatcgggataattccaaatttgaggagtggtgtattgaaatggctgagatgcgtaagcaaagtgtggataaaggaaaagcaaaacacgaagaggttaaggagctgtaccaaaggttacctgctggagctgagccctatgagtttgtctctctggaatggctgcaaaagtggttggatgaatcaacacctaccaaacctattgataatcacgcttgcctgtgttcccatgacaagcttcacccggataaaatatcaattatgaagaggatatctgaatatgcagctgacattttctatagtagatatggaggaggtccaagactaactgtgaaagccctgtgtaaggaatgtgtagtagaacgttgtcgcatattgcgtctgaagaaccaactaaatgaagattataaaactgttaataatctgctgaaagcagcagtaaagggcagcgatggattttgggtggggaagtcctccttgcggagttggcgccagctagctcttgaacagctggatgagcaagatggtgatgcagaacaaagcaacggaaagatgaacggtagcaccttaaataaagatgaatcaaaggaagaaagaaaagaagaggaggaattaaattttaatgaagatattctgtgtccacatggtgagttatgcatatctgaaaatgaaagaaggcttgtttctaaagaggcttggagcaaactgcagcagtactttccaaaggctcctgagtttccaagttacaaagagtgctgttcacagtgcaagattttagaaagagaaggggaataaagttctgttatatttccttgctcgagtttcataccagatgcgttggtccataaaggattgtatcaagtagatgggacaacattctgctctgaacgaaaagtaattttagagacataacctgcttaccaatgcctgtctttgattcatattctactttcaataaagcatgaaagtgaagaacttg

SEQ ID NO: 420615 - DNA, 2483 bp, Homo sapiens
aacgtccgcgggcgcggggtgtgtcgggtgtcgacggcggcgctttgcggccggtcgtgcgggtcgggcgcgggcgggcgcggcggcagtggcgcgcacaggtgattgactggccagctgcctgaaggagcgccaggtcctccttgctggcaggtggcgaagcccattggggcggcggtgcagaccgcggcggcggctgcggcggtctggctcgggaggcgttcctggggccaaggccatggccccgcggctgcagctggagaaggcggcctggcgctgggcggagacggtgcggcccgaggaggtgtcgcaggagcacatcgagaccgcttaccgcatctggctggagccctgcattcgcggcgtgtgcagacgaaactgcaaaggaaatccgaattgcttggttggtattggtgagcatatttggttaggagaaatagatgaaaatagttttcataacatcgatgatcccaactgtgagaggagaaaaaagaactcatttgtgggcctgactaaccttggagccacttgttatgtcaacacatttcttcaagtgtggtttctcaacttggagcttcggcaggcactctacttatgtccaagcacttgtagtgactacatgctgggagacggcatccaagaagaaaaagattatgagcctcaaacaatttgtgagcatctccagtacttgtttgccttgttgcaaaacagtaataggcgatacattgatccatcaggatttgttaaagccttgggcctggacactggacaacagcaggatgctcaagaattttcaaagctctttatgtctctattggaagatactttgtctaaacaaaagaatccagatgtgcgcaatattgttcaacagcagttctgtggagaatatgcctatgtaactgtttgcaaccagtgtggcagagagtctaagcttttgtcaaaattttatgagctggagttaaatatccaaggccacaaacagttaacagattgtatctcggaatttttgaaggaagaaaaattagaaggagacaatcgctatttttgcgagaactgtcaaagcaaacagaatgcaacaagaaagattcgacttcttagccttccttgcactctgaacttgcagctaatgcgttttgtctttgacaggcaaactggacataagaaaaagctgaatacctacattggcttctcagaaattttggatatggagccttatgtggaacataaaggtgggtcctacgtgtatgaactcagcgcagtcctcatacacagaggagtgagtgcttattctggccactacatcgcccacgtgaaagatccacagtctggtgaatggtataagtttaatgatgaagacatagaaaagatggaggggaagaaattacaactagggattgaggaagatctagcagaaccttctaagtctcagacacgtaaacccaagtgtggcaaaggaactcattgctctcgaaatgcatatatgttggtttatagactgcaaactcaagaaaagcccaacactactgttcaagttccagcctttcttcaagagctggtagatcgggataattccaaatttgaggagtggtgtattgaaatggctgagatgcgtaagcaaagtgtggataaaggaaaagcaaaacacgaagaggttaaggagctgtaccaaaggttacctgctggagctgagccctatgagtttgtctctctggaatggctgcaaaagtggttggatgaatcaacacctaccaaacaaatatcaattatgaagaggatatctgaatatgcagctgacattttctatagtagatatggaggaggtccaagactaactgtgaaagccctgtgtaaggaatgtgtagtagaacgttgtcgcatattgcgtctgaagaaccaactaaatgaagattataaaactgttaataatctgctgaaagcagcagtaaagggcagcgatggattttgggtggggaagtcctccttgcggagttggcgccagctagctcttgaacagctggatgagcaagatggtgatgcagaacaaagcaacggaaagatgaacggtagcaccttaaataaagatgaatcaaaggaagaaagaaaagaagaggaggaattaaattttaatgaagatattctgtgtccacatggtgagttatgcatatctgaaaatgaaagaaggcttgtttctaaagaggcttggagcaaactgcagcagtactttccaaaggctcctgagtttccaagttacaaagagtgctgttcacagtgcaagattttagaaagagaaggggaataaagttctgttatatttccttgctcgagtttcataccagatgcgttggtccataaaggattgtatcaagtagatgggacaacattctgctctgaacgaaaagtaattttagagacataacctgcttaccaatgcctgtctttgattcatattctactttcaataaagcatgaaagtgaagaacttg

SEQ ID NO: 420616 - DNA, 2104 bp, Homo sapiens
aacgtccgcgggcgcggggtgtgtcgggtgtcgacggcggcgctttgcggccggtcgtgcgggtcgggcgcgggcgggcgcggcggcagtggcgcgcacaggtgattgactggccagctgcctgaaggagcgccaggtcctccttgctggcaggtggcgaagcccattggggcggcggtgcagaccgcggcggcggctgcggcggtctggctcgggaggcgttcctggggccaaggccatggccccgcggctgcagctggagaaggcggcctggcgctgggcggagacggtgcggcccgaggaggtgtcgcaggagcacatcgagaccgcttaccgcatctggctggagccctgcattcgcggcgtgtgcagacgaaactgcaaaggaaatccgaattgcttggttggtattggtgagcatatttggttaggagaaatagatgaaaatagttttcataacatcgatgatcccaactgtgagaggagaaaaaagaactcatttgtgggcctgactaaccttggagccacttgttatgtcaacacatttcttcaagtgtggtttctcaacttggagcttcggcaggcactctacttatgtccaagcacttgtagtgactacatgctgggagacggcatccaagaagaaaaagattatgagcctcaaacaatttgtgagcatctccagtacttgtttgccttgttgcaaaacagtaataggcgatacattgatccatcaggatttgttaaagccttgggcctggacactggacaacagcaggatgctcaagaattttcaaagctctttatgtctctattggaagatactttgtctaaacaaaagaatccagatgtgcgcaatattgttcaacagcagttctgtggagaatatgcctatgtaactgtttgcaaccagtgtggcagagagtctaagcttttgtcaaaattttatgagctggagttaaatatccaaggccacaaacagttaacagattgtatctcggaatttttgaaggaagaaaaattagaaggagacaatcgctatttttgcgagaactgtcaaagcaaacagaatgcaacaagaaagattcgacttcttagccttccttgcactctgaacttgcagctaatgcgttttgtctttgacaggcaaactggacataagaaaaagctgaatacctacattggcttctcagaaattttggatatggagccttatgtggaacataaaggtgggtcctacgtgtatgaactcagcgcagtcctcatacacagaggagtgagtgcttattctggccactacatcgcccacgtgaaagatccacagtctggtgaatggtataagttaatattaaacacaaactaccacctacctccctcaccaaagcccataaaaataaaaaattataacaaaccctgagaaccaaaatgaacggaaatctgttcgcttcattcattgcccccacaatcctaggcctacccgccgcagtactgatcattctatttccccctctattgatccccacctccaaatatctcatcaacaaccgactaatcaccacccaacaatgactaatcaaactaacctcaaaacaaatgataaccatacacaacactaaaggacgaacctgatctcttatactagtatccttaatcatttttattgccacaactaacctcctcggactcctgcctcactcatttacaccaaccacccaactatctataaacctagccatggccatccccttatgagcgggcgcagtgattataggctttcgctctaagattaaaaatgccctagcccacttcttaccacaaggcacacctacaccccttatccccatactagttattatcgaaaccatcagcctactcattcaaccaatagccctggccgtacgcctaaccgctaacattactgcaggccacctactcatgcacctaattggaagcgccaccctagcaatatcaaccattaaccttccctctacacttatcatcttcacaattctaattctactgactatcctagaaatcgctgtcgccttaatccaagcctacgttttcacacttctagtaagcctctacctgcacgacaacacat

SEQ ID NO: 420617 - DNA, 2534 bp, Homo sapiens
aacgtccgcgggcgcggggtgtgtcgggtgtcgacggcggcgctttgcggccggtcgtgcgggtcgggcgcgggcgggcgcggcggcagtggcgcgcacaggtgattgactggccagctgcctgaaggagcgccaggtcctccttgctggcaggtggcgaagcccattggggcggcggtgcagaccgcggcggcggctgcggcggtctggctcgggaggcgttcctggggccaaggccatggccccgcggctgcagctggagaaggcggcctggcgctgggcggagacggtgcggcccgaggaggtgtcgcaggagcacatcgagaccgcttaccgcatctggctggagccctgcattcgcggcgtgtgcagacgaaactgcaaaggaaatccgaattgcttggttggtattggtgagcatatttggttaggagaaatagatgaaaatagttttcataacatcgatgatcccaactgtgagaggagaaaaaagaactcatttgtgggcctgactaaccttggagccacttgttatgtcaacacatttcttcaagtgtggtttctcaacttggagcttcggcaggcactctacttatgtccaagcacttgtagtgactacatgctgggagacggcatccaagaagaaaaagattatgagcctcaaacaatttgtgagcatctccagtacttgtttgccttgttgcaaaacagtaataggcgatacattgatccatcaggatttgttaaagccttgggcctggacactggacaacagcaggatgctcaagaattttcaaagctctttatgtctctattggaagatactttgtctaaacaaaagaatccagatgtgcgcaatattgttcaacagcagttctgtggagaatatgcctatgtaactgtttgcaaccagtgtggcagagagtctaagcttttgtcaaaattttatgagctggagttaaatatccaaggccacaaacagttaacagattgtatctcggaatttttgaaggaagaaaaattagaaggagacaatcgctatttttgcgagaactgtcaaagcaaacagaatgcaacaagaaagattcgacttcttagccttccttgcactctgaacttgcagctaatgcgttttgtctttgacaggcaaactggacataagaaaaagctgaatacctacattggcttctcagaaattttggatatggagccttatgtggaacataaaggtgggtcctacgtgtatgaactcagcgcagtcctcatacacagaggagtgagtgcttattctggccactacatcgcccacgtgaaagatccacagtctggtgaatggtataagtttaatgatgaagacatagaaaagatggaggggaagaaattacaactagggattgaggaagatctagcagaaccttctaagtctcagacacgtaaacccaagtgtggcaaaggaactcattgctctcgaaatgcatatatgttggtttatagactgcaaactcaagaaaagcccaacactactgttcaagttccagcctttcttcaagagctggtagatcgggataattccaaatttgaggagtggtgtattgaaatggctgagatgcgtaagcaaagtgtggataaaggaaaagcaaaacacgaagaggttaaggagctgtaccaaaggttacctgctggagctgagccctatgagtttgtctctctggaatggctgcaaaagtggttggatgaatcaacacctaccaaacctattgataatcacgcttgcctgtgttcccatgacaagcttcacccggataaaatatcaattatgaagaggatatctgaatatgcagctgacattttctatagtagatatggaggaggtccaagactaactgtgaaagccctgtgtaaggaatgtgtagtagaacgttgtcgcatattgcgtctgaagaaccaactaaatgaagattataaaactgttaataatctgctgaaagcagcagtaaagggcagcgatggattttgggtggggaagtcctccttgcggagttggcgccagctagctcttgaacagctggatgagcaagatggtgatgcagaacaaagcaacggaaagatgaacggtagcaccttaaataaagatgaatcaaaggaagaaagaaaagaagaggaggaattaaattttaatgaagatattctgtgtccacatggtgagttatgcatatctgaaaatgaaagaaggcttgtttctaaagaggcttggagcaaactgcagcagtactttccaaaggctcctgagtttccaagttacaaagagtgctgttcacagtgcaagattttagaaagagaaggggaataaagttctgttatatttccttgctcgagtttcataccagatgcgttggtccataaaggattgtatcaagtagatgggacaacattctgctctgaacgaaaagtaattttagagacataacctgcttaccaatgcctgtctttgattcatattctactttcaataaagcatgaaagtgaagaacttg

SEQ ID NO: 420618 - DNA, 2417 bp, Homo sapiens
aacgtccgcgggcgcggggtgtgtcgggtgtcgacggcggcgctttgcggccggtcgtgcgggtcgggcgcgggcgggcgcggcggcagtggcgcgcacaggtgattgactggccagctgcctgaaggagcgccaggtcctccttgctggcaggtggcgaagcccattggggcggcggtgcagaccgcggcggcggctgcggcggtctggctcgggaggcgttcctggggccaaggccatggccccgcggctgcagctggagaaggcggcctggcgctgggcggagacggtgcggcccgaggaggtgtcgcaggagcacatcgagaccgcttaccgcatctggctggagccctgcattcgcggcgtgtgcagacgaaactgcaaaggaaatccgaattgcttggttggtattggtgagcatatttggttaggagaaatagatgaaaatagttttcataacatcgatgatcccaactgtgagaggagaaaaaagaactcatttgtgggcctgactaaccttggagccacttgttatgtcaacacatttcttcaagtgtggtttctcaacttggagcttcggcaggcactctacttatgtccaagcacttgtagtgactacatgctgggagacggcatccaagaagaaaaagattatgagcctcaaacaatttgtgagcatctccagtacttgtttgccttgttgcaaaacagtaataggcgatacattgatccatcaggatttgttaaagccttgggcctggacactggacaacagcaggatgctcaagaattttcaaagctctttatgtctctattggaagatactttgtctaaacaaaagaatccagatgtgcgcaatattgttcaacagcagttctgtggagaatatgcctatgtaactgtttgcaaccagtgtggcagagagtctaagcttttgtcaaaattttatgagctggagttaaatatccaaggccacaaacagttaacagattgtatctcggaatttttgaaggaagaaaaattagaaggagacaatcgctatttttgcgagaactgtcaaagcaaacagaatgcaacaagaaagattcgacttcttagccttccttgcactctgaacttgcagctaatgcgttttgtctttgacaggcaaactggacataagaaaaagctgaatacctacattggcttctcagaaattttggatatggagccttatgtggaacataaaggtgggtcctacgtgtatgaactcagcgcagtcctcatacacagaggagtgagtgcttattctggccactacatcgcccacgtgaaagatccacagtctggtgaatggtataagtttaatgatgaagacatagaaaagatggaggggaagaaattacaactagggattgaggaagatctagcagaaccttctaagtctcagacacgtaaacccaagtgtggcaaaggaactcattgctctcgaaatgcatatatgttggtttatagactgcaaactcaagaaaagcccaacactactgttcaagttccagcctttcttcaagagctggtagatcgggataattccaaatttgaggagtggtgtattgaaatggctgagatgcgtaagcaaagtgtggataaaggaaaagcaaaacacgaagaggttaaggagctgtaccaaaggttacctgctggagctggtctgtaagatattctgggacagcactgttgccattaagtgccttgtttttttatgttcacaaatgtatatgaagaaactttctcaaacttactctttctaataacccactaaagccagcttaaacactctaaaagtactttgtaaaccaacaataacttgatgtgtagcattccatattatttcattacgttgtactcctaaaaatgggaagctgttaataaattataacatttaggtcagcactctgcatccatgagtattgtagatatttatattttgtgagatattaacttgtttaagaaaaatccgattggattactatggaaaaagcaacttgcctgttctgtttctttgcatactttgtgacctaacagttttaacagacattctattatatgaatacagtttttttgatactattagattaacttgaagtttaataccaaatattatgctaagagtagaaaagctttctgctgacccctgatttcttagaaatatcccacataatccagcttatcccttttctgtatatgtttattcaggtttacctgatgtctcaaaatgaaaccaaattaagcctttttaaaggctgatgtgccatttgtattaagttatctttgtcattttaaagacatgaattccccaagcctaattcctacttaagtatttattttctaaagtaaggactaaattgtctctcttccttaagtaggagtcgacgcgg

SEQ ID NO: 420619 - DNA, 741 bp, Homo sapiens
ccacgcgtccgcaagcttcacccggataaaatgtcagctgcatattcagatatcctcttcataattgatatggaggaggtccaagactaactgtgaaagccctgtgtaaggaatgtgtagtagaacgttgtcgcatattgcgtctgaagaaccaactaaatgaagattataaaactgttaataatctgctgaaagcagcagtaaagggcagcgatggattttgggtggggaagtcctccttgcggagttggcgccagctagctcttgaacagctggatgagcaagatggtgatgcagaacaaagcaacggaaagatgaacggtagcaccttaaataaagatgaatcaaaggaagaaagaaaagaagaggaggaattaaattttaatgaagatattctgtgtccacatggtgagttatgcatatctgaaaatgaaagaaggcttgtttctaaagaggcttggagcaaactgcagcagtactttccaaaggctcctgagtttccaagttacaaagagtgctgttcacagtgcaagattttagaaagagaaggggaataaagttctgttatatttccttgctcgagtttcataccagatgcgttggtccataaaggattgtatcaagtagatgggacaacattctgctctgaacgaaaagtaattttagagacataacctgcttaccaatgcctgtctttgattcatattctactttcaataaagcatgaaagtgaagaacttg

SEQ ID NO: 420620 - DNA, 441 bp, Homo sapiens
gtcatggtttagagaggataagtagcttgtcaaagttacagggctagtgagtgacatttgaacccaggtatgcctaattccaaagcctaaccattttctacaacactgaaaatataatggatttttcccaaagtacaaaaacacccactgccctcagaccaccatgagccaataggaaatacacaatgctcaagaataacatactctttcccccaacgatgcaacatttggtggtaccagtgtacgtctcttaaacacacagtgagaaatcctcactctactcacactctggtcattattaccctaaactcattgccttggagtctcaatcagcaactataatggctttttagatggaaatttaagtcatttagcaacacacagaaaagtgttggggagaagtccaaaaacatttcaaacttggcccatggccctttctaa

SEQ ID NO: 420621 - DNA, 2386 bp, Homo sapiens
ccgctcagggttccgtcgcttaaaaagtggcaaaatgccgtttgtaagtaaccggacgcaccacttggacttctgagtagaggaaaaacgcattgagactcagctgtccgagcggaaggagcgggagcccaactggaaactcctctcgccattcattgcccctaggcttccgctttgcttccttcagcgtccacccagttcctcctcccgccaatgagagctgaggaagttgaagcccccgcccgacgtgcgtcaggcgctttagtggtacgcacgagaacgcctgcgcaaacgcgcgcgggaggcgggcctggccaacttctgaacaggaagcagttcgctcgcgcctaggttggcgcgggctgggaggtgttccagccctttaagatgttgcgcgtggtgagctggaacatcaatgggattcggagacccctgcaaggggtggcaaatcaggaacccagcaactgtgccgccgtggccgtggggcgcattttggacgagctggatgcggatatcgtctgtctccaggaaaccaaagtgaccagggatgcactgacagagcccctggctatcgttgagggttataactcctatttcagcttcagccgcaaccgtagcggctattctggtgtagccaccttctgtaaggacaatgctaccccagtggctgctgaagaaggcctgagtggcctgtttgccacccagaatggggatgttggttgctatggaaacatggatgagtttacccaagaggaactccgggctctggatagtgagggcagggccctcctcacacagcataagatccgcacatgggaaggtaaggagaagaccttgaccctaatcaacgtgtactgcccccatgcggaccctgggaggcctgagcggctagtctttaagatgcgcttctatcgtttgctgcaaatccgagcagaagccctcctggcggcaggcagccatgtgatcattctgggtgacctgaatacagcccaccgccccattgaccactgggatgcagtcaacctggaatgctttgaagaggacccagggcgcaagtggatggacagcttgctcagtaacttggggtgccagtctgcctctcatgtagggcccttcatcgatagctaccgctgcttccaaccaaagcaggagggggccttcacctgctggtcagcagtcactggcgcccgccatctcaactatggctcccggcttgactatgtgctgggggacaggaccctggtcatagacacctttcaggcctctttcctgctgcctgaggtgatgggctctgaccactgccctgtgggtgcagtcttgagtgtgtcctctgtgcctgcaaaacagtgcccacctctgtgcacccgcttcctccctgagtttgcaggcacccagctcaagatccttcgcttcctagttcctctcgaacaaagtcctgtgttggagcagtcgacgctgcagcacaacaatcaaacccgggtacagacatgccaaaacaaagcccaagtgcgctcaaccaggcctcagcccagtcaggttggctctagcagaggccagaaaaacctgaagagctactttcagccctcccctagctgtccccaagcctctcctgacatagagctgcctagcctaccactgatgagcgccctcatgaccccgaagactccagaagagaaggcagtggccaaagtggtgaaggggcaggccaagacttcagaagccaaagatgagaaggagttacggacctcattctggaagtctgtgctggcggggcccttgcgcacacccctctgtgggggccacagggagccatgtgtgatgcgtactgtgaagaagccaggacccaacttgggccgccgcttctacatgtgtgccaggccccggggtcctcccactgacccctcctcccggtgcaacttcttcctctggagcaggcccagctgaaccaatggaggcctggggacatctggcatggtcacccctgcacatgatctgaggccagctccccttccctgagctgcctcctgcttctccctcaaagtctccatacgcacttcatcattaccgtcgttattgtacaagaacgcaccttcgtttcattttgcccgttcggcctttttcccaatttcccataacccataagaacgttcacatagatttggggtgaagcttcttgtgccttaatcctgtgacccagccccttacaccactttccaccttcctgtccgaagtacacggacactagctgccccaggaagttgtgtgattttaaatcacttctgtctttgctggaaagtgtatttgtgcataaataaagtctgtgtatttgtttcagggttgcactttggacattgtggaggtactccataaagttgagtcagagaag

SEQ ID NO: 420622 - DNA, 2099 bp, Homo sapiens
ccgctcagggttccgtcgcttaaaaagtggcaaaatgccgtttgtaagtaaccggacgcaccacttggacttctgagtagaggaaaaacgcattgagactcagctgtccgagcggaaggagcgggagcccaactggaaactcctctcgccattcattgcccctaggcttccgctttgcttccttcagcgtccacccagttcctcctcccgccaatgagagctgaggaagttgaagcccccgcccgacgtgcgtcaggcgctttagtggtacgcacgagaacgcctgcgcaaacgcgcgcgggaggcgggcctggccaacttctgaacaggaagcagttcgctcgcgcctaggttggcgcgggctgggaggtgttccagccctttaagatgttgcgcgtggtgagctggaacatcaatgggattcggagacccctgcaaggggtggcaaatcaggaacccagcaactgtgccgccgtggccgtggggcgcattttggacgagctggatgcggatatcgtctgtctccaggaaaccaaagtgaccagggatgcactgacagagcccctggctatcgttgagggttataactcctatttcagcttcagccgcaaccgtagcggctattctgcacatgggaaggtaaggagaagaccttgaccctaatcaacgtgtactgcccccatgcggaccctgggaggcctgagcggctagtctttaagatgcgcttctatcgtttgctgcaaatccgagcagaagccctcctggcggcaggcagccatgtgatcattctgggtgacctgaatacagcccaccgccccattgaccactgggatgcagtcaacctggaatgctttgaagaggacccagggcgcaagtggatggacagcttgctcagtaacttggggtgccagtctgcctctcatgtagggcccttcatcgatagctaccgctgcttccaaccaaagcaggagggggccttcacctgctggtcagcagtcactggcgcccgccatctcaactatggctcccggcttgactatgtgctgggggacaggaccctggtcatagacacctttcaggcctctttcctgctgcctgaggtgatgggctctgaccactgccctgtgggtgcagtcttgagtgtgtcctctgtgcctgcaaaacagtgcccacctctgtgcacccgcttcctccctgagtttgcaggcacccagctcaagatccttcgcttcctagttcctctcgaacaaagtcctgtgttggagcagtcgacgctgcagcacaacaatcaaacccgggtacagacatgccaaaacaaagcccaagtgcgctcaaccaggcctcagcccagtcaggttggctctagcagaggccagaaaaacctgaagagctactttcagccctcccctagctgtccccaagcctctcctgacatagagctgcctagcctaccactgatgagcgccctcatgaccccgaagactccagaagagaaggcagtggccaaagtggtgaaggggcaggccaagacttcagaagccaaagatgagaaggagttacggacctcattctggaagtctgtgctggcggggcccttgcgcacacccctctgtgggggccacagggagccatgtgtgatgcgtactgtgaagaagccaggacccaacttgggccgccgcttctacatgtgtgccaggccccggggtcctcccactgacccctcctcccggtgcaacttcttcctctggagcaggcccagctgaaccaatggaggcctggggacatctggcatggtcacccctgcacatgatctgaggccagctccccttccctgagctgcctcctgcttctccctcaaagtctcctacccttctcttcctcttttaagccctctcttcctcgctttccttcctacctagctccttgttggtgagcttcttgtgccttaatcctgtgacccagccccttacaccactttccaccttcctgtccgaagtacacggacactagctgccccaggaagttgtgtgattttaaatcacttctgtctttgctggaaagtgtatttgtgcataaataaagtctgtgtatttgtttca

SEQ ID NO: 420623 - DNA, 1351 bp, Homo sapiens
cggacgcgtgggtcaacccacgcgtccccatgtgatcattctgggtgacctgaatacagcccaccgccccattgaccactgggatgcagtcaacctggaatgctttgaagaggacccagggcgcaagtggatggacagcttgctcagtaacttggggtgccagtctgcctctcatgtagggcccttcatcgatagctaccgctgcttccaaccaaagcaggagggggccttcacctgctggtcagcagtcactggcgcccgccatctcaactatggctcccggcttgactatgtgctgggggacaggaccctggtcatagacacctttcaggcctctttcctgctgcctgaggtgatgggctctgaccactgccctgtgggtgcagtcttgagtgtgtcctctgtgcctgcaaaacagtgcccacctctgtgcacccgcttcctccctgagtttgcaggcacccagctcaagatccttcgcttcctagttcctctcgaacaaagtcctgtgttggagcagtcgacgctgcagcacaacaatcaaacccgggtacagacatgccaaaacaaagcccaagtgcgctcaaccaggcctcagcccagtcaggttggctctagcagaggccagaaaaacctgaagagctactttcagccctcccctagctgtccccaagcctctcctgacatagagctgcctagcctaccactgatgagcgccctcatgaccccgaagactccagaagagaaggcagtggccaaagtggtgaaggggcaggccaagacttcagaagccaaagatgagaaggagttacggacctcattctggaagtctgtgctggcggggcccttgcgcacacccctctgtgggggccacagggagccatgtgtgatgcgtactgtgaagaagccaggacccaacttgggccgccgcttctacatgtgtgccaggccccggggtcctcccactgacccctcctcccggtgcaacttcttcctctggagcaggcccagctgaaccaatggaggcctggggacatctggcatggtcacccctgcacatgatctgaggccagctccccttccctgagctgcctcctgcttctccctcaaagtctcctacccttctcttcctcttttaagccctctcttcctcgctttccttcctacctagctccttgttggtgagcttcttgtgccttaatcctgtgacccagccccttacaccactttccaccttcctgtccgaagtacacggacactagctgccccaggaagttgtgtgattttaaatcacttctgtctttgctggaaagtgtatttgtgcataaataaagtctgtgtatttgtttca

SEQ ID NO: 420624 - DNA, 1483 bp, Homo sapiens
aatgcaagctcgtgcagagggaaaaacaagcatggtcttttaaatcagtaaggatgaaaatcagaatcccagctctgccaattccggactgtgtgaccttgagcagtagtcctcttgggacaaccaaattttcttatttgcaaaatgcagcagttagtctaagtcccttccagttctaggtatctagttctgtctctctctcttccaaccccctttcctcctcacctaggaatgctttgaagaggacccagggcgcaagtggatggacagcttgctcagtaacttggggtgccagtctgcctctcatgtagggcccttcatcgatagctaccgctgcttccaaccaaagcaggagggggccttcacctgctggtcagcagtcactggcgcccgccatctcaactatggctcccggcttgactatgtgctgggggacaggaccctggtcatagacacctttcaggcctctttcctgctgcctgaggtgatgggctctgaccactgccctgtgggtgcagtcttgagtgtgtcctctgtgcctgcaaaacagtgcccacctctgtgcacccgcttcctccctgagtttgcaggcacccagctcaagatccttcgcttcctagttcctctcgaacaaagtcctgtgttggagcagtcgacgctgcagcacaacaatcaaacccgggtacagacatgccaaaacaaagcccaagtgcgctcaaccaggcctcagcccagtcaggttggctctagcagaggccagaaaaacctgaagagctactttcagccctcccctagctgtccccaagcctctcctgacatagagctgcctagcctaccactgatgagcgccctcatgaccccgaagactccagaagagaaggcagtggccaaagtggtgaaggggcaggccaagacttcagaagccaaagatgagaaggagttacggacctcattctggaagtctgtgctggcggggcccttgcgcacacccctctgtgggggccacagggagccatgtgtgatgcgtactgtgaagaagccaggacccaacttgggccgccgcttctacatgtgtgccaggccccggggtcctcccactgacccctcctcccggtgcaacttcttcctctggagcaggcccagctgaaccaatggaggcctggggacatctggcatggtcacccctgcacatgatctgaggccagctccccttccctgagctgcctcctgcttctccctcaaagtctcctacccttctcttcctcttttaagccctctcttcctcgctttccttcctacctagctccttgttggtgagcttcttgtgccttaatcctgtgacccagccccttacaccactttccaccttcctgtccgaagtacacggacactagctgccccaggaagttgtgtgattttaaatcacttctgtctttgctggaaagtgtatttgtgcataaataaagtctgtgtatttgtttca

SEQ ID NO: 420625 - DNA, 673 bp, Homo sapiens
caattctggactcaggcacaagaagctcaccaacaaggagctaggtaggaaggaaagcgaggaagagagggcttaaaagaggaagagaagggtaggagactttgagggagaagccaaagatgagaaggagttacggacctcattctggaagtctgtgctggcggggcccttgcgcacacccctctgtgggggccacagggagccatgtgtgatgcgtactgtgaagaagccaggacccaacttgggccgccgcttctacatgtgtgccaggccccggggtcctcccactgacccctcctcccggtgcaacttcttcctctggagcaggcccagctgaaccaatggaggcctggggacatctggcatggtcacccctgcacatgatctgaggccagctccccttccctgagctgcctcctgcttctccctcaaagtctcctacccttctcttcctcttttaagccctctcttcctcgctttccttcctacctagctccttgttggtgagcttcttgtgccttaatcctgtgacccagccccttacaccactttccaccttcctgtccgaagtacacggacactagctgccccaggaagttgtgtgattttaaatcacttctgtctttgctggaaagtgtatttgtgcataaataaagtctgtgtatttgtttca

SEQ ID NO: 420626 - DNA, 418 bp, Homo sapiens
ccccagtggctgctgaagaaggcctgagtggcctgtttgccacccagaatggggatgttggttgctatggaaacatggatgagtttacccaagaggaactccgggctctggatagtgagggcagggccctcctcacacagcataagatccgaatagctcatatctccctgctactgagcactgctggtgctactctttgagtgtgaagattctaaggcttgccatgtaaacatacatgcaccgtggagaagttcccaaatttgcctttcctggtttagtcctggctgggctactcagtgtgtgaccctggcaaatttttcccccctctgaagcttgagtttccatctctacaatgtggggctggcctagtgatccagctcttattaccatagacatctcaaaagcaacttagtgctga

SEQ ID NO: 420627 - DNA, 2280 bp, Homo sapiens
ccgctcagggttccgtcgcttaaaaagtggcaaaatgccgtttgtaagtaaccggacgcaccacttggacttctgagtagaggaaaaacgcattgagactcagctgtccgagcggaaggagcgggagcccaactggaaactcctctcgccattcattgcccctaggcttccgctttgcttccttcagcgtccacccagttcctcctcccgccaatgagagctgaggaagttgaagcccccgcccgacgtgcgtcaggcgctttagtggtacgcacgagaacgcctgcgcaaacgcgcgcgggaggcgggcctggccaacttctgaacaggaagcagttcgctcgcgcctaggttggcgcgggctgggaggtgttccagccctttaagatgttgcgcgtggtgagctggaacatcaatgggattcggagacccctgcaaggggtggcaaatcaggaacccagcaactgtgccgccgtggccgtggggcgcattttggacgagctggatgcggatatcgtctgtctccaggaaaccaaagtgaccagggatgcactgacagagcccctggctatcgttgagggttataactcctatttcagcttcagccgcaaccgtagcggctattctggtgtagccaccttctgtaaggacaatgctaccccagtggctgctgaagaaggcctgagtggcctgtttgccacccagaatggggatgttggttgctatggaaacatggatgagtttacccaagaggaactccgggctctggatagtgagggcagggccctcctcacacagcataagatccgcacatgggaaggtaaggagaagaccttgaccctaatcaacgtgtactgcccccatgcggaccctgggaggcctgagcggctagtctttaagatgcgcttctatcgtttgctgcaaatccgagcagaagccctcctggcggcaggcagccatgtgatcattctgggtgacctgaatacagcccaccgccccattgaccactgggatgcagtcaacctggaatgctttgaagaggacccagggcgcaagtggatggacagcttgctcagtaacttggggtgccagtctgcctctcatgtagggcccttcatcgatagctaccgctgcttccaaccaaagcaggagggggccttcacctgctggtcagcagtcactggcgcccgccatctcaactatggctcccggcttgactatgtgctgggggacaggaccctggtcatagacacctttcaggcctctttcctgctgcctgaggtgatgggctctgaccactgccctgtgggtgcagtcttgagtgtgtcctctgtgcctgcaaaacagtgcccacctctgtgcacccgcttcctccctgagtttgcaggcacccagctcaagatccttcgcttcctagttcctctcgaacaaagtcctgtgttggagcagtcgacgctgcagcacaacaatcaaacccgggtacagacatgccaaaacaaagcccaagtgcgctcaaccaggcctcagcccagtcaggttggctctagcagaggccagaaaaacctgaagagctactttcagccctcccctagctgtccccaagcctctcctgacatagagctgcctagcctaccactgatgagcgccctcatgaccccgaagactccagaagagaaggcagtggccaaagtggtgaaggggcaggccaagacttcagaagccaaagatgagaaggagttacggacctcattctggaagtctgtgctggcggggcccttgcgcacacccctctgtgggggccacagggagccatgtgtgatgcgtactgtgaagaagccaggacccaacttgggccgccgcttctacatgtgtgccaggccccggggtcctcccactgacccctcctcccggtgcaacttcttcctctggagcaggcccagctgaaccaatggaggcctggggacatctggcatggtcacccctgcacatgatctgaggccagctccccttccctgagctgcctcctgcttctccctcaaagtctcctacccttctcttcctcttttaagccctctcttcctcgctttccttcctacctagctccttgttggtgagcttcttgtgccttaatcctgtgacccagccccttacaccactttccaccttcctgtccgaagtacacggacactagctgccccaggaagttgtgtgattttaaatcacttctgtctttgctggaaagtgtatttgtgcataaataaagtctgtgtatttgtttca

SEQ ID NO: 420628 - DNA, 1603 bp, Homo sapiens
tcacgccgcaagaaggccgaggtggaatcggacgagggttggttgctatggaaacatggatgagtttacccaagaggaactccgggctctggatagtgagggcagggccctcctcacacagcataagatccgcacatgggaaggtaaggagaagaccttgaccctaatcaacgtgtactgcccccatgcggaccctgggaggcctgagcggctagtctttaagatgcgcttctatcgtttgctgcaaatccgagcagaagccctcctggcggcaggcagccatgtgatcattctgggtgacctgaatacagcccaccgccccattgaccactgggatgcagtcaacctggaatgctttgaagaggacccagggcgcaagtggatggacagcttgctcagtaacttggggtgccagtctgcctctcatgtagggcccttcatcgatagctaccgctgcttccaaccaaagcaggagggggccttcacctgctggtcagcagtcactggcgcccgccatctcaactatggctcccggcttgactatgtgctgggggacaggaccctggtcatagacacctttcaggcctctttcctgctgcctgaggtgatgggctctgaccactgccctgtgggtgcagtcttgagtgtgtcctctgtgcctgcaaaacagtgcccacctctgtgcacccgcttcctccctgagtttgcaggcacccagctcaagatccttcgcttcctagttcctctcgaacaaagtcctgtgttggagcagtcgacgctgcagcacaacaatcaaacccgggtacagacatgccaaaacaaagcccaagtgcgctcaaccaggcctcagcccagtcaggttggctctagcagaggccagaaaaacctgaagagctactttcagccctcccctagctgtccccaagcctctcctgacatagagctgcctagcctaccactgatgagcgccctcatgaccccgaagactccagaagagaaggcagtggccaaagtggtgaaggggcaggccaagacttcagaagccaaagatgagaaggagttacggacctcattctggaagtctgtgctggcggggcccttgcgcacacccctctgtgggggccacagggagccatgtgtgatgcgtactgtgaagaagccaggacccaacttgggccgccgcttctacatgtgtgccaggccccggggtcctcccactgacccctcctcccggtgcaacttcttcctctggagcaggcccagctgaaccaatggaggcctggggacatctggcatggtcacccctgcacatgatctgaggccagctccccttccctgagctgcctcctgcttctccctcaaagtctcctacccttctcttcctcttttaagccctctcttcctcgctttccttcctacctagctccttgttggtgagcttcttgtgccttaatcctgtgacccagccccttacaccactttccaccttcctgtccgaagtacacggacactagctgccccaggaagttgtgtgattttaaatcacttctgtctttgctggaaagtgtatttgtgcataaataaagtctgtgtatttgtttca

SEQ ID NO: 420629 - DNA, 2163 bp, Homo sapiens
ccgctcagggttccgtcgcttaaaaagtggcaaaatgccgtttgtaagtaaccggacgcaccacttggacttctgagtagaggaaaaacgcattgagactcagctgtccgagcggaaggagcgggagcccaactggaaactcctctcgccattcattgcccctaggcttccgctttgcttccttcagcgtccacccagttcctcctcccgccaatgagagctgaggaagttgaagcccccgcccgacgtgcgtcaggcgctttagtggtacgcacgagaacgcctgcgcaaacgcgcgcgggaggcgggcctggccaacttctgaacaggaagcagttcgctcgcgcctaggttggcgcgggctgggaggtgttccagccctttaagatgttgcgcgtggtgagctggaacatcaatgggattcggagacccctgcaaggggtggcaaatcaggaacccagcaactgtgccgccgtggccgtggggcgcattttggacgagctggatgcggatatcgtctgtctccaggaaaccaaagtgaccagggatgcactgacagagcccctggctatcgttgagggttataactcctatttcagcttcagccgcaaccgtagcggctattctggtgtagccaccttctgtaaggacaatgctaccccagtggctgctgaagaaggcctgagtggcctgtttgccacccagaatggggatgttggttgctatggaaacatggatgagtttacccaagaggaactccgggctctggatagtgagggcagggccctcctcacacagcataagatccgtaacaatcccacattgtgtttttcagccatccatgtgatcattctgggtgacctgaatacagcccaccgccccattgaccactgggatgcagtcaacctggaatgctttgaagaggacccagggcgcaagtggatggacagcttgctcagtaacttggggtgccagtctgcctctcatgtagggcccttcatcgatagctaccgctgcttccaaccaaagcaggagggggccttcacctgctggtcagcagtcactggcgcccgccatctcaactatggctcccggcttgactatgtgctgggggacaggaccctggtcatagacacctttcaggcctctttcctgctgcctgaggtgatgggctctgaccactgccctgtgggtgcagtcttgagtgtgtcctctgtgcctgcaaaacagtgcccacctctgtgcacccgcttcctccctgagtttgcaggcacccagctcaagatccttcgcttcctagttcctctcgaacaaagtcctgtgttggagcagtcgacgctgcagcacaacaatcaaacccgggtacagacatgccaaaacaaagcccaagtgcgctcaaccaggcctcagcccagtcaggttggctctagcagaggccagaaaaacctgaagagctactttcagccctcccctagctgtccccaagcctctcctgacatagagctgcctagcctaccactgatgagcgccctcatgaccccgaagactccagaagagaaggcagtggccaaagtggtgaaggggcaggccaagacttcagaagccaaagatgagaaggagttacggacctcattctggaagtctgtgctggcggggcccttgcgcacacccctctgtgggggccacagggagccatgtgtgatgcgtactgtgaagaagccaggacccaacttgggccgccgcttctacatgtgtgccaggccccggggtcctcccactgacccctcctcccggtgcaacttcttcctctggagcaggcccagctgaaccaatggaggcctggggacatctggcatggtcacccctgcacatgatctgaggccagctccccttccctgagctgcctcctgcttctccctcaaagtctcctacccttctcttcctcttttaagccctctcttcctcgctttccttcctacctagctccttgttggtgagcttcttgtgccttaatcctgtgacccagccccttacaccactttccaccttcctgtccgaagtacacggacactagctgccccaggaagttgtgtgattttaaatcacttctgtctttgctggaaagtgtatttgtgcataaataaagtctgtgtatttgtttca

SEQ ID NO: 420630 - DNA, 973 bp, Homo sapiens
actccatctcctgtcttcagcaaactttagctccttctcgaaaccccatatctagtcagattcccactcattctccggccccaaactcagtcccctgaatttcctcctagttcctctcgaacaaagtcctgtgttggagcagtcgacgctgcagcacaacaatcaaacccgggtacagacatgccaaaacaaagcccaagtgcgctcaaccaggcctcagcccagtcaggttggctctagcagaggccagaaaaacctgaagagctactttcagccctcccctagctgtccccaagcctctcctgacatagagctgcctagcctaccactgatgagcgccctcatgaccccgaagactccagaagagaaggcagtggccaaagtggtgaaggggcaggccaagacttcagaagccaaagatgagaaggagttacggacctcattctggaagtctgtgctggcggggcccttgcgcacacccctctgtgggggccacagggagccatgtgtgatgcgtactgtgaagaagccaggacccaacttgggccgccgcttctacatgtgtgccaggccccggggtcctcccactgacccctcctcccggtgcaacttcttcctctggagcaggcccagctgaaccaatggaggcctggggacatctggcatggtcacccctgcacatgatctgaggccagctccccttccctgagctgcctcctgcttctccctcaaagtctcctacccttctcttcctcttttaagccctctcttcctcgctttccttcctacctagctccttgttggtgagcttcttgtgccttaatcctgtgacccagccccttacaccactttccaccttcctgtccgaagtacacggacactagctgccccaggaagttgtgtgattttaaatcacttctgtctttgctggaaagtgtatttgtgcataaataaagtctgtgtatttgtttca

SEQ ID NO: 420631 - DNA, 683 bp, Homo sapiens
tcccccgttaatcataaaggaggtggcatatacacctccaaccgatgcagaagcaatttatgttactagacatcttttttcgtagaagtactataattataagatttcagatagaacatgcaattagccttttgaaatccaacttctgtgcaaaattttagtatcagaaaatacgagatttgcaggggaaacatcagtaaactaccattaatgtcaatgcccagttttgacttttgttagcctgacactcccaaacagttgtagaatccgatagatgactgatggcaaaagattgtgaacatgtggaagaaaatcagtgggattctggtgctgatgaataggttgccttcagagtattattgacagacagcttgtggaactaattctttatttttgatgttgtgggaattaacacatcaatggtggttatgggaactaccaatgggttcctacaatttttatcagtagtatgtggcatatacaccttcctagtggcagttgccaatgttaatgattattctttttattgcaagtatttcctatgatccttccacacctggccttttttttgagacagagtcttactcagtcacccagaatggaggcagaggttgcagtgagccaagattgtgccatttcactccagcccgggtgacacagtgcaagactccgtcttaccaaaa

SEQ ID NO: 420632 - DNA, 714 bp, Homo sapiens
ggtgatcatctccagcctaaatttcatcatcccttctatggtactcccaaagtgctgggattacaggcgtgagccacttagtatttgtaaccataagagaaagtatattttaacagcattacatttcatgccaattgacaagttttgccaattttaataagaaactaagctttatgtaatgtaacaccgtaatttatgaatttgttcattgtcactgcctttattcatgaaactgtcaaatagagtgtctttcaagggttgcaggatcttagagatagaaagtaccttggtgatcatctccagcactccagcctgggcaaaagagcaaaacgccatctcaaaaaatatacatatataaggagataaagtttcccattttccaatacagtttcacatttgaacagccctaattgatacaactttatggcagggttttagtgtgtgagtgggatccaaaacactcaatcctgtaaaagggtacagtcctattgtatgttaacacactgatgatgtgagcctgtgagatgagccaatcaccagttgttatgttcgaatctgctttgtgttgggacgctttaatgtcagggtttcactaaataaatgaattttcatatactgaaaaaaaaaaataaataaattaaaaaaactcgagggggggccccggtccccaattcccccctatggtgagtcgtatttacaattaactgggccgcg

SEQ ID NO: 420633 - DNA, 2849 bp, Homo sapiens
gtgctgagaggcgcgtactgtgcttgctttttgcagtacctgctgcggccgctttcggcatggaggaaatttatgcgaagtttgtgtcccagaaaatcagcaaaacccgctggcgaccgctgcctccgggaagtttacagaccgcggagacgttcgctacaggatcttgggacaatgaggaaaattatatttcactgtggtctattggagattttggaaacttggactctgatggagggtttgaaggagaccatcagttattgtgtgatatcagacaccatggtgatgtaatggatttacagttttttgaccaggaaagaattgtcgctgcttcatcaacaggatgtgtaacagttttccttcaccatccaaataaccagactctgtcagtcaaccagcagtggactacagctcactaccacacaggccctggcagtccttcctatagcagtgcaccatgtacaggtgttgtgtgcaacaacccagaaatcgttacagttggagaggatggtcgaataaatctcttcagagctgatcacaaggaagctgtaagaaccataggactggtgaccgagtgccactccactgtgttgatagacatcccaaccaacagcatgttgtagctactggtggccaagatggaatgttgagtatttgggatgttagacaaggtactatgcctgtatctctgctgaaggctcatgaagctgaaatgtgggaagttcactttcacccatccaacccagaacatctttttacctgctctgaagatggatccctctggcactgggatgcttccacagatgtacctgaaaagtcgtcactctttcaccaaggaggaagaagcagtacttttttgtctcatagcattagtaaccaagctaatgttcaccagtctgtcattagctcctggctcagcactgatcctgcaaaagaccgaattgaaatcacaagcttacttcccagtaggtctctgtctgtgaacactttggatgttttaggtccttgtcttgtttgtggaaccgatgcagaagcaatttatgttactagacatcttttttcgtagaagtactataattataagatttcagatagaacatgcaattagccttttgaaatccaacttctgtgcaaaattttagtatcagaaaatacgagatttgcaggggaaacatcagtaaactaccattaatgtcaatgcccagttttgacttttgttagcctgacactcccaaacagttgtagaatccgatagatgactgatggcaaaagattgtgaacatgtggaagaaaatcagtgggattctggtgctgatgaataggttgccttcagagtattattgacagacagcttgtggaactaattctttatttttgatgttgtgggaattaacacatcaatggtggttatgggaactaccaatgggttcctacaatttttatcagtagtatgtggcatatacaccttcctagtggcagttgccaatgttaatgattattctttttattgcaagtatttcctatgatccttccacactttatttccttaataataataaactttttcagaaagaattgagtagagcaaaaatgacaaagatgtgtagctgtgttcaattttttttttttttttttttgaggcagagtcttgctctgctggagtgcggtggtgcaatctcggctcactgcaacctccacctcccaggttcaagcaattctcctgcctcagtctcctgagtagctggaactacaggtgtgcgccaccacgcccagctaatttttgtaattttagtagagacagagtttcaccatgttggccaggatggtctcgatctcttgacctcatgatccacccgcctcgacctcccaaagtgctgtgattacaggtgtgagccactgcacccggcctgaaatttttttaaggtgaaaatgttttgacaagttcctttttcagaataggtttttgagcagaactctttcagcttgttagacccaactttgcttttgtttagcttcacagcatagctgaaagttgccaaactggacattgtgcaataaagtagaattctatattgataagcaaactatttccaaactaaaaatgtgatagataaaagtgtgattaatcaaatgatatgatcagagtaaagaattttgccattttgatccttttactttgttttagccacctatagtgttaccaaccatctttatccttgtctgcagggataataatgaactaatgtagtgttttaagataatttaatgatactatctttccaaactttgttagattttaaatgtattattgacctgagaccttaatgacaaatcactgctattagacaattgaagtgttcatttactttgtaattccaataatcatagttatggaattatggtaaggttttgcttttctgtcctaataaatatgtatattttttgagatggagttttgctcttgttgctgaggcaggagaattgctcgaacccgggaggcagaggttgcagtgacccgggatcgtgccacttcactccagcctgggcaaaagagcaaaacgccatctcaaaaaatatacatatataaggagataaagtttcccattttccaatacagtttcacatttgaacagccctaattgatacaactttatggcagggttttagtgtgtgagtgggatccaaaacactcaatcctgtaaaagggtacagtcctattgtatgttaacacactgatgatgtgagcctgtgagatgagccaatcaccagttgttatgttcgaatctgctttgtgttgggacgctttaatgtcagggtttcactaaataaatgaattttcatatactgaa

SEQ ID NO: 420634 - DNA, 5211 bp, Homo sapiens
gtgctgagaggcgcgtactgtgcttgctttttgcagtacctgctgcggccgctttcggcatggaggaaatttatgcgaagtttgtgtcccagaaaatcagcaaaacccgctggcgaccgctgcctccgggaagtttacagaccgcggagacgttcgctacaggatcttgggacaatgaggaaaattatatttcactgtggtctattggagattttggaaacttggactctgatggagggtttgaaggagaccatcagttattgtgtgatatcagacaccatggtgatgtaatggatttacagttttttgaccaggaaagaattgtcgctgcttcatcaacaggatgtgtaacagttttccttcaccatccaaataaccagactctgtcagtcaaccagcagtggactacagctcactaccacacaggccctggcagtccttcctatagcagtgcaccatgtacaggtgttgtgtgcaacaacccagaaatcgttacagttggagaggatggtcgaataaatctcttcagagctgatcacaaggaagctgtaagaaccatagacaatgcagatagtagtacactccatgctgtaacctttcttcgaactcctgagattcttactgtaaattcaattggacagttgaaaatatgggatttcagacaacaaggaaatgagccttctcagatattgtcactgactggtgaccgagtgccactccactgtgttgatagacatcccaaccaacagcatgttgtagctactggtggccaagatggaatgttgagtatttgggatgttagacaaggtactatgcctgtatctctgctgaaggctcatgaagctgaaatgtgggaagttcactttcacccatccaacccagaacatctttttacctgctctgaagatggatccctctggcactgggatgcttccacagatgtacctgaaaagtcgtcactctttcaccaagcgtccaagagcaatgtaaaatgtaggggcagtaaaagataaacagaaaaactaaggggaaaaaaattctaaaacttcttcagaaaaattctggagcggagagcatgtgtggagcatgcatgcatgtccatgctataacttcatctacagagaaacaaacagtttcatctaaggattaactaagtatgtacttcgtttttacttccttcctcccctaaccgcacagtcttgaacttgcaagtttacttttaaggaaccttggttagactggaaataaaactttattctgtgtctactattgcaaggcacagtattagacactgtgaaaaagtaaaacatataaaatatgcatcctgctcttaagacatatttagtcatggacagaggcatggatagttcaattaggatataagaattgttataaagtagtaaattaatggtacatacaagtgctgagggttcaaggaaagagaaaaacatgaagtagaggttgtcttcaaagttttcttagagaaggaagttcagccatattttaaaggatcagcaagattttaaatgtactaatctttaagcttcaagacatagggacttggcacagagcacttagcacagagcctggcacatagtaggtactcagtcatttgttgagtgaattaaatttgtacttatttgatatgacagcaagttgagaggaaagtaagtgcgaataatgactaaaattgaaatatactgcctctgcctcactttattctatagtaagtacagtgcgctgttagagataaaaccttataatctagtagtgttctaatctgcttgtaagaacatttatctaaaaagcataagaatgaaagatttgaggtaaggcgattatattttaagaaatatagtaacaaatatatatttagaaatatatttctagaaatgttcatctagaaatatgtctagaaattctttctcatgatcattttattttgttattacccaagagtttatatttccatgtattacctacatttttggtttcttttttttctttccttattcaacttgtatgctggccgttttgctacctttctgagactttccattaaaagatgaacagaaagtcagttgaaatcacctgcttttcctgaagacttcgagtttggtatccatattatcccatggaaatttgaatatttaatatcactgaataagcctttggtccaaagtggtgatgtataataatggaattattagcctattattctgagaattaaacacattgatatcatcacctttctaaatatcagtagaagtttgaatgtttactaatataaaaatcatcttgaaagatttcttccttttctttttttctcccaggaggaagaagcagtacttttttgtctcatagcattagtaaccaagctaatgttcaccagtctgtcattagctcctggctcagcactgatcctgcaaaagaccgaattgaaatcacaagcttacttcccagtaggtctctgtctgtgaacactttggatgttttaggtccttgtcttgtttgtggaaccgatgcagaagcaatttatgttactagacatcttttttcgtagaagtactataattataagatttcagatagaacatgcaattagccttttgaaatccaacttctgtgcaaaattttagtatcagaaaatacgagatttgcaggggaaacatcagtaaactaccattaatgtcaatgcccagttttgacttttgttagcctgacactcccaaacagttgtagaatccgatagatgactgatggcaaaagattgtgaacatgtggaagaaaatcagtgggattctggtgctgatgaataggttgccttcagagtattattgacagacagcttgtggaactaattctttatttttgatgttgtgggaattaacacatcaatggtggttatgggaactaccaatgggttcctacaatttttatcagtagtatgtggcatatacaccttcctagtggcagttgccaatgttaatgattattctttttattgcaagtatttcctatgatccttccacactttatttccttaataataataaactttttcagaaagaattgagtagagcaaaaatgacaaagatgtgtagctgtgttcaattttttttttttttttttttgaggcagagtcttgctctgctggagtgcggtggtgcaatctcggctcactgcaacctccacctcccaggttcaagcaattctcctgcctcagtctcctgagtagctggaactacaggtgtgcgccaccacgcccagctaatttttgtaattttagtagagacagagtttcaccatgttggccaggatggtctcgatctcttgacctcatgatccacccgcctcgacctcccaaagtgctgtgattacaggtgtgagccactgcacccggcctgaaatttttttaaggtgaaaatgttttgacaagttcctttttcagaataggtttttgagcagaactctttcagcttgttagacccaactttgcttttgtttagcttcacagcatagctgaaagttgccaaactggacattgtgcaataaagtagaattctatattgataagcaaactatttccaaactaaaaatgtgatagataaaagtgtgattaatcaaatgatatgatcagagtaaagaattttgccattttgatccttttactttgttttagccacctatagtgttaccaaccatctttatccttgtctgcagggataataatgaactaatgtagtgttttaagataatttaatgatactatctttccaaactttgttagattttaaatgtattattgacctgagaccttaatgacaaatcactgctattagacaattgaagtgttcatttactttgtaattccaataatcatagttatggaattatggtaaggttttgcttttctgtcctaataaatatgtatattttttgagatggagttttgctcttgttgctgaggctggagtgaaatggcatgatctcagctcactgcaacctccgtctcttaggttcgagcaattctcctgcctcagcctcccgagtagctgggattacaggtgctcaccaccacacccagctaatttttgtatttttagtggagatggggtttcgctgtgttggccaggctggtcttgaactgacctcgtgatccacctgcctcagcctcccaaaatgctgggattacaggcttgagccactgctcccggctgattttgtattagtagagacgacagggtttcaccatgttggccagggctggtctcgaactcctgaccacaggtaatcagcccgcctcggcctcccaaagtgctgggattacaggcgtgagccacttagtatttgtaaccataagagaaagtatattttaacagcattacatttcatgccaattgacaagttttgccaattttaataagaaactaagctttatgtaatgtaacaccgtaatttatgaatttgttcattgtcactgcctttattcatgaaactgtcaaatagagtgtctttcaagggttgcaggatcttagagatagaaagtaccttggtgatcatctccagcctaaatttcatcatcccttctatggtattcccaacaaattatcatccaacctatacttaaaaacatatggtggccaggcatggtggctcacgcctgtaatgctagcactttgggaggccgaggtgggtgaagcacctgaggtcaagagttcgagatcagcctggccaacatggcgaaaccccgtctccactaaaaatgcaaaaaaaaaattaaccgggcgtggtggcaggcatctgtggtcccagctgcttgggaggcgctgaggcaggagaattgctcgaacccgggaggcagaggttgcagtgacccgggatcgtgccacttcactccagcctgggcaaaagagcaaaacgccatctcaaaaaatatacatatataaggagataaagtttcccattttccaatacagtttcacatttgaacagccctaattgatacaactttatggcagggttttagtgtgtgagtgggatccaaaacactcaatcctgtaaaagggtacagtcctattgtatgttaacacactgatgatgtgagcctgtgagatgagccaatcaccagttgttatgttcgaatctgctttgtgttgggacgctttaatgtcagggtttcactaaataaatgaattttcatatactgaa

SEQ ID NO: 420635 - DNA, 4781 bp, Homo sapiens
aggagaattgcttgaacccgggagttggaggttgcagtgagccaaggtcacgccactgcactccagcctgggcaacagagcaagactccatctcaaaaaaaaagaaaaaggaaaataacatggccaaatacactgctaattaccatgaagaagaatacagcagagtaggaggataaagaataaagacaggggtgaggggagctactctagtgagagtcagaagaggccacttggcagaaggaacatttgagcagagacttaagagaagtgaaggcataagtgacatgaaagcattccaggcagaggaaacagcaaatgctgagggcctgagacaggcagagaactgcaaggacaccacggttggagctcaggcagcagggtacagtggtgggagataaggactggtggctgaggagccctgggactttgtagcccatgataaggactttagacttatgggagggggaggagaaaagtggaaaacagggagatgaggaaggagtcttatcacagtggcttgaataatgtgttaatctttacagcgtccaagagcaatgtaaaatgtaggggcagtaaaagataaacagaaaaactaaggggaaaaaaattctaaaacttcttcagaaaaattctggagcggagagcatgtgtggagcatgcatgcatgtccatgctataacttcatctacagagaaacaaacagtttcatctaaggattaactaagtatgtacttcgtttttacttccttcctcccctaaccgcacagtcttgaacttgcaagtttacttttaaggaaccttggttagactggaaataaaactttattctgtgtctactattgcaaggcacagtattagacactgtgaaaaagtaaaacatataaaatatgcatcctgctcttaagacatatttagtcatggacagaggcatggatagttcaattaggatataagaattgttataaagtagtaaattaatggtacatacaagtgctgagggttcaaggaaagagaaaaacatgaagtagaggttgtcttcaaagttttcttagagaaggaagttcagccatattttaaaggatcagcaagattttaaatgtactaatctttaagcttcaagacatagggacttggcacagagcacttagcacagagcctggcacatagtaggtactcagtcatttgttgagtgaattaaatttgtacttatttgatatgacagcaagttgagaggaaagtaagtgcgaataatgactaaaattgaaatatactgcctctgcctcactttattctatagtaagtacagtgcgctgttagagataaaaccttataatctagtagtgttctaatctgcttgtaagaacatttatctaaaaagcataagaatgaaagatttgaggtaaggcgattatattttaagaaatatagtaacaaatatatatttagaaatatatttctagaaatgttcatctagaaatatgtctagaaattctttctcatgatcattttattttgttattacccaagagtttatatttccatgtattacctacatttttggtttcttttttttctttccttattcaacttgtatgctggccgttttgctacctttctgagactttccattaaaagatgaacagaaagtcagttgaaatcacctgcttttcctgaagacttcgagtttggtatccatattatcccatggaaatttgaatatttaatatcactgaataagcctttggtccaaagtggtgatgtataataatggaattattagcctattattctgagaattaaacacattgatatcatcacctttctaaatatcagtagaagtttgaatgtttactaatataaaaatcatcttgaaagatttcttccttttctttttttctcccaggaggaagaagcagtacttttttgtctcatagcattagtaaccaagctaatgttcaccagtctgtcattagctcctggctcagcactgatcctgcaaaagaccgaattgaaatcacaagcttacttcccagtaggtctctgtctgtgaacactttggatgttttaggtccttgtcttgtttgtggaaccgatgcagaagcaatttatgttactagacatcttttttcgtagaagtactataattataagatttcagatagaacatgcaattagccttttgaaatccaacttctgtgcaaaattttagtatcagaaaatacgagatttgcaggggaaacatcagtaaactaccattaatgtcaatgcccagttttgacttttgttagcctgacactcccaaacagttgtagaatccgatagatgactgatggcaaaagattgtgaacatgtggaagaaaatcagtgggattctggtgctgatgaataggttgccttcagagtattattgacagacagcttgtggaactaattctttatttttgatgttgtgggaattaacacatcaatggtggttatgggaactaccaatgggttcctacaatttttatcagtagtatgtggcatatacaccttcctagtggcagttgccaatgttaatgattattctttttattgcaagtatttcctatgatccttccacactttatttccttaataataataaactttttcagaaagaattgagtagagcaaaaatgacaaagatgtgtagctgtgttcaattttttttttttttttttttgaggcagagtcttgctctgctggagtgcggtggtgcaatctcggctcactgcaacctccacctcccaggttcaagcaattctcctgcctcagtctcctgagtagctggaactacaggtgtgcgccaccacgcccagctaatttttgtaattttagtagagacagagtttcaccatgttggccaggatggtctcgatctcttgacctcatgatccacccgcctcgacctcccaaagtgctgtgattacaggtgtgagccactgcacccggcctgaaatttttttaaggtgaaaatgttttgacaagttcctttttcagaataggtttttgagcagaactctttcagcttgttagacccaactttgcttttgtttagcttcacagcatagctgaaagttgccaaactggacattgtgcaataaagtagaattctatattgataagcaaactatttccaaactaaaaatgtgatagataaaagtgtgattaatcaaatgatatgatcagagtaaagaattttgccattttgatccttttactttgttttagccacctatagtgttaccaaccatctttatccttgtctgcagggataataatgaactaatgtagtgttttaagataatttaatgatactatctttccaaactttgttagattttaaatgtattattgacctgagaccttaatgacaaatcactgctattagacaattgaagtgttcatttactttgtaattccaataatcatagttatggaattatggtaaggttttgcttttctgtcctaataaatatgtatattttttgagatggagttttgctcttgttgctgaggctggagtgaaatggcatgatctcagctcactgcaacctccgtctcttaggttcgagcaattctcctgcctcagcctcccgagtagctgggattacaggtgctcaccaccacacccagctaatttttgtatttttagtggagatggggtttcgctgtgttggccaggctggtcttgaactgacctcgtgatccacctgcctcagcctcccaaaatgctgggattacaggcttgagccactgctcccggctgattttgtattagtagagacgacagggtttcaccatgttggccagggctggtctcgaactcctgaccacaggtaatcagcccgcctcggcctcccaaagtgctgggattacaggcgtgagccacttagtatttgtaaccataagagaaagtatattttaacagcattacatttcatgccaattgacaagttttgccaattttaataagaaactaagctttatgtaatgtaacaccgtaatttatgaatttgttcattgtcactgcctttattcatgaaactgtcaaatagagtgtctttcaagggttgcaggatcttagagatagaaagtaccttggtgatcatctccagcctaaatttcatcatcccttctatggtattcccaacaaattatcatccaacctatacttaaaaacatatggtggccaggcatggtggctcacgcctgtaatgctagcactttgggaggccgaggtgggtgaagcacctgaggtcaagagttcgagatcagcctggccaacatggcgaaaccccgtctccactaaaaatgcaaaaaaaaaattaaccgggcgtggtggcaggcatctgtggtcccagctgcttgggaggcgctgaggcaggagaattgctcgaacccgggaggcagaggttgcagtgacccgggatcgtgccacttcactccagcctgggcaaaagagcaaaacgccatctcaaaaaatatacatatataaggagataaagtttcccattttccaatacagtttcacatttgaacagccctaattgatacaactttatggcagggttttagtgtgtgagtgggatccaaaacactcaatcctgtaaaagggtacagtcctattgtatgttaacacactgatgatgtgagcctgtgagatgagccaatcaccagttgttatgttcgaatctgctttgtgttgggacgctttaatgtcagggtttcactaaataaatgaattttcatatactgaa

SEQ ID NO: 420636 - DNA, 2733 bp, Homo sapiens
tcccccgttaatcataaaggaggtggcatatacacctccaaccgatgcagaagcaatttatgttactagacatcttttttcgtagaagtactataattataagatttcagatagaacatgcaattagccttttgaaatccaacttctgtgcaaaattttagtatcagaaaatacgagatttgcaggggaaacatcagtaaactaccattaatgtcaatgcccagttttgacttttgttagcctgacactcccaaacagttgtagaatccgatagatgactgatggcaaaagattgtgaacatgtggaagaaaatcagtgggattctggtgctgatgaataggttgccttcagagtattattgacagacagcttgtggaactaattctttatttttgatgttgtgggaattaacacatcaatggtggttatgggaactaccaatgggttcctacaatttttatcagtagtatgtggcatatacaccttcctagtggcagttgccaatgttaatgattattctttttattgcaagtatttcctatgatccttccacactttatttccttaataataataaactttttcagaaagaattgagtagagcaaaaatgacaaagatgtgtagctgtgttcaattttttttttttttttttttgaggcagagtcttgctctgctggagtgcggtggtgcaatctcggctcactgcaacctccacctcccaggttcaagcaattctcctgcctcagtctcctgagtagctggaactacaggtgtgcgccaccacgcccagctaatttttgtaattttagtagagacagagtttcaccatgttggccaggatggtctcgatctcttgacctcatgatccacccgcctcgacctcccaaagtgctgtgattacaggtgtgagccactgcacccggcctgaaatttttttaaggtgaaaatgttttgacaagttcctttttcagaataggtttttgagcagaactctttcagcttgttagacccaactttgcttttgtttagcttcacagcatagctgaaagttgccaaactggacattgtgcaataaagtagaattctatattgataagcaaactatttccaaactaaaaatgtgatagataaaagtgtgattaatcaaatgatatgatcagagtaaagaattttgccattttgatccttttactttgttttagccacctatagtgttaccaaccatctttatccttgtctgcagggataataatgaactaatgtagtgttttaagataatttaatgatactatctttccaaactttgttagattttaaatgtattattgacctgagaccttaatgacaaatcactgctattagacaattgaagtgttcatttactttgtaattccaataatcatagttatggaattatggtaaggttttgcttttctgtcctaataaatatgtatattttttgagatggagttttgctcttgttgctgaggctggagtgaaatggcatgatctcagctcactgcaacctccgtctcttaggttcgagcaattctcctgcctcagcctcccgagtagctgggattacaggtgctcaccaccacacccagctaatttttgtatttttagtggagatggggtttcgctgtgttggccaggctggtcttgaactgacctcgtgatccacctgcctcagcctcccaaaatgctgggattacaggcttgagccactgctcccggctgattttgtattagtagagacgacagggtttcaccatgttggccagggctggtctcgaactcctgaccacaggtaatcagcccgcctcggcctcccaaagtgctgggattacaggcgtgagccacttagtatttgtaaccataagagaaagtatattttaacagcattacatttcatgccaattgacaagttttgccaattttaataagaaactaagctttatgtaatgtaacaccgtaatttatgaatttgttcattgtcactgcctttattcatgaaactgtcaaatagagtgtctttcaagggttgcaggatcttagagatagaaagtaccttggtgatcatctccagcctaaatttcatcatcccttctatggtattcccaacaaattatcatccaacctatacttaaaaacatatggtggccaggcatggtggctcacgcctgtaatgctagcactttgggaggccgaggtgggtgaagcacctgaggtcaagagttcgagatcagcctggccaacatggcgaaaccccgtctccactaaaaatgcaaaaaaaaaattaaccgggcgtggtggcaggcatctgtggtcccagctgcttgggaggcgctgaggcaggagaattgctcgaacccgggaggcagaggttgcagtgacccgggatcgtgccacttcactccagcctgggcaaaagagcaaaacgccatctcaaaaaatatacatatataaggagataaagtttcccattttccaatacagtttcacatttgaacagccctaattgatacaactttatggcagggttttagtgtgtgagtgggatccaaaacactcaatcctgtaaaagggtacagtcctattgtatgttaacacactgatgatgtgagcctgtgagatgagccaatcaccagttgttatgttcgaatctgctttgtgttgggacgctttaatgtcagggtttcactaaataaatgaattttcatatactgaa

SEQ ID NO: 420637 - DNA, 4193 bp, Homo sapiens
gtgctgagaggcgcgtactgtgcttgctttttgcagtacctgctgcggccgctttcggcatggaggaaatttatgcgaagtttgtgtcccagaaaatcagcaaaacccgctggcgaccgctgcctccgggaagtttacagaccgcggagacgttcgctacaggatcttgggacaatgaggaaaattatatttcactgtggtctattggagattttggaaacttggactctgatggagggtttgaaggagaccatcagttattgtgtgatatcagacaccatggtgatgtaatggatttacagttttttgaccaggaaagaattgtcgctgcttcatcaacaggatgtgtaacagttttccttcaccatccaaataaccagactctgtcagtcaaccagcagtggactacagctcactaccacacaggccctggcagtccttcctatagcagtgcaccatgtacaggtgttgtgtgcaacaacccagaaatcgttacagttggagaggatggtcgaataaatctcttcagagctgatcacaaggaagctgtaagaaccatagacaatgcagatagtagtacactccatgctgtaacctttcttcgaactcctgagattcttactgtaaattcaattggacagttgaaaatatgggatttcagacaacaaggaaatgagccttctcagatattgtcactgactggtgaccgagtgccactccactgtgttgatagacatcccaaccaacagcatgttgtagctactggtggccaagatggaatgttgagtatttgggatgttagacaaggtactatgcctgtatctctgctgaaggctcatgaagctgaaatgtgggaagttcactttcacccatccaacccagaacatctttttacctgctctgaagatggatccctctggcactgggatgcttccacagatgtacctgaaaagtcgtcactctttcaccaagcgtccaagagcaatgtaaaatgtaggggcagtaaaagataaacagaaaaactaaggggaaaaaaattctaaaacttcttcagaaaaattctggagcggagagcatgtgtggagcatgcatgcatgtccatgctataacttcatctacagagaaacaaacagtttcatctaaggattaactaagtatgtacttcgtttttacttccttcctcccctaaccgcacagtcttgaacttgcaagtttacttttaaggaaccttggttagactggaaataaaactttattctgtgtctactattgcaaggcacagtattagacactgtgaaaaagtaaaacatataaaatatgcatcctgctcttaagacatatttagtcatggacagaggcatggatagttcaattaggatataagaattgttataaagtagtaaattaatggtacatacaagtgctgagggttcaaggaaagagaaaaacatgaagtagaggttgtcttcaaagttttcttagagaaggaagttcagccatattttaaaggatcagcaagattttaaatgtactaatctttaagcttcaagacatagggacttggcacagagcacttagcacagagcctggcacatagtaggtactcagtcatttgttgagtgaattaaatttgtacttatttgatatgacagcaagttgagaggaaagtaagtgcgaataatgactaaaattgaaatatactgcctctgcctcactttattctatagtaagtacagtgcgctgttagagataaaaccttataatctagtagtgttctaatctgcttgtaagaacatttatctaaaaagcataagaatgaaagatttgaggtaaggcgattatattttaagaaatatagtaacaaatatatatttagaaatatatttctagaaatgttcatctagaaatatgtctagaaattctttctcatgatcattttattttgttattacccaagagtttatatttccatgtattacctacatttttggtttcttttttttctttccttattcaacttgtatgctggccgttttgctacctttctgagactttccattaaaagatgaacagaaagtcagttgaaatcacctgcttttcctgaagacttcgagtttggtatccatattatcccatggaaatttgaatatttaatatcactgaataagcctttggtccaaagtggtgatgtataataatggaattattagcctattattctgagaattaaacacattgatatcatcacctttctaaatatcagtagaagtttgaatgtttactaatataaaaatcatcttgaaagatttcttccttttctttttttctcccaggaggaagaagcagtacttttttgtctcatagcattagtaaccaagctaatgttcaccagtctgtcattagctcctggctcagcactgatcctgcaaaagaccgaattgaaatcacaagcttacttcccagtaggtctctgtctgtgaacactttggatgttttaggtccttgtcttgtttgtggaaccgatgcagaagcaatttatgttactagacatcttttttcgtagaagtactataattataagatttcagatagaacatgcaattagccttttgaaatccaacttctgtgcaaaattttagtatcagaaaatacgagatttgcaggggaaacatcagtaaactaccattaatgtcaatgcccagttttgacttttgttagcctgacactcccaaacagttgtagaatccgatagatgactgatggcaaaagattgtgaacatgtggaagaaaatcagtgggattctggtgctgatgaataggttgccttcagagtattattgacagacagcttgtggaactaattctttatttttgatgttgtgggaattaacacatcaatggtggttatgggaactaccaatgggttcctacaatttttatcagtagtatgtggcatatacaccttcctagtggcagttgccaatgttaatgattattctttttattgcaagtatttcctatgatccttccacactttatttccttaataataataaactttttcagaaagaattgagtagagcaaaaatgacaaagatgtgtagctgtgttcaattttttttttttttttttttgaggcagagtcttgctctgctggagtgcggtggtgcaatctcggctcactgcaacctccacctcccaggttcaagcaattctcctgcctcagtctcctgagtagctggaactacaggtgtgcgccaccacgcccagctaatttttgtaattttagtagagacagagtttcaccatgttggccaggatggtctcgatctcttgacctcatgatccacccgcctcgacctcccaaagtgctgtgattacaggtgtgagccactgcacccggcctgaaatttttttaaggtgaaaatgttttgacaagttcctttttcagaataggtttttgagcagaactctttcagcttgttagacccaactttgcttttgtttagcttcacagcatagctgaaagttgccaaactggacattgtgcaataaagtagaattctatattgataagcaaactatttccaaactaaaaatgtgatagataaaagtgtgattaatcaaatgatatgatcagagtaaagaattttgccattttgatccttttactttgttttagccacctatagtgttaccaaccatctttatccttgtctgcagggataataatgaactaatgtagtgttttaagataatttaatgatactatctttccaaactttgttagattttaaatgtattattgacgctgaggcaggagaattgctcgaacccgggaggcagaggttgcagtgacccgggatcgtgccacttcactccagcctgggcaaaagagcaaaacgccatctcaaaaaatatacatatataaggagataaagtttcccattttccaatacagtttcacatttgaacagccctaattgatacaactttatggcagggttttagtgtgtgagtgggatccaaaacactcaatcctgtaaaagggtacagtcctattgtatgttaacacactgatgatgtgagcctgtgagatgagccaatcaccagttgttatgttcgaatctgctttgtgttgggacgctttaatgtcagggtttcactaaataaatgaattttcatatactgaa

SEQ ID NO: 420638 - DNA, 4148 bp, Homo sapiens
gtgctgagaggcgcgtactgtgcttgctttttgcagtacctgctgcggccgctttcggcatggaggaaatttatgcgaagtttgtgtcccagaaaatcagcaaaacccgctggcgaccgctgcctccgggaagtttacagaccgcggagacgttcgctacaggatcttgggacaatgaggaaaattatatttcactgtggtctattggagattttggaaacttggactctgatggagggtttgaaggagaccatcagttattgtgtgatatcagacaccatggtgatgtaatggatttacagttttttgaccaggaaagaattgtcgctgcttcatcaacaggatgtgtaacagttttccttcaccatccaaataaccagactctgtcagtcaaccagcagtggactacagctcactaccacacaggccctggcagtccttcctatagcagtgcaccatgtacaggtgttgtgtgcaacaacccagaaatcgttacagttggagaggatggtcgaataaatctcttcagagctgatcacaaggaagctgtaagaaccatagacaatgcagatagtagtacactccatgctgtaacctttcttcgaactcctgagattcttactgtaaattcaattggacagttgaaaatatgggatttcagacaacaaggaaatgagccttctcagatattgtcactgactggtgaccgagtgccactccactgtgttgatagacatcccaaccaacagcatgttgtagctactggtggccaagatggaatgttgagtatttgggatgttagacaaggtactatgcctgtatctctgctgaaggctcatgaagctgaaatgtgggaagttcactttcacccatccaacccagaacatctttttacctgctctgaagatggatccctctggcactgggatgcttccacagatgtacctgaaaagtcgtcactctttcaccaagcgtccaagagcaatgtaaaatgtaggggcagtaaaagataaacagaaaaactaaggggaaaaaaattctaaaacttcttcagaaaaattctggagcggagagcatgtgtggagcatgcatgcatgtccatgctataacttcatctacagagaaacaaacagtttcatctaaggattaactaagtatgtacttcgtttttacttccttcctcccctaaccgcacagtcttgaacttgcaagtttacttttaaggaaccttggttagactggaaataaaactttattctgtgtctactattgcaaggcacagtattagacactgtgaaaaagtaaaacatataaaatatgcatcctgctcttaagacatatttagtcatggacagaggcatggatagttcaattaggatataagaattgttataaagtagtaaattaatggtacatacaagtgctgagggttcaaggaaagagaaaaacatgaagtagaggttgtcttcaaagttttcttagagaaggaagttcagccatattttaaaggatcagcaagattttaaatgtactaatctttaagcttcaagacatagggacttggcacagagcacttagcacagagcctggcacatagtaggtactcagtcatttgttgagtgaattaaatttgtacttatttgatatgacagcaagttgagaggaaagtaagtgcgaataatgactaaaattgaaatatactgcctctgcctcactttattctatagtaagtacagtgcgctgttagagataaaaccttataatctagtagtgttctaatctgcttgtaagaacatttatctaaaaagcataagaatgaaagatttgaggtaaggcgattatattttaagaaatatagtaacaaatatatatttagaaatatatttctagaaatgttcatctagaaatatgtctagaaattctttctcatgatcattttattttgttattacccaagagtttatatttccatgtattacctacatttttggtttcttttttttctttccttattcaacttgtatgctggccgttttgctacctttctgagactttccattaaaagatgaacagaaagtcagttgaaatcacctgcttttcctgaagacttcgagtttggtatccatattatcccatggaaatttgaatatttaatatcactgaataagcctttggtccaaagtggtgatgtataataatggaattattagcctattattctgagaattaaacacattgatatcatcacctttctaaatatcagtagaagtttgaatgtttactaatataaaaatcatcttgaaagatttcttccttttctttttttctcccaggaggaagaagcagtacttttttgtctcatagcattagtaaccaagctaatgttcaccagtctgtcattagctcctggctcagcactgatcctgcaaaagaccgaattgaaatcacaagcttacttcccagtaggtctctgtctgtgaacactttggatgttttaggtccttgtcttgtttgtggaaccgatgcagaagcaatttatgttactagacatcttttttcgtagaagtactataattataagatttcagatagaacatgcaattagccttttgaaatccaacttctgtgcaaaattttagtatcagaaaatacgagatttgcaggggaaacatcagtaaactaccattaatgtcaatgcccagttttgacttttgttagcctgacactcccaaacagttgtagaatccgatagatgactgatggcaaaagattgtgaacatgtggaagaaaatcagtgggattctggtgctgatgaataggttgccttcagagtattattgacagacagcttgtggaactaattctttatttttgatgttgtgggaattaacacatcaatggtggttatgggaactaccaatgggttcctacaatttttatcagtagtatgtggcatatacaccttcctagtggcagttgccaatgttaatgattattctttttattgcaagtatttcctatgatccttccacactttatttccttaataataataaactttttcagaaagaattgagtagagcaaaaatgacaaagatgtgtagctgtgttcaattttttttttttttttttttgaggcagagtcttgctctgctggagtgcggtggtgcaatctcggctcactgcaacctccacctcccaggttcaagcaattctcctgcctcagtctcctgagtagctggaactacaggtgtgcgccaccacgcccagctaatttttgtaattttagtagagacagagtttcaccatgttggccaggatggtctcgatctcttgacctcatgatccacccgcctcgacctcccaaagtgctgtgattacaggtgtgagccactgcacccggcctgaaatttttttaaggtgaaaatgttttgacaagttcctttttcagaataggtttttgagcagaactctttcagcttgttagacccaactttgcttttgtttagcttcacagcatagctgaaagttgccaaactggacattgtgcaataaagtagaattctatattgataagcaaactatttccaaactaaaaatgtgatagataaaagtgtgattaatcaaatgatatgatcagagtaaagaattttgccattttgatccttttactttgttttagccacctatagtgttaccaaccatctttatccttgtctgcagggataataatgaactaatgtagtgttttaagataatttaatgatactatctttccaaactttgttagattttaaatgtattattgacctgagaccttaatgacaaatcaactccagcctgggcaaaagagcaaaacgccatctcaaaaaatatacatatataaggagataaagtttcccattttccaatacagtttcacatttgaacagccctaattgatacaactttatggcagggttttagtgtgtgagtgggatccaaaacactcaatcctgtaaaagggtacagtcctattgtatgttaacacactgatgatgtgagcctgtgagatgagccaatcaccagttgttatgttcgaatctgctttgtgttgggacgctttaatgtcagggtttcactaaataaatgaattttcatatactgaa

SEQ ID NO: 420639 - DNA, 2194 bp, Homo sapiens
ggtgatcatctccagcctaaatttcatcatcccttctatggtattcccaaggtgctggggttacaggcgtgagcacttagtatttgtaaccataagagaaagtatattttaacagcattacatttcatgccaattgacaagttttgccaattttaataagaaactaagctttatgtaatgtaacaccgtaatttatgaatttgttcattgtcactgcctttattcatgaaactgtcaaatagagtgtctttcaagggttgcaggatcttagagatagaaagtaccttggtgatcatctccagcctaaatttcatcatcccttctatggtattcccaacaaattatcatccaacctatacttaaaaacatatagccactgcacccggcctgaaatttttttaaggtgaaaatgttttgacaagttcctttttcagaataggtttttgagcagaactctttcagcttgttagacccaactttgcttttgtttagcttcacagcatagctgaaagttgccaaactggacattgtgcaataaagtagaattctatattgataagcaaactatttccaaactaaaaatgtgatagataaaagtgtgattaatcaaatgatatgatcagagtaaagaattttgccattttgatccttttactttgttttagccacctatagtgttaccaaccatctttatccttgtctgcagggataataatgaactaatgtagtgttttaagataatttaatgatactatctttccaaactttgttagattttaaatgtattattgacctgagaccttaatgacaaatcactgctattagacaattgaagtgttcatttactttgtaattccaataatcatagttatggaattatggtaaggttttgcttttctgtcctaataaatatgtatattttttgagatggagttttgctcttgttgctgaggctggagtgaaatggcatgatctcagctcactgcaacctccgtctcttaggttcgagcaattctcctgcctcagcctcccgagtagctgggattacaggtgctcaccaccacacccagctaatttttgtatttttagtggagatggggtttcgctgtgttggccaggctggtcttgaactgacctcgtgatccacctgcctcagcctcccaaaatgctgggattacaggcttgagccactgctcccggctgattttgtattagtagagacgacagggtttcaccatgttggccagggctggtctcgaactcctgaccacaggtaatcagcccgcctcggcctcccaaagtgctgggattacaggcgtgagccacttagtatttgtaaccataagagaaagtatattttaacagcattacatttcatgccaattgacaagttttgccaattttaataagaaactaagctttatgtaatgtaacaccgtaatttatgaatttgttcattgtcactgcctttattcatgaaactgtcaaatagagtgtctttcaagggttgcaggatcttagagatagaaagtaccttggtgatcatctccagcctaaatttcatcatcccttctatggtattcccaacaaattatcatccaacctatacttaaaaacatatggtggccaggcatggtggctcacgcctgtaatgctagcactttgggaggccgaggtgggtgaagcacctgaggtcaagagttcgagatcagcctggccaacatggcgaaaccccgtctccactaaaaatgcaaaaaaaaaattaaccgggcgtggtggcaggcatctgtggtcccagctgcttgggaggcgctgaggcaggagaattgctcgaacccgggaggcagaggttgcagtgacccgggatcgtgccacttcactccagcctgggcaaaagagcaaaacgccatctcaaaaaatatacatatataaggagataaagtttcccattttccaatacagtttcacatttgaacagccctaattgatacaactttatggcagggttttagtgtgtgagtgggatccaaaacactcaatcctgtaaaagggtacagtcctattgtatgttaacacactgatgatgtgagcctgtgagatgagccaatcaccagttgttatgttcgaatctgctttgtgttgggacgctttaatgtcagggtttcactaaataaatgaattttcatatactgaa

SEQ ID NO: 420640 - DNA, 3585 bp, Homo sapiens
gtgctgagaggcgcgtactgtgcttgctttttgcagtacctgctgcggccgctttcggcatggaggaaatttatgcgaagtttgtgtcccagaaaatcagcaaaacccgctggcgaccgctgcctccgggaagtttacagaccgcggagacgttcgctacaggatcttgggacaatgaggaaaattatatttcactgtggtctattggagattttggaaacttggactctgatggagggtttgaaggagaccatcagttattgtgtgatatcagacaccatggtgatgtaatggatttacagttttttgaccaggaaagaattgtcgctgcttcatcaacaggatgtgtaacagttttccttcaccatccaaataaccagactctgtcagtcaaccagcagtggactacagctcactaccacacaggccctggcagtccttcctatagcagtgcaccatgtacaggtgttgtgtgcaacaacccagaaatcgttacagttggagaggatggtcgaataaatctcttcagagctgatcacaaggaagctgtaagaaccatagacaatgcagatagtagtacactccatgctgtaacctttcttcgaactcctgagattcttactgtaaattcaattggacagttgaaaatatgggatttcagacaacaaggaaatgagccttctcagatattgtcactgactggtgaccgagtgccactccactgtgttgatagacatcccaaccaacagcatgttgtagctactggtggccaagatggaatgttgagtatttgggatgttagacaaggtactatgcctgtatctctgctgaaggctcatgaagctgaaatgtgggaagttcactttcacccatccaacccagaacatctttttacctgctctgaagatggatccctctggcactgggatgcttccacagatgtacctgaaaagtcgtcactctttcaccaagcgtccaagagcaatgtaaaatgtaggggcagtaaaagataaacagaaaaactaaggggaaaaaaattctaaaacttcttcagaaaaattctggagcggagagcatgtgtggagcatgcatgcatgtccatgctataacttcatctacagagaaacaaacagtttcatctaaggattaactaagtatgtacttcgtttttacttccttcctcccctaaccgcacagtcttgaacttgcaagtttacttttaaggaaccttggttagactggaaataaaactttattctgtgtctactattgcaaggcacagtattagacactgtgaaaaagtaaaacatataaaatatgcatcctgctcttaagacatatttagtcatggacagaggcatggatagttcaattaggatataagaattgttataaagtagtaaattaatggtacatacaagtgctgagggttcaaggaaagagaaaaacatgaagtagaggttgtcttcaaagttttcttagagaaggaagttcagccatattttaaaggatcagcaagattttaaatgtactaatctttaagcttcaagacatagggacttggcacagagcacttagcacagagcctggcacatagtaggtactcagtcatttgttgagtgaattaaatttgtacttatttgatatgacagcaagttgagaggaaagtaagtgcgaataatgactaaaattgaaatatactgcctctgcctcactttattctatagtaagtacagtgcgctgttagagataaaaccttataatctagtagtgttctaatctgcttgtaagaacatttatctaaaaagcataagaatgaaagatttgaggtaaggcgattatattttaagaaatatagtaacaaatatatatttagaaatatatttctagaaatgttcatctagaaatatgtctagaaattctttctcatgatcattttattttgttattacccaagagtttatatttccatgtattacctacatttttggtttcttttttttctttccttattcaacttgtatgctggccgttttgctacctttctgagactttccattaaaagatgaacagaaagtcagttgaaatcacctgcttttcctgaagacttcgagtttggtatccatattatcccatggaaatttgaatatttaatatcactgaataagcctttggtccaaagtggtgatgtataataatggaattattagcctattattctgagaattaaacacattgatatcatcacctttctaaatatcagtagaagtttgaatgtttactaatataaaaatcatcttgaaagatttcttccttttctttttttctcccaggaggaagaagcagtacttttttgtctcatagcattagtaaccaagctaatgttcaccagtctgtcattagctcctggctcagcactgatcctgcaaaagaccgaattgaaatcacaagcttacttcccagtaggtctctgtctgtgaacactttggatgttttaggtccttgtcttgtttgtggaaccgatgcagaagcaatttatgttactagacatcttttttcgtagaagtactataattataagatttcagatagaacatgcaattagccttttgaaatccaacttctgtgcaaaattttagtatcagaaaatacgagatttgcaggggaaacatcagtaaactaccattaatgtcaatgcccagttttgacttttgttagcctgacactcccaaacagttgtagaatccgatagatgactgatggcaaaagattgtgaacatgtggaagaaaatcagtgggattctggtgctgatgaataggttgccttcagagtattattgacagacagcttgtggaactaattctttatttttgatgttgtgggaattaacacatcaatggtggttatgggaactaccaatgggttcctacaatttttatcagtagtatgtggcatatacaccttcctagtggcagttgccaatgttaatgattattctttttattgcaagtatttcctatgatccttccacactttatttccttaataataataaactttttcagaaagaattgagtagagcaaaaatgacaaagatgtgtagctgtgttcaattttttttttttttttttttgaggcagagtcttgctctgctggagtgcggtggtgcaatctcggctcactgcaacctccacctcccaggctgaggcaggagaattgctcgaacccgggaggcagaggttgcagtgacccgggatcgtgccacttcactccagcctgggcaaaagagcaaaacgccatctcaaaaaatatacatatataaggagataaagtttcccattttccaatacagtttcacatttgaacagccctaattgatacaactttatggcagggttttagtgtgtgagtgggatccaaaacactcaatcctgtaaaagggtacagtcctattgtatgttaacacactgatgatgtgagcctgtgagatgagccaatcaccagttgttatgttcgaatctgctttgtgttgggacgctttaatgtcagggtttcactaaataaatgaattttcatatactgaa

SEQ ID NO: 420641 - DNA, 1367 bp, Homo sapiens
ggtgatcatctccagcctaaatttcatcatcccttctatggtattcccaaggtgctggggttacaggcgtgagcacttagtatttgtaaccataagagaaagtatattttaacagcattacatttcatgccaattgacaagttttgccaattttaataagaaactaagctttatgtaatgtaacaccgtaatttatgaatttgttcattgtcactgcctttattcatgaaactgtcaaatagagtgtctttcaagggttgcaggatcttagagatagaaagtaccttggtgatcatctccagcctaaatttcatcatcccttctatggtcctcccaaaatgctgggattacaggcttgagccactgctcccggctgattttgtattagtagagacgacagggtttcaccatgttggccagggctggtctcgaactcctgaccacaggtaatcagcccgcctcggcctcccaaagtgctgggattacaggcgtgagccacttagtatttgtaaccataagagaaagtatattttaacagcattacatttcatgccaattgacaagttttgccaattttaataagaaactaagctttatgtaatgtaacaccgtaatttatgaatttgttcattgtcactgcctttattcatgaaactgtcaaatagagtgtctttcaagggttgcaggatcttagagatagaaagtaccttggtgatcatctccagcctaaatttcatcatcccttctatggtattcccaacaaattatcatccaacctatacttaaaaacatatggtggccaggcatggtggctcacgcctgtaatgctagcactttgggaggccgaggtgggtgaagcacctgaggtcaagagttcgagatcagcctggccaacatggcgaaaccccgtctccactaaaaatgcaaaaaaaaaattaaccgggcgtggtggcaggcatctgtggtcccagctgcttgggaggcgctgaggcaggagaattgctcgaacccgggaggcagaggttgcagtgacccgggatcgtgccacttcactccagcctgggcaaaagagcaaaacgccatctcaaaaaatatacatatataaggagataaagtttcccattttccaatacagtttcacatttgaacagccctaattgatacaactttatggcagggttttagtgtgtgagtgggatccaaaacactcaatcctgtaaaagggtacagtcctattgtatgttaacacactgatgatgtgagcctgtgagatgagccaatcaccagttgttatgttcgaatctgctttgtgttgggacgctttaatgtcagggtttcactaaataaatgaattttcatatactgaa

SEQ ID NO: 420642 - DNA, 3161 bp, Homo sapiens
gtgctgagaggcgcgtactgtgcttgctttttgcagtacctgctgcggccgctttcggcatggaggaaatttatgcgaagtttgtgtcccagaaaatcagcaaaacccgctggcgaccgctgcctccgggaagtttacagaccgcggagacgttcgctacaggatcttgggacaatgaggaaaattatatttcactgtggtctattggagattttggaaacttggactctgatggagggtttgaaggagaccatcagttattgtgtgatatcagacaccatggtgatgtaatggatttacagttttttgaccaggaaagaattgtcgctgcttcatcaacaggatgtgtaacagttttccttcaccatccaaataaccagactctgtcagtcaaccagcagtggactacagctcactaccacacaggccctggcagtccttcctatagcagtgcaccatgtacaggtgttgtgtgcaacaacccagaaatcgttacagttggagaggatggtcgaataaatctcttcagagctgatcacaaggaagctgtaagaaccatagacaatgcagatagtagtacactccatgctgtaacctttcttcgaactcctgagattcttactgtaaattcaattggacagttgaaaatatgggatttcagacaacaaggaaatgagccttctcagatattgtcactgactggtgaccgagtgccactccactgtgttgatagacatcccaaccaacagcatgttgtagctactggtggccaagatggaatgttgagtatttgggatgttagacaaggtactatgcctgtatctctgctgaaggctcatgaagctgaaatgtgggaagttcactttcacccatccaacccagaacatctttttacctgctctgaagatggatccctctggcactgggatgcttccacagatgtacctgaaaagtcgtcactctttcaccaagcgtccaagagcaatgtaaaatgtaggggcagtaaaagataaacagaaaaactaaggggaaaaaaattctaaaacttcttcagaaaaattctggagcggagagcatgtgtggagcatgcatgcatgtccatgctataacttcatctacagagaaacaaacagtttcatctaaggattaactaagtatgtacttcgtttttacttccttcctcccctaaccgcacagtcttgaacttgcaagtttacttttaaggaaccttggttagactggaaataaaactttattctgtgtctactattgcaaggcacagtattagacactgtgaaaaagtaaaacatataaaatatgcatcctgctcttaagacatatttagtcatggacagaggcatggatagttcaattaggatataagaattgttataaagtagtaaattaatggtacatacaagtgctgagggttcaaggaaagagaaaaacatgaagtagaggttgtcttcaaagttttcttagagaaggaagttcagccatattttaaaggatcagcaagattttaaatgtactaatctttaagcttcaagacatagggacttggcacagagcacttagcacagagcctggcacatagtaggtactcagtcatttgttgagtgaattaaatttgtacttatttgatatgacagcaagttgagaggaaagtaagtgcgaataatgactaaaattgaaatatactgcctctgcctcactttattctatagtaagtacagtgcgctgttagagataaaaccttataatctagtagtgttctaatctgcttgtaagaacatttatctaaaaagcataagaatgaaagatttgaggtaaggcgattatattttaagaaatatagtaacaaatatatatttagaaatatatttctagaaatgttcatctagaaatatgtctagaaattctttctcatgatcattttattttgttattacccaagagtttatatttccatgtattacctacatttttggtttcttttttttctttccttattcaacttgtatgctggccgttttgctacctttctgagactttccattaaaagatgaacagaaagtcagttgaaatcacctgcttttcctgaagacttcgagtttggtatccatattatcccatggaaatttgaatatttaatatcactgaataagcctttggtccaaagtggtgatgtataataatggaattattagcctattattctgagaattaaacacattgatatcatcacctttctaaatatcagtagaagtttgaatgtttactaatataaaaatcatcttgaaagatttcttccttttctttttttctcccaggaggaagaagcagtacttttttgtctcatagcattagtaaccaagctaatgttcaccagtctgtcattagctcctggctcagcactgatcctgcaaaagaccgaattgaaatcacaagcttacttcccagtaggtctctgtctgtgaacactttggatgttttaggtccttgtcttgtttgtggaaccgatgcagaagcaatttatgttactagacatcttttttcgtagaagtactataattataagatttcagatagaacatgcaattagccttttgaaatccaacttctgtgcaaaattttagtatcagaaaatacgagatttgcaggggaaacatcagtaaactaccattaatgtcaatgcccagttttgacttttgttagcctgacactcccaaacagttgtagaatccgatagatgactgatggcaaaagattgtgaacatgtggaagaaaatcagtgggattctggtgctgatgaataggttgccttcagagtattattgacagacagcttgtggaactaattctttatttttgatgttgtgggaattaacacatcaatggtggttatgggaactaccaatgggttcctacaatttttatcagtagtatgtggcatatacaccttcctagtggcagttgccaatgttaatgattattctttttattgcaagtatttcctatgatccttccacacctggccttttttttgagacagagtcttactcagtcacccagaatggaggcagaggttgcagtgagccaagattgtgccatttcactccagcccgggtgacacagtgcaagactccgtcttaccaaaa

SEQ ID NO: 420643 - DNA, 2985 bp, Homo sapiens
gtgctgagaggcgcgtactgtgcttgctttttgcagtacctgctgcggccgctttcggcatggaggaaatttatgcgaagtttgtgtcccagaaaatcagcaaaacccgctggcgaccgctgcctccgggaagtttacagaccgcggagacgttcgctacaggatcttgggacaatgaggaaaattatatttcactgtggtctattggagattttggaaacttggactctgatggagggtttgaaggagaccatcagttattgtgtgatatcagacaccatggtgatgtaatggatttacagttttttgaccaggaaagaattgtcgctgcttcatcaacaggatgtgtaacagttttccttcaccatccaaataaccagactctgtcagtcaaccagcagtggactacagctcactaccacacaggccctggcagtccttcctatagcagtgcaccatgtacaggtgttgtgtgcaacaacccagaaatcgttacagttggagaggatggtcgaataaatctcttcagagctgatcacaaggaagctgtaagaaccatagacaatgcagatagtagtacactccatgctgtaacctttcttcgaactcctgagattcttactgtaaattcaattggacagttgaaaatatgggatttcagacaacaaggaaatgagccttctcagatattgtcactgactggtgaccgagtgccactccactgtgttgatagacatcccaaccaacagcatgttgtagctactggtggccaagatggaatgttgagtatttgggatgttagacaaggtactatgcctgtatctctgctgaaggctcatgaagctgaaatgtgggaagttcactttcacccatccaacccagaacatctttttacctgctctgaagatggatccctctggcactgggatgcttccacagatgtacctgaaaagtcgtcactctttcaccaaggaggaagaagcagtacttttttgtctcatagcattagtaaccaagctaatgttcaccagtctgtcattagctcctggctcagcactgatcctgcaaaagaccgaattgaaatcacaagcttacttcccagtaggtctctgtctgtgaacactttggatgttttaggtccttgtcttgtttgtggaaccgatgcagaagcaatttatgttactagacatcttttttcgtagaagtactataattataagatttcagatagaacatgcaattagccttttgaaatccaacttctgtgcaaaattttagtatcagaaaatacgagatttgcaggggaaacatcagtaaactaccattaatgtcaatgcccagttttgacttttgttagcctgacactcccaaacagttgtagaatccgatagatgactgatggcaaaagattgtgaacatgtggaagaaaatcagtgggattctggtgctgatgaataggttgccttcagagtattattgacagacagcttgtggaactaattctttatttttgatgttgtgggaattaacacatcaatggtggttatgggaactaccaatgggttcctacaatttttatcagtagtatgtggcatatacaccttcctagtggcagttgccaatgttaatgattattctttttattgcaagtatttcctatgatccttccacactttatttccttaataataataaactttttcagaaagaattgagtagagcaaaaatgacaaagatgtgtagctgtgttcaattttttttttttttttttttgaggcagagtcttgctctgctggagtgcggtggtgcaatctcggctcactgcaacctccacctcccaggttcaagcaattctcctgcctcagtctcctgagtagctggaactacaggtgtgcgccaccacgcccagctaatttttgtaattttagtagagacagagtttcaccatgttggccaggatggtctcgatctcttgacctcatgatccacccgcctcgacctcccaaagtgctgtgattacaggtgtgagccactgcacccggcctgaaatttttttaaggtgaaaatgttttgacaagttcctttttcagaataggtttttgagcagaactctttcagcttgttagacccaactttgcttttgtttagcttcacagcatagctgaaagttgccaaactggacattgtgcaataaagtagaattctatattgataagcaaactatttccaaactaaaaatgtgatagataaaagtgtgattaatcaaatgatatgatcagagtaaagaattttgccattttgatccttttactttgttttagccacctatagtgttaccaaccatctttatccttgtctgcagggataataatgaactaatgtagtgttttaagataatttaatgatactatctttccaaactttgttagattttaaatgtattattgacctgagaccttaatgacaaatcactgctattagacaattgaagtgttcatttactttgtaattccaataatcatagttatggaattatggtaaggttttgcttttctgtcctaataaatatgtatattttttgagatggagttttgctcttgttgctgaggcaggagaattgctcgaacccgggaggcagaggttgcagtgacccgggatcgtgccacttcactccagcctgggcaaaagagcaaaacgccatctcaaaaaatatacatatataaggagataaagtttcccattttccaatacagtttcacatttgaacagccctaattgatacaactttatggcagggttttagtgtgtgagtgggatccaaaacactcaatcctgtaaaagggtacagtcctattgtatgttaacacactgatgatgtgagcctgtgagatgagccaatcaccagttgttatgttcgaatctgctttgtgttgggacgctttaatgtcagggtttcactaaataaatgaattttcatatactgaa

SEQ ID NO: 420644 - DNA, 3128 bp, Homo sapiens
agggcgggggaggcgtgtggcccagccgcccgcccctgtggctgctaccgctgccaggggactgcagggaggccgggctgagtcagcgccacttccgctgctgcgtgtccctttctgaggcctcggaccgcaccgctttcgccctgcggcccggctcggtagcctgatcagtcgcgttcccggctgtgtctccggtcaccgagcgggacggcgggatggcggggtcgatctgtgcagacgctgctagtggttccgcagtcgtcgctgggtcagctgtttcgagcggcggatctgctcctatagatgtccagattgttagacggaaaattatatttcactgtggtctattggagattttggaaacttggactctgatggagggtttgaaggagaccatcagttattgtgtgatatcagacaccatggtgatgtaatggatttacagttttttgaccaggaaagaattgtcgctgcttcatcaacaggatgtgtaacagttttccttcaccatccaaataaccagactctgtcagtcaaccagcagtggactacagctcactaccacacaggccctggcagtccttcctatagcagtgcaccatgtacaggtgttgtgtgcaacaacccagaaatcgttacagttggagaggatggtcgaataaatctcttcagagctgatcacaaggaagctgtaagaaccatagacaatgcagatagtagtacactccatgctgtaacctttcttcgaactcctgagattcttactgtaaattcaattggacagttgaaaatatgggatttcagacaacaaggaaatgagccttctcagatattgtcactgactggtgaccgagtgccactccactgtgttgatagacatcccaaccaacagcatgttgtagctactggtggccaagatggaatgttgagtatttgggatgttagacaaggtactatgcctgtatctctgctgaaggctcatgaagctgaaatgtgggaagttcactttcacccatccaacccagaacatctttttacctgctctgaagatggatccctctggcactgggatgcttccacagatgtacctgaaaagtcgtcactctttcaccaaggaggaagaagcagtacttttttgtctcatagcattagtaaccaagctaatgttcaccagtctgtcattagctcctggctcagcactgatcctgcaaaagaccgaattgaaatcacaagcttacttcccagtaggtctctgtctgtgaacactttggatgttttaggtccttgtcttgtttgtggaaccgatgcagaagcaatttatgttactagacatcttttttcgtagaagtactataattataagatttcagatagaacatgcaattagccttttgaaatccaacttctgtgcaaaattttagtatcagaaaatacgagatttgcaggggaaacatcagtaaactaccattaatgtcaatgcccagttttgacttttgttagcctgacactcccaaacagttgtagaatccgatagatgactgatggcaaaagattgtgaacatgtggaagaaaatcagtgggattctggtgctgatgaataggttgccttcagagtattattgacagacagcttgtggaactaattctttatttttgatgttgtgggaattaacacatcaatggtggttatgggaactaccaatgggttcctacaatttttatcagtagtatgtggcatatacaccttcctagtggcagttgccaatgttaatgattattctttttattgcaagtatttcctatgatccttccacactttatttccttaataataataaactttttcagaaagaattgagtagagcaaaaatgacaaagatgtgtagctgtgttcaattttttttttttttttttttgaggcagagtcttgctctgctggagtgcggtggtgcaatctcggctcactgcaacctccacctcccaggttcaagcaattctcctgcctcagtctcctgagtagctggaactacaggtgtgcgccaccacgcccagctaatttttgtaattttagtagagacagagtttcaccatgttggccaggatggtctcgatctcttgacctcatgatccacccgcctcgacctcccaaagtgctgtgattacaggtgtgagccactgcacccggcctgaaatttttttaaggtgaaaatgttttgacaagttcctttttcagaataggtttttgagcagaactctttcagcttgttagacccaactttgcttttgtttagcttcacagcatagctgaaagttgccaaactggacattgtgcaataaagtagaattctatattgataagcaaactatttccaaactaaaaatgtgatagataaaagtgtgattaatcaaatgatatgatcagagtaaagaattttgccattttgatccttttactttgttttagccacctatagtgttaccaaccatctttatccttgtctgcagggataataatgaactaatgtagtgttttaagataatttaatgatactatctttccaaactttgttagattttaaatgtattattgacctgagaccttaatgacaaatcactgctattagacaattgaagtgttcatttactttgtaattccaataatcatagttatggaattatggtaaggttttgcttttctgtcctaataaatatgtatattttttgagatggagttttgctcttgttgctgaggcaggagaattgctcgaacccgggaggcagaggttgcagtgacccgggatcgtgccacttcactccagcctgggcaaaagagcaaaacgccatctcaaaaaatatacatatataaggagataaagtttcccattttccaatacagtttcacatttgaacagccctaattgatacaactttatggcagggttttagtgtgtgagtgggatccaaaacactcaatcctgtaaaagggtacagtcctattgtatgttaacacactgatgatgtgagcctgtgagatgagccaatcaccagttgttatgttcgaatctgctttgtgttgggacgctttaatgtcagggtttcactaaataaatgaattttcatatactgaa

SEQ ID NO: 420645 - DNA, 3704 bp, Homo sapiens
gtgctgagaggcgcgtactgtgcttgctttttgcagtacctgctgcggccgctttcggcatggaggaaatttatgcgaagtttgtgtcccagaaaatcagcaaaacccgctggcgaccgctgcctccgggaagtttacagaccgcggagacgttcgctacaggatcttgggacaatgaggaaaattatatttcactgtggtctattggagattttggaaacttggactctgatggagggtttgaaggagaccatcagttattgtgtgatatcagacaccatggtgatgtaatggatttacagttttttgaccaggaaagaattgtcgctgcttcatcaacaggatgtgtaacagttttccttcaccatccaaataaccagactctgtcagtcaaccagcagtggactacagctcactaccacacaggccctggcagtccttcctatagcagtgcaccatgtacaggtgttgtgtgcaacaacccagaaatcgttacagttggagaggatggtcgaataaatctcttcagagctgatcacaaggaagctgtaagaaccatagacaatgcagatagtagtacactccatgctgtaacctttcttcgaactcctgagattcttactgtaaattcaattggacagttgaaaatatgggatttcagacaacaaggaaatgagccttctcagatattgtcactgactggtgaccgagtgccactccactgtgttgatagacatcccaaccaacagcatgttgtagctactggtggccaagatggaatgttgagtatttgggatgttagacaaggtactatgcctgtatctctgctgaaggctcatgaagctgaaatgtgggaagttcactttcacccatccaacccagaacatctttttacctgctctgaagatggatccctctggcactgggatgcttccacagatgtacctgaaaagtcgtcactctttcaccaagcgtccaagagcaatgtaaaatgtaggggcagtaaaagataaacagaaaaactaaggggaaaaaaattctaaaacttcttcagaaaaattctggagcggagagcatgtgtggagcatgcatgcatgtccatgctataacttcatctacagagaaacaaacagtttcatctaaggattaactaagtatgtacttcgtttttacttccttcctcccctaaccgcacagtcttgaacttgcaagtttacttttaaggaaccttggttagactggaaataaaactttattctgtgtctactattgcaaggcacagtattagacactgtgaaaaagtaaaacatataaaatatgcatcctgctcttaagacatatttagtcatggacagaggcatggatagttcaattaggatataagaattgttataaagtagtaaattaatggtacatacaagtgctgagggttcaaggaaagagaaaaacatgaagtagaggttgtcttcaaagttttcttagagaaggaagttcagccatattttaaaggatcagcaagattttaaatgtactaatctttaagcttcaagacatagggacttggcacagagcacttagcacagagcctggcacatagtaggtactcagtcatttgttgagtgaattaaatttgtacttatttgatatgacagcaagttgagaggaaagtaagtgcgaataatgactaaaattgaaatatactgcctctgcctcactttattctatagtaagtacagtgcgctgttagagataaaaccttataatctagtagtgttctaatctgcttgtaagaacatttatctaaaaagcataagaatgaaagatttgaggtaaggcgattatattttaagaaatatagtaacaaatatatatttagaaatatatttctagaaatgttcatctagaaatatgtctagaaattctttctcatgatcattttattttgttattacccaagagtttatatttccatgtattacctacatttttggtttcttttttttctttccttattcaacttgtatgctggccgttttgctacctttctgagactttccattaaaagatgaacagaaagtcagttgaaatcacctgcttttcctgaagacttcgagtttggtatccatattatcccatggaaatttgaatatttaatatcactgaataagcctttggtccaaagtggtgatgtataataatggaattattagcctattattctgagaattaaacacattgatatcatcacctttctaaatatcagtagaagtttgaatgtttactaatataaaaatcatcttgaaagatttcttccttttctttttttctcccaggaggaagaagcagtacttttttgtctcatagcattagtaaccaagctaatgttcaccagtctgtcattagctcctggctcagcactgatcctgcaaaagaccgaattgaaatcacaagcttacttcccagtaggtctctgtctgtgaacactttggatgttttaggtccttgtcttgtttgtggaaccgatgcagaagcaatttatgttactagacatcttttttcgtagaagtactataattataagatttcagatagaacatgcaattagccttttgaaatccaacttctgtgcaaaattttagtatcagaaaatacgagatttgcaggggaaacatcagtaaactaccattaatgtcaatgcccagttttgacttttgttagcctgacactcccaaacagttgtagaatccgatagatgactgatggcaaaagattgtgaacatgtggaagaaaatcagtgggattctggtgctgatgaataggttgccttcagagtattattgacagacagcttgtggaactaattctttatttttgatgttgtgggaattaacacatcaatggtggttatgggaactaccaatgggttcctacaatttttatcagtagtatgtggcatatacaccttcctagtggcagttgccaatgttaatgattattctttttattgcaagtatttcctatgatccttccacactttatttccttaataataataaactttttcagaaagaattgagtagagcaaaaatgacaaagatgtgtagctgtgttcaattttttttttttttttttttgaggcagagtcttgctctgctggagtgcggtggtgcaatctcggctcactgcaacctccacctcccaggttcaagcaattctcctgcctcagtctcctgagtagctggaactacaggtgtgcgccaccacgcccagctaatttttgtaattttagtagagacagagtttcaccatgttggccaggatggtctcgatctcttgacctcatgatccacccgcctcgacctcccaaagtgctgtgattacaggtgtgactccagcctgggcaaaagagcaaaacgccatctcaaaaaatatacatatataaggagataaagtttcccattttccaatacagtttcacatttgaacagccctaattgatacaactttatggcagggttttagtgtgtgagtgggatccaaaacactcaatcctgtaaaagggtacagtcctattgtatgttaacacactgatgatgtgagcctgtgagatgagccaatcaccagttgttatgttcgaatctgctttgtgttgggacgctttaatgtcagggtttcactaaataaatgaattttcatatactgaa

SEQ ID NO: 420646 - DNA, 1010 bp, Homo sapiens
gtgctgagaggcgcgtactgtgcttgctttttgcagtacctgctgcggccgctttcggcatggaggaaatttatgcgaagtttgtgtcccagaaaatcagcaaaacccgctggcgaccgctgcctccgggaagtttacagaccgcggagacgttcgctacaggatcttgggacaatgaggaaaattatatttcactgtggtctattggagattttggaaacttggactctgatggagggtttgaaggagaccatcagttattgtgtgatatcagacaccatggtgatgtaatggatttacagttttttgaccaggaaagaattgtcgctgcttcatcaacaggatgtgtaacagttttccttcaccatccaaataaccagactctgtcagtcaaccagcagtggactacagctcactaccacacaggccctggcagtccttcctatagcagtgcaccatgtacaggtgttgtgtgcaacaacccagaaatcgttacagttggagaggatggtcgaataaatctcttcagagctgatcacaaggaagctgtaagaaccatagacaatgcagatagtagtacactccatgctgtaacctttcttcgaactcctgagattcttactgtaaattcaattggacagttgaaaatatgggatttcagacaacaaggaaatgagccttctcagatattgtcactgactggtgaccgagtgccactccactgtgttgatagacatcccaaccaacagcatgttgtagctactggtggccaagatggaatgttgagtatttgggatgttagacaaggtactatgcctgtatctctgctgaaggctcatgaagctgaaatgtgggaagttcactttcacccatccaacccagaacatctttttacctgctctgaagatggatccctctggcactgggatgcttccacagatgtacctgaaaagtcgtcactctttcaccaaggtaaaactttttaatgaatactgttatgtgtacttttt

SEQ ID NO: 420647 - DNA, 5298 bp, Homo sapiens
gtcagctgatagagatgtcttggacatgctctggctggctaatctccatgttctagccgactgaaaatacggtggccaagtggatggtgtgcttatttgcagtctaaagaaatttccttttgatgtggcagaaaatcgaggatgtggagtggagaccccagacttacttggagctggagggtctgccttgcatcctgatcttcagtgggatggacccgcatggggagtccttgccgaggtctttgaggtactgtgacctgcgattgataaactcctcctgcttggtgagaacagccttggagcaggagctgggcctggctgcctactttgtgagcaacgaggttcccttggagaagggggctaggaacgaggccttggagagtgatgctgagaagctgagcagcacagacaacgaggatgaggagctggggacagaaggctctacctcggagaagagaagccccatgaaaagggagaggtcccgctcccacgactcagcatcctcatccctctcctccaaggcttccggttcagcgctcggtggcgagtcctcggctcagcccacagcactcccccagggagagcatgccaggtcgccccagccccgtggccccgcagaggagggcagagcccctggtgagaaacagaggccccgggcaagtcaggggccaccctcggccatcagcaggcacagtcccgggccgacgccccagcccgactgtagcctcaggaccggccagaggagcgtccaggtgtcggtcacctcgtcgtgctcccagctgtcctcctcctcgggctcatcctcctcatccgtggcgcccgctgccggcacgtgggtcctgcaggcctcccagtgctccttgaccaaggcctgccgccagccacccattgtcttcttgcccaagctcgtgtacgacatggttgtgtccactgacagcagtggcctgcccaaggccgcctccctcctgccctccccctcggtcatgtgggccagctctttccgccccctgctcagcaagaccatgacatccaccgagcagtccctctactaccggcagtggacggtgccccggcccagccacatggactacggcaaccgggccgagggccgcgtggacggcttccacccccgcaggctgctgctcagcggcccccctcagatcgggaagacaggtgcctacctgcagttcctcagtgtcctgtccaggatgcttgttcggctcacagaagtggatgtctatgacgaggaggagatcaatatcaacctcagagaagaatctgactggcattatctccagcttagcgacccctggccagacctggagctgttcaagaagttgccctttgactacatcattcacgacccgaagtatgaagatgccagcctgatttgttcgcactatcagggtataaagagtgaagacagagggatgtcccggaagccggaggacctttatgtgcggcgtcagacggcacggatgagactgtccaagtacgcagcgtacaacacttaccaccactgtgagcagtgccaccagtacatgggcttccacccccgctaccagctgtatgagtccaccctgcacgcctttgccttctcttactccatgctaggagaggagatccagctgcacttcatcatccccaagtccaaggagcaccactttgtcttcagccaacctggaggccagctggagagcatgcgactacccctcgtgacagacaagagccatgaatatataaaaagtccgacattcactccaaccaccggccgtcacgaacatgggctctttaatctgtaccacgcaatggacggtgccagccatttgcacgtgctggttgtcaaggaatacgagatggcaatttataagaaatattggcccaaccacatcatgctggtgctccccagtatcttcaacagtgctggagttggtgctgctcatttcctcatcaaggagctgtcctaccataacctggagctcgagcggaaccggcaggaggagctgggaatcaagccgcaggacatctggcctttcattgtgatctctgatgactcctgcgtgatgtggaacgtggtggatgtcaactctgctggggagagaagcagggagttctcctggtcggaaaggaacgtgtctttgaagcacatcatgcagcacatcgaggcggcccccgacatcatgcactacgccctgctgggcctgcggaagtggtccagcaagacccgggccagcgaggtgcaagagcccttctcccgctgccacgtgcacaacttcatcatcctgaacgtggacctgacccagaacgtgcagtacaaccagaaccggttcctgtgtgacgatgtagacttcaacctgcgggtgcacagcgccggcctcctgctctgccggttcaaccgcttcagcgtgatgaagaagcagatcgtggtgggcggccacaggtccttccacatcacatccaaggtgtctgataactctgccgcggtcgtgccggcccagtacatctgtgccccggacagcaagcacacgttcctcgcagcgcccgcccagctcctgctggagaagttcctgcagcaccacagccacctcttcttcccgctgtccctgaagaaccatgaccacccagtgctgtctgtcgactgttacctgaacctgggatctcagatttctgtttgctatgtgagctccaggccccactctttaaacatcagctgctcggacttgctgttcagtgggctgctgctgtacctctgtgactcttttgtgggagctagctttttgaaaaagtttcattttctgaaaggtgcgacgttgtgtgtcatctgtcaggaccggagctcactgcgccagacggtcgtccgcctggagctcgaggacgagtggcagttccggctgcgcgatgagttccagaccgccaatgccagggaagaccggccgctcttttttctgacgggacgacacatctgaggaagacagcggcgagttttctgaagagatgagtgctcagagccctcatgctgttgaggctaaagggaggcctggaacggtggggcgtttgactggaatggaccccagggactgtccaggtgcagcccctcctagtacacatgggcccccgaggccgtggtcctgggagccaggaagactccgcagtgggtgagaatgaaaacttgagactcccaagttctgggccagcccattgctctgggctgttttaaagcccatttcacgaggaacaaagatttacttcctgtcctgccattcgtgtgcttccatggacaaacctgatttttttctcttagttctaaagaatcttgggttattttgtagcggtgccagtatttcagtagatgggatttcagccaagtaggttcccctgtaacctcctacaaagcaatattccaaaggaacattttaactgtaaaggctggagacaagaaaaaataagtagatcgttttaataacaattatttaattgcctataagtttgctgtttcagaggctagcccaaaggcatcaaatttaataaagttaaacaaattgatttacttcagagcaaatatgatcctattaaaataatatagggtaaataccctacctcttagaaagggcaaaaatgcaaagaagctttctttaaaactaaaagggttttttggggggggagttggcggggaggaaataaggctaacagaggttgacctaaaattagccttacaaaggagaaaggaccacattgcttacttgaaacagacaatgaaaacaaccaaagtgatatataaaatagttgatgagaactagacttatgactgtagtttactagagtttagttttcagttgctgaagtagctcattttctcttactaatgtttggttcctcagggaagaatctcacttgactagagaggaggtgggaacagaagagagaaggaggcagggagatgtatttcttagggctcaccccttcacagactgacagaatggttttgttttgttttgttttgttttgttttgtttttgagatggactctagctctgtcacccaggctggagtgcagtggtgcgatctcggctcactgcaagctccgcctcccgggttctcaccattctcctgcctcagcctcccgagtagctgggactacaggcgcccaccaccacgcccggctaattttttgtattttttagtagagacggggtttcaccatgttagccaggatggtctcgatctcctgacctcgtgatccgcccgcctcggcctcccaaagtgctgggattacaggcgtgagccaccgtgcctgccccagaatggtttttaaagccacagttgagaggccacccattgcccggcgcctggacagtgatcatcttgttcatcttgttcagtcctttcttgtgtgattggaattattcatcccctttgaaagatgagaaggttgagatgcaaagagtctacctttccaagttctcactgctggaaagagctagaagcacagttcaaagttctggcttctggactctgcagtccaggtctcccttctcccacttgcctaccctcaatgccacactgtttttgaagtggcccataacttgaaggaaaagtttaaagacagttcaatttaatcatcagaatgcattcttttttttttcggagacggagtttcactcttgctgcccaggctggagtgcaatggtgcaatgatctcggctcactgcaacctctgcctcctgggttcaagtgattctccagcctcagcctcccgagtagctgggattatgggcgcccaccaccatgcccagctaatttttgtattttttttttttagtagagatggggtttcgccaggttggccaggctggtcttgtgaactcctggcctcaggtgatctgcccacctcatcctccaaaagtgctgggattacaggcatgagccactgcgcctggcctcagaatgcattcttacacatctatcctagacatttataagcactctaatggataacaatccaagaataaatgattgtaaaagatgatgccgaagagttgatgtcaatctttttttcctaagaaaaaaagtccgcgagtattaaatatttagatcaatgtttataaaatgattactttgtatatctcattattcctattttggaataaaaactgaccttctttaatcatatacttgtcttttgtaaatagcagcttttgtgtcattctccccactttattagttaatttaaattggaaaaaaccctcaaactaatattcttgtctgttccagtcttataaataaaacttataatgcatg

SEQ ID NO: 420648 - DNA, 3899 bp, Homo sapiens
tgagatggagtctcgttctgtcatccaggctggagtgcaacggcatgatctcgactcactgcagcctttgtcttacgggttcaagcgattctcctgcctcagctacccgagtagctggaattacaggcgccagccatgacgcccggctaatttttgtgtttttgtagagacggggtttcaccatgttggccaggctggtcttaaactcctgacctcaggtgactggcctgcctcggccccccaaactgctgggattataggcgtgagccactgcgcctggccaaattgatattttcaatggttagagaagaaagcataagaaagcaaatttgtgttccacctggagaggagtgttttcctccctgtagttttctctccctagcccatgggctgtgttttgtgacaggtgattcatgtcaggaaggtcggggctggcttgtctgggcggccccgacagcaggtctgcctggggtctgtctgctgtgggtgtgggtgcaggtcagtcctgagtccaggtgctttgcccactgcaggtgctgctcatttcctcatcaaggagctgtcctaccataacctggagctcgagcggaaccggcaggaggagctgggaatcaagccgcaggacatctggcctttcattgtgatctctgatgactcctgcgtgatgtggaacgtggtggatgtcaactctgctggggagagaagcagggagttctcctggtcggaaaggaacgtgtctttgaagcacatcatgcagcacatcgaggcggcccccgacatcatgcactacgccctgctgggcctgcggaagtggtccagcaagacccgggccagcgaggtgcaagagcccttctcccgctgccacgtgcacaacttcatcatcctgaacgtggacctgacccagaacgtgcagtacaaccagaaccggttcctgtgtgacgatgtagacttcaacctgcgggtgcacagcgccggcctcctgctctgccggttcaaccgcttcagcgtgatgaagaagcagatcgtggtgggcggccacaggtccttccacatcacatccaaggtgtctgataactctgccgcggtcgtgccggcccagtacatctgtgccccggacagcaagcacacgttcctcgcagcgcccgcccagctcctgctggagaagttcctgcagcaccacagccacctcttcttcccgctgtccctgaagaaccatgaccacccagtgctgtctgtcgactgttacctgaacctgggatctcagatttctgtttgctatgtgagctccaggccccactctttaaacatcagctgctcggacttgctgttcagtgggctgctgctgtacctctgtgactcttttgtgggagctagctttttgaaaaagtttcattttctgaaaggtgcgacgttgtgtgtcatctgtcaggaccggagctcactgcgccagacggtcgtccgcctggagctcgaggacgagtggcagttccggctgcgcgatgagttccagaccgccaatgccagggaagaccggccgctcttttttctgacgggacgacacatctgaggaagacagcggcgagttttctgaagagatgagtgctcagagccctcatgctgttgaggctaaagggaggcctggaacggtggggcgtttgactggaatggaccccagggactgtccaggtgcagcccctcctagtacacatgggcccccgaggccgtggtcctgggagccaggaagactccgcagtgggtgagaatgaaaacttgagactcccaagttctgggccagcccattgctctgggctgttttaaagcccatttcacgaggaacaaagatttacttcctgtcctgccattcgtgtgcttccatggacaaacctgatttttttctcttagttctaaagaatcttgggttattttgtagcggtgccagtatttcagtagatgggatttcagccaagtaggttcccctgtaacctcctacaaagcaatattccaaaggaacattttaactgtaaaggctggagacaagaaaaaataagtagatcgttttaataacaattatttaattgcctataagtttgctgtttcagaggctagcccaaaggcatcaaatttaataaagttaaacaaattgatttacttcagagcaaatatgatcctattaaaataatatagggtaaataccctacctcttagaaagggcaaaaatgcaaagaagctttctttaaaactaaaagggttttttggggggggagttggcggggaggaaataaggctaacagaggttgacctaaaattagccttacaaaggagaaaggaccacattgcttacttgaaacagacaatgaaaacaaccaaagtgatatataaaatagttgatgagaactagacttatgactgtagtttactagagtttagttttcagttgctgaagtagctcattttctcttactaatgtttggttcctcagggaagaatctcacttgactagagaggaggtgggaacagaagagagaaggaggcagggagatgtatttcttagggctcaccccttcacagactgacagaatggttttgttttgttttgttttgttttgttttgtttttgagatggactctagctctgtcacccaggctggagtgcagtggtgcgatctcggctcactgcaagctccgcctcccgggttctcaccattctcctgcctcagcctcccgagtagctgggactacaggcgcccaccaccacgcccggctaattttttgtattttttagtagagacggggtttcaccatgttagccaggatggtctcgatctcctgacctcgtgatccgcccgcctcggcctcccaaagtgctgggattacaggcgtgagccaccgtgcctgccccagaatggtttttaaagccacagttgagaggccacccattgcccggcgcctggacagtgatcatcttgttcatcttgttcagtcctttcttgtgtgattggaattattcatcccctttgaaagatgagaaggttgagatgcaaagagtctacctttccaagttctcactgctggaaagagctagaagcacagttcaaagttctggcttctggactctgcagtccaggtctcccttctcccacttgcctaccctcaatgccacactgtttttgaagtggcccataacttgaaggaaaagtttaaagacagttcaatttaatcatcagaatgcattcttttttttttcggagacggagtttcactcttgctgcccaggctggagtgcaatggtgcaatgatctcggctcactgcaacctctgcctcctgggttcaagtgattctccagcctcagcctcccgagtagctgggattatgggcgcccaccaccatgcccagctaatttttgtattttttttttttagtagagatggggtttcgccaggttggccaggctggtcttgtgaactcctggcctcaggtgatctgcccacctcatcctccaaaagtgctgggattacaggcatgagccactgcgcctggcctcagaatgcattcttacacatctatcctagacatttataagcactctaatggataacaatccaagaataaatgattgtaaaagatgatgccgaagagttgatgtcaatctttttttcctaagaaaaaaagtccgcgagtattaaatatttagatcaatgtttataaaatgattactttgtatatctcattattcctattttggaataaaaactgaccttctttaatcatatacttgtcttttgtaaatagcagcttttgtgtcattctccccactttattagttaatttaaattggaaaaaaccctcaaactaatattcttgtctgttccagtcttataaataaaacttataatgcatg

SEQ ID NO: 420649 - DNA, 1693 bp, Homo sapiens
gtcagctgatagagatgtcttggacatgctctggctggctaatctccatgttctagccgactgaaaatacggtggccaagtggatggtgtgcttatttgcagtctaaagaaatttccttttgatgtggcagaaaatcgaggatgtggagtggagaccccagacttacttggagctggagggtctgccttgcatcctgatcttcagtgggatggacccgcatggggagtccttgccgaggtctttgaggtactgtgacctgcgattgataaactcctcctgcttggtgagaacagccttggagcaggagctgggcctggctgcctactttgtgagcaacgaggttcccttggagaagggggctaggaacgaggccttggagagtgatgctgagaagctgagcagcacagacaacgaggatgaggagctggggacagaaggctctacctcggagaagagaagccccatgaaaagggagaggtcccgctcccacgactcagcatcctcatccctctcctccaaggcttccggttcagcgctcggtggcgagtcctcggctcagcccacagcactcccccagggagagcatgccaggtcgccccagccccgtggccccgcagaggagggcagagcccctggtgagaaacagaggccccgggcaagtcaggggccaccctcggccatcagcaggcacagtcccgggccgacgccccagcccgactgtagcctcaggaccggccagaggagcgtccaggtgtcggtcacctcgtcgtgctcccagctgtcctcctcctcgggctcatcctcctcatccgtggcgcccgctgccggcacgtgggtcctgcaggcctcccagtgctccttgaccaaggcctgccgccagccacccattgtcttcttgcccaagctcgtgtacgacatggttgtgtccactgacagcagtggcctgcccaaggccgcctccctcctgccctccccctcggtcatgtgggccagctctttccgccccctgctcagcaagaccatgacatccaccgagcagtccctctactaccggcagtggacggtgccccggcccagccacatggactacggcaaccgggccgagggccgcgtggacggcttccacccccgcaggctgctgctcagcggcccccctcagatcgggaagacaggtgcctacctgcagttcctcagtgtcctgtccaggatgcttgttcggctcacagaagtggatgtctatgacgaggaggagatcaatatcagcctcaggtgatctgcccacctcatcctccaaaagtgctgggattacaggcatgagccactgcgcctggcctcagaatgcattcttacacatctatcctagacatttataagcactctaatggataacaatccaagaataaatgattgtaaaagatgatgccgaagagttgatgtcaatctttttttcctaagaaaaaaagtccgcgagtattaaatatttagatcaatgtttataaaatgattactttgtatatctcattattcctattttggaataaaaactgaccttctttaatcatatacttgtcttttgtaaatagcagcttttgtgtcattctccccactttattagttaatttaaattggaaaaaaccctcaaactaatattcttgtctgttccagtcttataaataaaacttataatgcatg

SEQ ID NO: 420650 - DNA, 2085 bp, Homo sapiens
  misc_feature (2083)..(2084): n is a, c, g, or t
gtcagctgatagagatgtcttggacatgctctggctggctaatctccatgttctagccgactgaaaatacggtggccaagtggatggtgtgcttatttgcagtctaaagaaatttccttttgatgtggcagaaaatcgaggatgtggagtggagaccccagacttacttggagctggagggtctgccttgcatcctgatcttcagtgggatggacccgcatggggagtccttgccgaggtctttgaggtactgtgacctgcgattgataaactcctcctgcttggtgagaacagccttggagcaggagctgggcctggctgcctactttgtgagcaacgaggttcccttggagaagggggctaggaacgaggccttggagagtgatgctgagaagctgagcagcacagacaacgaggatgaggagctggggacagaaggctctacctcggagaagagaagccccatgaaaagggagaggtcccgctcccacgactcagcatcctcatccctctcctccaaggcttccggttcagcgctcggtggcgagtcctcggctcagcccacagcactcccccagggagagcatgccaggtcgccccagccccgtggccccgcagaggagggcagagcccctggtgagaaacagaggccccgggcaagtcaggggccaccctcggccatcagcaggcacagtcccgggccgacgccccagcccgactgtagcctcaggaccggccagaggagcgtccaggtgtcggtcacctcgtcgtgctcccagctgtcctcctcctcgggctcatcctcctcatccgtggcgcccgctgccggcacgtgggtcctgcaggcctcccagtgctccttgaccaaggcctgccgccagccacccattgtcttcttgcccaagctcgtgtacgacatggttgtgtccactgacagcagtggcctgcccaaggccgcctccctcctgccctccccctcggtcatgtgggccagctctttccgccccctgctcagcaagaccatgacatccaccgagcagtccctctactaccggcagtggacggtgccccggcccagccacatggactacggcaaccgggccgagggccgcgtggacggcttccacccccgcaggctgctgctcagcggcccccctcagatcgggaagacaggtgcctacctgcagttcctcagtgtcctgtccaggatgcttgttcggctcacagaagtggatgtctatgacgaggaggagatcaatatcaacctcagagaagaatctgactggcattatctccagcttagcgacccctggccagacctggagctgttcaagaagttgccctttgactacatcattcacgacccgaagtatgaagatgccagcctgatttgttcgcactatcagggtataaagagtgaagacagagggatgtcccggaagccggaggacctttatgtgcggcgtcagacggcacggatgagactgtccaagtacgcagcgtacaacacttaccaccactgtgagcagtgccaccagtacatgggcttccacccccgctaccagctgtatgagtccaccctgcacgcctttgccttctcttactccatgctaggagaggagatccagctgcacttcatcatccccaagtccaaggagcaccactttgtcttcagccaacctggaggccagctggagagcatgcgactacccctcgtgacagacaagagccatgaatatataaaaagtccgacattcactccaaccaccggccgtcacgaacatgggctctttaatctgtaccacgcaatggacggtgccagccatttgcacgtgctggttgtcaaggaatacgagatggcaatttataagaaatattggcccaaccacatcatgctggtgctccccagtatcttcaacagtgctggagttggtgctgctcatttcctcatcaaggagctgtcctaccataacctggagctcgagcggaaccggcaggagagcctggattaaagcgttccgttttccccaaactcggaccgagcggaatcgaacatgccaaaacttttcggggggaaaagagnnt

SEQ ID NO: 420651 - DNA, 579 bp, Homo sapiens
  misc_feature (533)..(533): n is a, c, g, or t
  misc_feature (536)..(536): n is a, c, g, or t
  misc_feature (543)..(544): n is a, c, g, or t
  misc_feature (554)..(554): n is a, c, g, or t
  misc_feature (560)..(561): n is a, c, g, or t
  misc_feature (577)..(577): n is a, c, g, or t
cactttgagatcatcctgggcagtcccagctcaggcgtcaccgtggggaagcacttcgtaaagcagctcaggatgtggcagaaaatcgaggatgtggagtggagaccccagacttacttggagctggagggtctgccttgcatcctgatcttcagtgggatggacccgcatggggagtccttgccgaggtctttgaggtactgtgacctgcgattgataaactcctcctgcttggtgagaacagccttggagcaggagctgggcctggctgcctactttgtgagcaacgaggttcccttggagaagggggctaggaacgaggccttggagagtgatgctgagaagctgagcagcacagacaacgaggatgaggagctggggacagaaggctctacctcggagaagagaagccccatgaaaagggagaggtcccgctcccacgactcagcatcctcatccctctcctccaaggcttccggttcagcgctcggtggcgagtcctcggctcagcccacagcactcccccaaggggnagngaaaagnncccccccccncccatnnaagcaggcagcaagcntc

SEQ ID NO: 420652 - DNA, 2392 bp, Homo sapiens
  misc_feature (2268)..(2268): n is a, c, g, or t
tgagatggagtctcgttctgtcatccaggctggagtgcaacggcatgatctcgactcactgcagcctttgtcttacgggttcaagcgattctcctgcctcagctacccgagtagctggaattacaggcgccagccatgacgcccggctaatttttgtgtttttgtagagacggggtttcaccatgttggccaggctggtcttaaactcctgacctcaggtgactggcctgcctcggccccccaaactgctgggattataggcgtgagccactgcgcctggccaaattgatattttcaatggttagagaagaaagcataagaaagcaaatttgtgttccacctggagaggagtgttttcctccctgtagttttctctccctagcccatgggctgtgttttgtgacaggtgattcatgtcaggaaggtcggggctggcttgtctgggcggccccgacagcaggtctgcctggggtctgtctgctgtgggtgtgggtgcaggtcagtcctgagtccaggtgctttgcccactgcaggtgctgctcatttcctcatcaaggagctgtcctaccataacctggagctcgagcggaaccggcaggaggagctgggaatcaagccgcaggacatctggcctttcattgtgatctctgatgactcctgcgtgatgtggaacgtggtggatgtcaactctgctggggagagaagcagggagttctcctggtcggaaaggaacgtgtctttgaagcacatcatgcagcacatcgaggcggcccccgacatcatgcactacgccctgctgggcctgcggaagtggtccagcaagacccgggccagcgaggtgcaagagcccttctcccgctgccacgtgcacaacttcatcatcctgaacgtggacctgacccagaacgtgcagtacaaccagaaccggttcctgtgtgacgatgtagacttcaacctgcgggtgcacagcgccggcctcctgctctgccggttcaaccgcttcagcgtgatgaagaagcagatcgtggtgggcggccacaggtccttccacatcacatccaaggtgtctgataactctgccgcggtcgtgccggcccagtacatctgtgccccggacagcaagcacacgttcctcgcagcgcccgcccagctcctgctggagaagttcctgcagcaccacagccacctcttcttcccgctgtccctgaagaaccatgaccacccagtgctgtctgtcgactgttacctgaacctgggatctcagatttctgtttgctatgtgagctccaggccccactctttaaacatcagctgctcggacttgctgttcagtgggctgctgctgtacctctgtgactcttttgtgggagctagctttttgaaaaagtttcattttctgaaaggtgcgacgttgtgtgtcatctgtcaggaccggagctcactgcgccagacggtcgtccgcctggagctcgaggacgagtggcagttccggctgcgcgatgagttccagaccgccaatgccagggaagaccggccgctcttttttctgacgggacgacacatctgaggaagacagcggcgagttttctgaagagatgagtgctcagagccctcatgctgttgaggctaaagggaggcctggaacggtggggcgtttgactggaatggaccccagggactgtccaggtgcagcccctcctagtacacatgggcccccgaggccgtggtcctgggagccaggaagactccgcagtgggtgagaatgaaaacttgagactcccaagttctgggccagcccattgctctgggctgttttaaagcccatttcacgaggaacaaagatttacttcctgtcctgccattcgtgtgcttccatggacaaacctgatttttttctcttagttctaaagaatcttgggttattttgtagcggtgccagtatttcagtagatgggatttcagccaagtaggttcccctgtaacctcctacaaagcaatattccaaaggaacattttaactgtaaaggctggagacaagaaaaaataagtagatcgttttaataacaattatttaattgcctataagtttgctgtttcagaggctagcccaaaggcatcaaatttaataaagttaaacaaattgatttacttcagagcaaatatgatcctattaaaataatatagggtaaataccctacctcttagaaagggcaaaaatgcaaagaagctttctttaaaactaaaagggttttttggggggggagtttngaaattttacatttcttgttaccaaaactcattcttatagcatgtactttgagaattattatttttgcctataactgacacaggtttatattaaaaataaaatattggattaaaaagtattaat

SEQ ID NO: 420653 - DNA, 722 bp, Homo sapiens
ggtgtgggtgcaggtcagtcctgagtccaggtgctttgcccactgcaggtgctgctcatttcctcatcaaggagctgtcctaccataacctggagctcgagcggaaccggcaggaggagctgggaatcaagccgcaggacatctggcctttcattgtgatctctgatgactcctgcgtgatgtggaacgtggtggatgtcaactctgctggggagagaagcaggtgaggtaacctgagagcaccacctcctgccaccctacgaatgatgaccaacgagtgtgccctctttgtatggggaatgtgcccacccctggaagaccggagggcctctcatagtagaaggggtggttgtggttgtggttcccagagtcctgggtgtggtaaaagtgagctcatgtgccaagcctggcttgcttttaattttaaaaaattgttattgggccgggcgcggtggctcatgcctgtaatcccagcactttgggaggctgaggtgggtggatcacgaggtcaggagatcgagaccatcctggctaacacggtgaaaccctgtctctactaaaaatacaaaaaaatttagctgggcgtggtggcgggcgcctgtagtcccagctacttgggaggctgaggcagaagcatggcgtgaacccgggaggcggagcttgtagtaagtggagatggcgccactgcactccagcctggcagacagagcgagactccgtct

SEQ ID NO: 420654 - DNA, 315 bp, Homo sapiens
tgagccgagattgcgccattgcactccagcctgggcaaccagagtgaaactccttctcaaaagaaaagggatgttcttgcagtttttctatagcgttgctttttcccccctctctttggaaatgaaaccaagggattagaaagttgcactgcttgagaaacatctcaggtttcattttctctctaagaatgtaaaatcacttttaaaacctaagaagaatttttgtgtttgaacgtaaacacctaacaatctcctaggtcccagaatgtcctaatgttatagaaatggctttcttgtaagtacttggaagcactg

SEQ ID NO: 420655 - DNA, 968 bp, Homo sapiens
  misc_feature (897)..(897): n is a, c, g, or t
  misc_feature (900)..(900): n is a, c, g, or t
ctgcagaggggtccatacggcgttgttctggattcccgtcgtaacttaaagggaaattttcacaatgtccggagcccttgatgtcctgcaaatgaaggaggaggatgtccttaagttccttgcagcaggaacccacttaggtggcaccaatcttgacttccagatggaacagtacatctataaaaggaaaagtgatggcatctatatcataaatctcaagaggacctgggagaagcttctgctggcagctcgtgcaattgttgccattgaaaaccctgctgatgtcagtgttatatcctccaggaatactggccagagggctgtgctgaagtttgctgctgccactggagccactccaattgctggccgcttcactcctggaaccttcactaaccagatccaggcagccttccgggagccacggcttcttgtggttactgaccccagggctgaccaccagcctctcacggaggcatcttatgttaacctacctaccattgcgctgtgtaacacagattctcctctgcgctatgtggacattgccatcccatgcaacaacaagggagctcactcagtgggtttgatgtggtggatgctggctcgggaagttctgcgcatgcgtggcaccatttcccgtgaacacccatgggaggtcatgcctgatctgtacttctacagagatcctgaagagattgaaaaagaagagcaggctgctgctgagaaggcagtgaccaaggaggaatttcagggtgaatggactggtcccgcgtcctgagttcactgctactcagcctgaggtgtgcagactggtctgaagggtacaggtggcctctgtgcctattcagaattccttatgaagatggaggtcaacggcaggagaaggtctgggtccatgtnagnctgatggttggcaccatgatgtctaacgtttgtaggcctagcggtggaatgtgggggaaaaatctttt

SEQ ID NO: 420656 - DNA, 1020 bp, Homo sapiens
ctgcagaggggtccatacggcgttgttctggattcccgtcgtaacttaaagggaaattttcacaatgtccggagcccttgatgtcctgcaaatgaaggaggaggatgtccttaagttccttgcagcaggaacccacttaggtggcaccaatcttgacttccagatggaacagtacatctataaaaggaaaagtgatggcatctatatcataaatctcaagaggacctgggagaagcttctgctggcagctcgtgcaattgttgccattgaaaaccctgctgatgtcagtgttatatcctccaggaatactggccagagggctgtgctgaagtttgctgctgccactggagccactccaattgctggccgcttcactcctggaaccttcactaaccagatccaggcagccttccgggagccacggcttcttgtggttactgaccccagggctgaccaccagcctctcacggaggcatcttatgttaacctacctaccattgcgctgtgtaacacagattctcctctgcgctatgtggacattgccatcccatgcaacaacaagggagctcactcagtgggtttgatgtggtggatgctggctcgggaagttctgcgcatgcgtggcaccatttcccgtgaacacccatgggaggtcatgcctgatctgtacttctacagagatcctgaagagattgaaaaagaagagcaggctgctgctgagaaggcagtgaccaaggaggaatttcagggtgaatggactggtcccgcgtcctgagttcactgctactcagcctgaggtgtgcagactggtctgaagggtacaggtggcctctgtgcctattcagaattccttatgaagatggagcactcagcgtgccacggaagactggtctgcagctcccactgctcaggccactgaatgggtaggagcaaccactgactggtcttaagctgttcttgcataggctcttaagcagcatggaaaaatggttgatggaaaataaacatcagtttctaaaa

SEQ ID NO: 420657 - DNA, 1546 bp, Homo sapiens
  misc_feature (2)..(5): n is a, c, g, or t
gnnnncggggctgccgccgccgcgcccgggcgcacccgcccgctcgctgtcccgcgcaccccgtagcgcctcgggctcccgggccggacagaggagccagcccggtgcgcccctccacctcctgctcggggggctttaatgagacacccaccgctgctgtggggccggcggggagcagcaccgcgacggggaccggggctgggcgctggagccagaatcggaaccacgatgtgactccgccgccggggacccgtgaggtttgtgtggaccccgagttccaccaggtgagaagagtgatgaccatccttttccttactatggttatttcatactttggttgcatgaaggctgcccccatgaaagaagcaaacatccgaggacaaggtggcttggcctacccaggtgtgcggacccatgggactctggagagcgtgaatgggcccaaggcaggttcaagaggcttgacatcattggctgacactttcgaacacgtgatagaagagctgttggatgaggaccagaaagttcggcccaatgaagaaaacaataaggacgcagacttgtacacgtccagggtgatgctcagtagtcaagtgcctttggagcctcctcttctctttctgctggaggaatacaaaaattacctagatgctgcaaacatgtccatgagggtccggcgccactctgaccctgcccgccgaggggagctgagcgtgtgtgacagtattagtgagtgggtaacggcggcagacaaaaagactgcagtggacatgtcgggcgggacggtcacagtccttgaaaaggtccctgtatcaaaaggccaactgaagcaatacttctacgagaccaagtgcaatcccatgggttacacaaaagaaggctgcaggggcatagacaaaaggcattggaactcccagtgccgaactacccagtcgtacgtgcgggcccttaccatggatagcaaaaagagaattggctggcgattcataaggatagacacttcttgtgtatgtacattgaccattaaaaggggaagatagtggatttatgttgtatagattagattatattgagacaaaaattatctatttgtatatatacataacagggtaaattattcagttaagaaaaaaataattttatgaactgcatgtataaatgaagtttatacagtacagtggttctacaatctatttattggacatgtccatgaccagaagggaaacagtcatttgcgcacaacttaaaaagtctgcattacattccttgataatgttgtggtttgttgccgttgccaagaactgaaaacataaaaagttaaaaaaaataataaattgcatgctgctttaattgtgaattgataataaactgtcctctttcagaaaacagaaaaaaacacacacacacacaacaaaaatttgaaccaaaacattccgtttacattttagacagtaagtatcttcgttcttgttagtactatatctgttttactgcttttaacttctgatagcgttggaattaaaacaatgtcaaggtgcaaaaatca

SEQ ID NO: 420658 - DNA, 850 bp, Homo sapiens
  misc_feature (788)..(788): n is a, c, g, or t
ttaaattaggataaagacgtattaagtgtgtctgattgagtggaggaggatggtgaggatgtggtgacttgtagaagccgggtatggacgagatgttaagtgggagaggggggggcgggtaatattagatgaagttagtgtggggagtagaaatgtgtgaggaggggggggggttgtatgagggagtgtgggggtgggggaggtggggggggggggggggggggcatacagattcgggtaaatatgaaaattattagactgttatgaataattttaaagaagggatgcgaatacgttggaaaagggcaaatgagagggtgcgagggcagagaagggaggcattgaggtagcgaattgtgatttatcgaagtggtgcgtgtgggacagggggagggggggcgaaaagggaggtgtggggcgggtcataaggatagacacttcttgtgtatgtacattgaccattaaaaggggaagatagtggatttatgttgtatagattagattatattgagacaaaaattatctatttgtatatatacataacagggtaaattattcagttaagaaaaaaataattttatgaactgcatgtataaatgaagtttatacagtacagtggttctacaatctatttattggacatgtccatgaccagaagggaaacagtcatttgcgcacaacttaaaaagtctgcattacattccttgataatgttgtggtttgttgccgttgccaagaactgaaaacataaaaagttaaaaaaaataataaattggtatgcggccagnttttttttttttttttctcaatctcctacccctccaccccttttctcacctttttttcctct

SEQ ID NO: 420659 - DNA, 1810 bp, Homo sapiens
gttccccaactgctgttttattgtgctattcatgcctagacatcacatagctagaaaggcccatcagacccctcaggccactgctgttcctgtcacacattcctgcaaaggaccatgttgctaacttgaaaaaaattactattaattacacttgcagttgttgcttagtaacatttatgattttgtgtttctcgtgacagcatgagcagagatcattaaaaattaaacttacaaagctgctaaagtgggaagaaggagaacttgaagccacaatttttgcacttgcttagaagccatctaatctcaggttatatgctagatcttgggggaaacactgcatgtctctggtttatattaaaccacatacagcacactactgacactgatttgtgtctggtgcagctggagtttatcaccaagacataaaaaaaccttgaccctgcagaatggcctggaattacaatcagatgggccacatggcatcccggtgaaagaaagccctaaccagttttctgtcttgtttctgctttctccctacattccaccaggtgagaagagtgatgaccatccttttccttactatggttatttcatactttggttgcatgaaggctgcccccatgaaagaagcaaacatccgaggacaaggtggcttggcctacccaggtgtgcggacccatgggactctggagagcgtgaatgggcccaaggcaggttcaagaggcttgacatcattggctgacactttcgaacacgtgatagaagagctgttggatgaggaccagaaagttcggcccaatgaagaaaacaataaggacgcagacttgtacacgtccagggtgatgctcagtagtcaagtgcctttggagcctcctcttctctttctgctggaggaatacaaaaattacctagatgctgcaaacatgtccatgagggtccggcgccactctgaccctgcccgccgaggggagctgagcgtgtgtgacagtattagtgagtgggtaacggcggcagacaaaaagactgcagtggacatgtcgggcgggacggtcacagtccttgaaaaggtccctgtatcaaaaggccaactgaagcaatacttctacgagaccaagtgcaatcccatgggttacacaaaagaaggctgcaggggcatagacaaaaggcattggaactcccagtgccgaactacccagtcgtacgtgcgggcccttaccatggatagcaaaaagagaattggctggcgattcataaggatagacacttcttgtgtatgtacattgaccattaaaaggggaagatagtggatttatgttgtatagattagattatattgagacaaaaattatctatttgtatatatacataacagggtaaattattcagttaagaaaaaaataattttatgaactgcatgtataaatgaagtttatacagtacagtggttctacaatctatttattggacatgtccatgaccagaagggaaacagtcatttgcgcacaacttaaaaagtctgcattacattccttgataatgttgtggtttgttgccgttgccaagaactgaaaacataaaaagttaaaaaaaataataaattgcatgctgctttaattgtgaattgataataaactgtcctctttcagaaaacagaaaaaaacacacacacacacaacaaaaatttgaaccaaaacattccgtttacattttagacagtaagtatcttcgttcttgttagtactatatctgttttactgcttttaacttctgatagcgttggaattaaaacaatgtcaaggtgcaaaaatca

SEQ ID NO: 420660 - DNA, 1603 bp, Homo sapiens
ctttcccattcaccgcggagagggctgctctcgctgccgctccccccggcgaactagcatgaaatctccctgcctctgccgagatcaaatggagcttctcgctgatggggtgcgagtattacctccgccatgcaatttccactatcaataatttaacttctttgctgcagaacagaaggagtacataccgggcaccaaagactcgcgccccctcccccctttaattaagcgaagggaacgtgaaaaaataatagagtgtgggagttttggggccgaagtctttcccggagcagctgccttgatggttactttgacaagtagtgactgaaaagttccaccaggtgagaagagtgatgaccatccttttccttactatggttatttcatactttggttgcatgaaggctgcccccatgaaagaagcaaacatccgaggacaaggtggcttggcctacccaggtgtgcggacccatgggactctggagagcgtgaatgggcccaaggcaggttcaagaggcttgacatcattggctgacactttcgaacacgtgatagaagagctgttggatgaggaccagaaagttcggcccaatgaagaaaacaataaggacgcagacttgtacacgtccagggtgatgctcagtagtcaagtgcctttggagcctcctcttctctttctgctggaggaatacaaaaattacctagatgctgcaaacatgtccatgagggtccggcgccactctgaccctgcccgccgaggggagctgagcgtgtgtgacagtattagtgagtgggtaacggcggcagacaaaaagactgcagtggacatgtcgggcgggacggtcacagtccttgaaaaggtccctgtatcaaaaggccaactgaagcaatacttctacgagaccaagtgcaatcccatgggttacacaaaagaaggctgcaggggcatagacaaaaggcattggaactcccagtgccgaactacccagtcgtacgtgcgggcccttaccatggatagcaaaaagagaattggctggcgattcataaggatagacacttcttgtgtatgtacattgaccattaaaaggggaagatagtggatttatgttgtatagattagattatattgagacaaaaattatctatttgtatatatacataacagggtaaattattcagttaagaaaaaaataattttatgaactgcatgtataaatgaagtttatacagtacagtggttctacaatctatttattggacatgtccatgaccagaagggaaacagtcatttgcgcacaacttaaaaagtctgcattacattccttgataatgttgtggtttgttgccgttgccaagaactgaaaacataaaaagttaaaaaaaataataaattgcatgctgctttaattgtgaattgataataaactgtcctctttcagaaaacagaaaaaaacacacacacacacaacaaaaatttgaaccaaaacattccgtttacattttagacagtaagtatcttcgttcttgttagtactatatctgttttactgcttttaacttctgatagcgttggaattaaaacaatgtcaaggtgcaaaaatca

SEQ ID NO: 420661 - DNA, 1588 bp, Homo sapiens
tcattcattagaatcacgtaagaactcaaaaggaaacgtgtctctcggagtgagggcgtttgcgtaaatctataggtttttcgacatcgatgccagttgctttgtcttctgtagtcgccaaggtggttgagagtttaagcttgcggatattgcaaagggttattagattcataagtcacaccaagtggtgggcgatccactgagcaaagccgaacttctcacatgatgacttcaaacaagacacattaccttccagcatctgttggggagacgagattttaagacacttgagtctccaggacagcaaaggcacaatgttccaccaggtgagaagagtgatgaccatccttttccttactatggttatttcatactttggttgcatgaaggctgcccccatgaaagaagcaaacatccgaggacaaggtggcttggcctacccaggtgtgcggacccatgggactctggagagcgtgaatgggcccaaggcaggttcaagaggcttgacatcattggctgacactttcgaacacgtgatagaagagctgttggatgaggaccagaaagttcggcccaatgaagaaaacaataaggacgcagacttgtacacgtccagggtgatgctcagtagtcaagtgcctttggagcctcctcttctctttctgctggaggaatacaaaaattacctagatgctgcaaacatgtccatgagggtccggcgccactctgaccctgcccgccgaggggagctgagcgtgtgtgacagtattagtgagtgggtaacggcggcagacaaaaagactgcagtggacatgtcgggcgggacggtcacagtccttgaaaaggtccctgtatcaaaaggccaactgaagcaatacttctacgagaccaagtgcaatcccatgggttacacaaaagaaggctgcaggggcatagacaaaaggcattggaactcccagtgccgaactacccagtcgtacgtgcgggcccttaccatggatagcaaaaagagaattggctggcgattcataaggatagacacttcttgtgtatgtacattgaccattaaaaggggaagatagtggatttatgttgtatagattagattatattgagacaaaaattatctatttgtatatatacataacagggtaaattattcagttaagaaaaaaataattttatgaactgcatgtataaatgaagtttatacagtacagtggttctacaatctatttattggacatgtccatgaccagaagggaaacagtcatttgcgcacaacttaaaaagtctgcattacattccttgataatgttgtggtttgttgccgttgccaagaactgaaaacataaaaagttaaaaaaaataataaattgcatgctgctttaattgtgaattgataataaactgtcctctttcagaaaacagaaaaaaacacacacacacacaacaaaaatttgaaccaaaacattccgtttacattttagacagtaagtatcttcgttcttgttagtactatatctgttttactgcttttaacttctgatagcgttggaattaaaacaatgtcaaggtgcaaaaatca

SEQ ID NO: 420662 - DNA, 1604 bp, Homo sapiens
  misc_feature (13)..(13): n is a, c, g, or t
  misc_feature (198)..(198): n is a, c, g, or t
gccaacggatttntccgaggtggcggtacccccaggtagtcttcttggccccgctgtaaagccaaccctgtgtcgcccttaaaaagcgtcttttctgaggttcggctcacactgagatcggggctggagagagagtcagattttggagcggagcgtttggaaagcgagccccagtttggtcccctcattgagctcgcngaagttggcttcctagcggtgtaggctggaatagactcttggcaagctccgggttggtatactgggttaactttgggaaatgcaagtgtttatctccaggatctagccaccggggtggtgtaagccgcaaagaagttccaccaggtgagaagagtgatgaccatccttttccttactatggttatttcatactttggttgcatgaaggctgcccccatgaaagaagcaaacatccgaggacaaggtggcttggcctacccaggtgtgcggacccatgggactctggagagcgtgaatgggcccaaggcaggttcaagaggcttgacatcattggctgacactttcgaacacgtgatagaagagctgttggatgaggaccagaaagttcggcccaatgaagaaaacaataaggacgcagacttgtacacgtccagggtgatgctcagtagtcaagtgcctttggagcctcctcttctctttctgctggaggaatacaaaaattacctagatgctgcaaacatgtccatgagggtccggcgccactctgaccctgcccgccgaggggagctgagcgtgtgtgacagtattagtgagtgggtaacggcggcagacaaaaagactgcagtggacatgtcgggcgggacggtcacagtccttgaaaaggtccctgtatcaaaaggccaactgaagcaatacttctacgagaccaagtgcaatcccatgggttacacaaaagaaggctgcaggggcatagacaaaaggcattggaactcccagtgccgaactacccagtcgtacgtgcgggcccttaccatggatagcaaaaagagaattggctggcgattcataaggatagacacttcttgtgtatgtacattgaccattaaaaggggaagatagtggatttatgttgtatagattagattatattgagacaaaaattatctatttgtatatatacataacagggtaaattattcagttaagaaaaaaataattttatgaactgcatgtataaatgaagtttatacagtacagtggttctacaatctatttattggacatgtccatgaccagaagggaaacagtcatttgcgcacaacttaaaaagtctgcattacattccttgataatgttgtggtttgttgccgttgccaagaactgaaaacataaaaagttaaaaaaaataataaattgcatgctgctttaattgtgaattgataataaactgtcctctttcagaaaacagaaaaaaacacacacacacacaacaaaaatttgaaccaaaacattccgtttacattttagacagtaagtatcttcgttcttgttagtactatatctgttttactgcttttaacttctgatagcgttggaattaaaacaatgtcaaggtgcaaaaatca

SEQ ID NO: 420663 - DNA, 1523 bp, Homo sapiens
agtggacttacaagtccgaagccaatgtagcttggaaaacttgggaggcggaattcctaccgctgggaactgaaagggtctgcgacactctcgggcaggccgaacccacatctctacccatcctgcgcccctcttctgaagcgccctccagggaagttaagagttttgactttcggggagtggttgggatgtacgtgggggattcttgactcgggttagtctctggggatgcagagccgggaagaggaatggttccaccaggtgagaagagtgatgaccatccttttccttactatggttatttcatactttggttgcatgaaggctgcccccatgaaagaagcaaacatccgaggacaaggtggcttggcctacccaggtgtgcggacccatgggactctggagagcgtgaatgggcccaaggcaggttcaagaggcttgacatcattggctgacactttcgaacacgtgatagaagagctgttggatgaggaccagaaagttcggcccaatgaagaaaacaataaggacgcagacttgtacacgtccagggtgatgctcagtagtcaagtgcctttggagcctcctcttctctttctgctggaggaatacaaaaattacctagatgctgcaaacatgtccatgagggtccggcgccactctgaccctgcccgccgaggggagctgagcgtgtgtgacagtattagtgagtgggtaacggcggcagacaaaaagactgcagtggacatgtcgggcgggacggtcacagtccttgaaaaggtccctgtatcaaaaggccaactgaagcaatacttctacgagaccaagtgcaatcccatgggttacacaaaagaaggctgcaggggcatagacaaaaggcattggaactcccagtgccgaactacccagtcgtacgtgcgggcccttaccatggatagcaaaaagagaattggctggcgattcataaggatagacacttcttgtgtatgtacattgaccattaaaaggggaagatagtggatttatgttgtatagattagattatattgagacaaaaattatctatttgtatatatacataacagggtaaattattcagttaagaaaaaaataattttatgaactgcatgtataaatgaagtttatacagtacagtggttctacaatctatttattggacatgtccatgaccagaagggaaacagtcatttgcgcacaacttaaaaagtctgcattacattccttgataatgttgtggtttgttgccgttgccaagaactgaaaacataaaaagttaaaaaaaataataaattgcatgctgctttaattgtgaattgataataaactgtcctctttcagaaaacagaaaaaaacacacacacacacaacaaaaatttgaaccaaaacattccgtttacattttagacagtaagtatcttcgttcttgttagtactatatctgttttactgcttttaacttctgatagcgttggaattaaaacaatgtcaaggtgcaaaaatca

SEQ ID NO: 420664 - DNA, 1305 bp, Homo sapiens
aatgctgcagacactctcttaattatcaccgctcttccaccaggtgagaagagtgatgaccatccttttccttactatggttatttcatactttggttgcatgaaggctgcccccatgaaagaagcaaacatccgaggacaaggtggcttggcctacccaggtgtgcggacccatgggactctggagagcgtgaatgggcccaaggcaggttcaagaggcttgacatcattggctgacactttcgaacacgtgatagaagagctgttggatgaggaccagaaagttcggcccaatgaagaaaacaataaggacgcagacttgtacacgtccagggtgatgctcagtagtcaagtgcctttggagcctcctcttctctttctgctggaggaatacaaaaattacctagatgctgcaaacatgtccatgagggtccggcgccactctgaccctgcccgccgaggggagctgagcgtgtgtgacagtattagtgagtgggtaacggcggcagacaaaaagactgcagtggacatgtcgggcgggacggtcacagtccttgaaaaggtccctgtatcaaaaggccaactgaagcaatacttctacgagaccaagtgcaatcccatgggttacacaaaagaaggctgcaggggcatagacaaaaggcattggaactcccagtgccgaactacccagtcgtacgtgcgggcccttaccatggatagcaaaaagagaattggctggcgattcataaggatagacacttcttgtgtatgtacattgaccattaaaaggggaagatagtggatttatgttgtatagattagattatattgagacaaaaattatctatttgtatatatacataacagggtaaattattcagttaagaaaaaaataattttatgaactgcatgtataaatgaagtttatacagtacagtggttctacaatctatttattggacatgtccatgaccagaagggaaacagtcatttgcgcacaacttaaaaagtctgcattacattccttgataatgttgtggtttgttgccgttgccaagaactgaaaacataaaaagttaaaaaaaataataaattgcatgctgctttaattgtgaattgataataaactgtcctctttcagaaaacagaaaaaaacacacacacacacaacaaaaatttgaaccaaaacattccgtttacattttagacagtaagtatcttcgttcttgttagtactatatctgttttactgcttttaacttctgatagcgttggaattaaaacaatgtcaaggtgcaaaaatca

SEQ ID NO: 420665 - DNA, 1578 bp, Homo sapiens
gttccccaactgctgttttattgtgctattcatgcctagacatcacatagctagaaaggcccatcagacccctcaggccactgctgttcctgtcacacattcctgcaaaggaccatgttgctaacttgaaaaaaattactattaattacacttgcagttgttgcttagtaacatttatgattttgtgtttctcgtgacagcatgagcagagatcattaaaaattaaacttacaaagctgctaaagtgggaagaaggagaacttgaagccacaatttttgcacttgcttagaagccatctaatctcagttccaccaggtgagaagagtgatgaccatccttttccttactatggttatttcatactttggttgcatgaaggctgcccccatgaaagaagcaaacatccgaggacaaggtggcttggcctacccaggtgtgcggacccatgggactctggagagcgtgaatgggcccaaggcaggttcaagaggcttgacatcattggctgacactttcgaacacgtgatagaagagctgttggatgaggaccagaaagttcggcccaatgaagaaaacaataaggacgcagacttgtacacgtccagggtgatgctcagtagtcaagtgcctttggagcctcctcttctctttctgctggaggaatacaaaaattacctagatgctgcaaacatgtccatgagggtccggcgccactctgaccctgcccgccgaggggagctgagcgtgtgtgacagtattagtgagtgggtaacggcggcagacaaaaagactgcagtggacatgtcgggcgggacggtcacagtccttgaaaaggtccctgtatcaaaaggccaactgaagcaatacttctacgagaccaagtgcaatcccatgggttacacaaaagaaggctgcaggggcatagacaaaaggcattggaactcccagtgccgaactacccagtcgtacgtgcgggcccttaccatggatagcaaaaagagaattggctggcgattcataaggatagacacttcttgtgtatgtacattgaccattaaaaggggaagatagtggatttatgttgtatagattagattatattgagacaaaaattatctatttgtatatatacataacagggtaaattattcagttaagaaaaaaataattttatgaactgcatgtataaatgaagtttatacagtacagtggttctacaatctatttattggacatgtccatgaccagaagggaaacagtcatttgcgcacaacttaaaaagtctgcattacattccttgataatgttgtggtttgttgccgttgccaagaactgaaaacataaaaagttaaaaaaaataataaattgcatgctgctttaattgtgaattgataataaactgtcctctttcagaaaacagaaaaaaacacacacacacacaacaaaaatttgaaccaaaacattccgtttacattttagacagtaagtatcttcgttcttgttagtactatatctgttttactgcttttaacttctgatagcgttggaattaaaacaatgtcaaggtgcaaaaatca

SEQ ID NO: 420666 - DNA, 1351 bp, Homo sapiens
gttccccaactgctgttttattgtgctattcatgcctagacatcacatagctagaaaggcccatcagacccctcaggccactgctgttcctgtcacacattcctgcaaaggaccatgttgctaacttgaaaaaaattactattaattacacttgcagttgttgcttagtaacatttatgattttgtgtttctcgtgacagcatgagcagagatcattaaaaattaaacttacaaagctgctaaagtgggaagaaggagaacttgaagccacaatttttgcacttgcttagaagccatctaatctcagttccaccaggtgagaagagtgatgaccatccttttccttactatggttatttcatactttggttgcatgaaggctgcccccatgaaagaagcaaacatccgaggacaaggtggcttggcctacccaggtgtgcggacccatgggactctggagagcgtgaatgggcccaaggcaggttcaagaggcttgacatcattggctgacactttcgaacacgtgatagaagagctgttggatgaggaccagaaagttcggcccaatgaagaaaacaataaggacgcagacttgtacacgtccagggtgatgctcagtagtcaagtgcctttggagcctcctcttctctttctgctggaggaatacaaaaattacctagatgctgcaaacatgtccatgagggtccggcgccactctgaccctgcccgccgaggggagctgagcgtgtgtgacagtattagtgagtgggtaacggcggcagacaaaaagactgcagatagacacttcttgtgtatgtacattgaccattaaaaggggaagatagtggatttatgttgtatagattagattatattgagacaaaaattatctatttgtatatatacataacagggtaaattattcagttaagaaaaaaataattttatgaactgcatgtataaatgaagtttatacagtacagtggttctacaatctatttattggacatgtccatgaccagaagggaaacagtcatttgcgcacaacttaaaaagtctgcattacattccttgataatgttgtggtttgttgccgttgccaagaactgaaaacataaaaagttaaaaaaaataataaattgcatgctgctttaattgtgaattgataataaactgtcctctttcagaaaacagaaaaaaacacacacacacacaacaaaaatttgaaccaaaacattccgtttacattttagacagtaagtatcttcgttcttgttagtactatatctgttttactgcttttaacttctgatagcgttggaattaaaacaatgtcaaggtgcaaaaatca

SEQ ID NO: 420667 - DNA, 1013 bp, Homo sapiens
ccacatgtaaactacttgaactccatttcatcttttttcataccatctctaagattgctgccgcatttgcttgttaaactgaaagcatgtttcttgcaaaggctctattggaaggagcagatcgaggtcttggagaagctcttggaggcctctttggaggaggtggtcagagaagagaaggaggaggaagaaatattggagggatagttggaggaattgtgaattttatcagtgaggctgcagcagctcagtatactccagaaccgcctcccactcagcagcatttcaccagtgtggaggcctcagaaagtgaggaagttaggcgatttcggcaacaatttacacagctggctggaccagacatggaggtgggtgccactgatctgatgaatattctcaacaaagtcctttctaagcacaaagatcttaagactgacggttttagtcttgacacctgccggagcattgtgtctgtcatggacagtgacacgactggtaagctgggctttgaagaatttaagtatctgtggaacaacatcaagaaatggcagtgtgtttataagcagtatgacagggaccattctgggtctctgggaagttctcagctgcggggagctctgcaggccgcaggcttccagctaaatgaacaactttaccaaatgattgtccgccggtatgctaatgaagatggagatatggattttaacaatttcatcagctgcttggtccgcctggatgccatgtttcgtgccttcaagtctctggatagagatagagatggcctgattcaagtgtctatcaaagaatggctgcagttgaccatgtattcctgaagtgggaactgagaagtcaagatcctccctggaggacaggactgaaaaccttgccaagctgtacacagttgctgataccctgtgcaacagctctcatttcctggcaagctctttcacaaccctacatatttctgatcatgtgctgccttttactgctgaattaaaacagatatttcacga

SEQ ID NO: 420668 - DNA, 3415 bp, Homo sapiens
agaccaagcattcagcaagccactcttccacctcccttactgcaggaaggcactccgaagacataagtcggtgagacatggctgaagataaaagcaagagagactccatcgagatgagtatgaagggatgccagacaaacaacgggtttgtccataatgaagacattctggagcagaccccggatccaggcagctcaacagacaacctgaagcacagcaccaggggcatccttggctcccaggagcccgacttcaagggcgtccagccctatgcggggatgcccaaggaggtgctgttccagttctctggccaggcccgctaccgcatacctcgggagatcctcttctggctcacagtggcttctgtgctggtgctcatcgcggccaccatagccatcattgccctctctccaaagtgcctagactggtggcaggaggggcccatgtaccagatctacccaaggtctttcaaggacagtaacaaggatgggaacggagatctgaaaggtattcaagataaactggactacatcacagctttaaatataaaaactgtttggattacttcattttataaatcgtcccttaaagatttcagatatggtgttgaagatttccgggaagttgatcccatttttggaacgatggaagattttgagaatctggttgcagccatacatgataaaggtttaaaattaatcatcgatttcataccaaaccacacgagtgataaacatatttggtttcaattgagtcggacacggacaggaaaatatactgattattatatctggcatgactgtacccatgaaaatggcaaaaccattccacccaacaactggttaagtgtgtatggaaactccagttggcactttgacgaagtgcgaaaccaatgttattttcatcagtttatgaaagagcaacctgatttaaatttccgcaatcctgatgttcaagaagaaataaaagaaattttacggttctggctcacaaagggtgttgatggttttagtttggatgctgttaaattcctcctagaagcaaagcacctgagagatgagatccaagtaaataagacccaaatcccggacacggtcacacaatactcggagctgtaccatgacttcaccaccacgcaggtgggaatgcacgacattgtccgcagcttccggcagaccatggaccaatacagcacggagcccggcagatacaggttcatggggactgaagcctatgcagagagtattgacaggaccgtgatgtactatggattgccatttatccaagaagctgattttcccttcaacaattacctcagcatgctagacactgtttctgggaacagcgtgtatgaggttatcacatcctggatggaaaacatgccagaaggaaaatggcctaactggatgattggtggaccagacagttcacggctgacttcgcgtttggggaatcagtatgtcaacgtgatgaacatgcttcttttcacactccctggaactcctataacttactatggagaagaaattggaatgggaaatattgtagccgcaaatctcaatgaaagctatgatattaatacccttcgctcaaagtcaccaatgcagtgggacaatagttcaaatgctggtttttctgaagctagtaacacctggttacctaccaattcagattaccacactgtgaatgttgatgtccaaaagactcagcccagatcggctttgaagttatatcaagatttaagtctacttcatgccaatgagctactcctcaacaggggctggttttgccatttgaggaatgacagccactatgttgtgtacacaagagagctggatggcatcgacagaatctttatcgtggttctgaattttggagaatcaacactgttaaatctacataatatgatttcgggccttcccgctaaaataagaataaggttaagtaccaattctgccgacaaaggcagtaaagttgatacaagtggcatttttctggacaagggagagggactcatctttgaacacaacacgaagaatctccttcatcgccaaacagctttcagagatagatgctttgtttccaatcgagcatgctattccagtgtactgaacatactgtatacctcgtgttaggcacctttatgaagagatgaagacactggcatttcagtgggattgtaagcatttgtaatagcttcatgtacagcatgctgcttggtgaacaatcattaattcttcgatatttctgtagcttgaatgtaaccgctttaagaaaggttctcaaatgttttgaaaaaaataaaatgtttttaaagtaaaaaaaaaaaaaaaaaattttttttttttttttttgtgtttcaagttaaaaaaaaattttttttttttttttttagaagagactggatttcaccacgttgctcgggctggtctcaaacccctgagctcaggaggtctgcccacctcggcctccaaagtgctaggattacacgcatgagccaccgcgcctggccagtatttacatgttaaatgtgaaactgggattgcggtggctcatgctgtaattcagcacttggggaggctttggttaggaggactttggttaggaggactgcttaagcccaagagttgaggctgcagtgagctgtaatagcaccactgttctccagtccgagcaacagagaacgtgtctctaataaaaacaaaaatgtgagatgatgcctaggttagaatcagcagaggagaagccagagagagcagaggcaaaggaagagaacgttcagcaagccaaatgaaaacagtgtttcaaggaggggcagtgatcccacagcatcaaatgctgaacaggactgagacctaacttaacaatgcatttggccacctagagatcactggtggcctttgacaagaagccatttttagtggaagtggtgaagaccaaagcctgactagaggctcaagggttcaagacttggaggagaaaaggcattagtgaggtagactcaaagcctttggctgcaaacccggaagcccgaggaggaggtaactggaggatagcgagggtgaaggaaggctgttttgttgttcttaagacgggcattttttggccggggggcgcgctcacgcctatactccccacactttgggaggccgaggcgggagtaatagcctcctgggcaaacgacgagctgttagtgtatcttgttaagaactaatatatatatacaaaatttttgtgcaaatcataaaataagtgctggagttcggggcccatcctctgtccgcatcttcgtgacccgggtccgagtaccccacctggaagctgcgtccgtgccgagcccagcgtgtcgctgtttcccaccctcgccggggatggaagcacgcaagcgcagacctcgagcggccgggggatccgg

SEQ ID NO: 420669 - DNA, 597 bp, Homo sapiens
tcttagtgatttgattctatatgggaaatgttagcagggagggtgtgtgggtgggagggggcacacaggagcaagcaaatgagagagcagtgtttgttttgcacaggaaaaagagtaactctagatttgagctgttcagtagccattaaccactgtgactattacattaaatagaattaaacatttagttcctgctgggattacgggcctgagccaccttgcctggcctgcaaaatttgtttttaatagaagacacaagaaatgatttaaatatcttatcaacagaaaaccagttctatcaactatgggcccagtatgcagcttttaaaaatgacagttctatatacattgatatgagaccatttcaaacaggtattcaataaagtatagaatggtaacatatcaccaactgtgtaaagaaaaatatataaacatatgtttgcataggcacagaatgtatcatttcatatgatacattaaaaacaaaagaacatatagtgcctgtctctgaggggaactgtgaagctatggaaaggtgttgaagaaaacctttttatagtatgtattcttgtaattgaataaaaaataaaattacaa

SEQ ID NO: 420670 - DNA, 2336 bp, Homo sapiens
agaccaagcattcagcaagccactcttccacctcccttactgcaggaaggcactccgaagacataagtcggtgagacatggctgaagataaaagcaagagagactccatcgagatgagtatgaagggatgccagacaaacaacgggtttgtccataatgaagacattctggagcagaccccggatccaggcagctcaacagacaacctgaagcacagcaccaggggcatccttggctcccaggagcccgacttcaagggcgtccagccctatgcggggatgcccaaggaggtgctgttccagttctctggccaggcccgctaccgcatacctcgggagatcctcttctggctcacagtggcttctgtgctggtgctcatcgcggccaccatagccatcattgccctctctccaaagtgcctagactggtggcaggaggggcccatgtaccagatctacccaaggtctttcaaggacagtaacaaggatgggaacggagatctgaaaggtattcaagataaactggactacatcacagctttaaatataaaaactgtttggattacttcattttataaatcgtcccttaaagatttcagatatggtgttgaagatttccgggaagttgatcccatttttggaacgatggaagattttgagaatctggttgcagccatacatgataaaggtttaaaattaatcatcgatttcataccaaaccacacgagtgataaacatatttggtttcaattgagtcggacacggacaggaaaatatactgattattatatctggcatgactgtacccatgaaaatggcaaaaccattccacccaacaactggttaagtgtgtatggaaactccagttggcactttgacgaagtgcgaaaccaatgttattttcatcagtttatgaaagagcaacctgatttaaatttccgcaatcctgatgttcaagaagaaataaaagaaattttacggttctggctcacaaagggtgttgatggttttagtttggatgctgttaaattcctcctagaagcaaagcacctgagagatgagatccaagtaaataagacccaaatcccggacacggtcacacaatactcggagctgtaccatgacttcaccaccacgcaggtgggaatgcacgacattgtccgcagcttccggcagaccatggaccaatacagcacggagcccggcagatacaggttcatggggactgaagcctatgcagagagtattgacaggaccgtgatgtactatggattgccatttatccaagaagctgattttcccttcaacaattacctcagcatgctagacactgtttctgggaacagcgtgtatgaggttatcacatcctggatggaaaacatgccagaaggaaaatggcctaactggatgattggtggaccagacagttcacggctgacttcgcgtttggggaatcagtatgtcaacgtgatgaacatgcttcttttcacactccctggaactcctataacttactatggagaagaaattggaatgggaaatattgtagccgcaaatctcaatgaaagctatgatattaatacccttcgctcaaagtcaccaatgcagtgggacaatagttcaaatgctggtttttctgaagctagtaacacctggttacctaccaattcagattaccacactgtgaatgttgattcttgctccgtcacccatgctcgagtgcagtggcgtgatctcggcacactgcagcctctgcttcctgggttcaagtgattctcctgctgcagcctcccaagtagctgggattacaggtgcacgtcattatgcccgggtaatttctgtattttttagtagagatggtgtttcaccatgttggccaggctggtcttgaactcctgacctctggtgatctgtctgccttgcctcccaaagtgctaggattacgggcctgagccaccttgcctggcctgcaaaatttgtttttaatagaagacacaagaaatgatttaaatatcttatcaacagaaaaccagttctatcaactatgggcccagtatgcagcttttaaaaatgacagttctatatacattgatatgagaccatttcaaacaggtattcaataaagtatagaatggtaacatatcaccaactgtgtaaagaaaaatatataaacatatgtttgcataggcacagaatgtatcatttcatatgatacattaaaaacaaaagaacatatagtgcctgtctctgaggggaactgtgaagctatggaaaggtgttgaagaaaacctttttatagtatgtattcttgtaattgaataaaaaataaaattacaa

SEQ ID NO: 420671 - DNA, 3531 bp, Homo sapiens
agaccaagcattcagcaagccactcttccacctcccttactgcaggaaggcactccgaagacataagtcggtgagacatggctgaagataaaagcaagagagactccatcgagatgagtatgaagggatgccagacaaacaacgggtttgtccataatgaagacattctggagcagaccccggatccaggcagctcaacagacaacctgaagcacagcaccaggggcatccttggctcccaggagcccgacttcaagggcgtccagccctatgcggggatgcccaaggaggtgctgttccagttctctggccaggcccgctaccgcatacctcgggagatcctcttctggctcacagtggcttctgtgctggtgctcatcgcggccaccatagccatcattgccctctctccaaagtgcctagactggtggcaggaggggcccatgtaccagatctacccaaggtctttcaaggacagtaacaaggatgggaacggagatctgaaaggtattcaagataaactggactacatcacagctttaaatataaaaactgtttggattacttcattttataaatcgtcccttaaagatttcagatatggtgttgaagatttccgggaagttgatcccatttttggaacgatggaagattttgagaatctggttgcagccatacatgataaaggtttaaaattaatcatcgatttcataccaaaccacacgagtgataaacatatttggtttcaattgagtcggacacggacaggaaaatatactgattattatatctggcatgactgtacccatgaaaatggcaaaaccattccacccaacaactggttaagtgtgtatggaaactccagttggcactttgacgaagtgcgaaaccaatgttattttcatcagtttatgaaagagcaacctgatttaaatttccgcaatcctgatgttcaagaagaaataaaagaaattttacggttctggctcacaaagggtgttgatggttttagtttggatgctgttaaattcctcctagaagcaaagcacctgagagatgagatccaagtaaataagacccaaatcccggacacggtcacacaatactcggagctgtaccatgacttcaccaccacgcaggtgggaatgcacgacattgtccgcagcttccggcagaccatggaccaatacagcacggagcccggcagatacaggttcatggggactgaagcctatgcagagagtattgacaggaccgtgatgtactatggattgccatttatccaagaagctgattttcccttcaacaattacctcagcatgctagacactgtttctgggaacagcgtgtatgaggttatcacatcctggatggaaaacatgccagaaggaaaatggcctaactggatgattggtggaccagacagttcacggctgacttcgcgtttggggaatcagtatgtcaacgtgatgaacatgcttcttttcacactccctggaactcctataacttactatggagaagaaattggaatgggaaatattgtagccgcaaatctcaatgaaagctatgatattaatacccttcgctcaaagtcaccaatgcagtgggacaatagttcaaatgctggtttttctgaagctagtaacacctggttacctaccaattcagattaccacactgtgaatgttgattcttgctccgtcacccatgctcgagtgcagtggcgtgatctcggcacactgcagcctctgcttcctgggttcaagtgattctcctgctgcagcctcccaagtagctgggattacaggtccaaaagactcagcccagatcggctttgaagttatatcaagatttaagtctacttcatgccaatgagctactcctcaacaggggctggttttgccatttgaggaatgacagccactatgttgtgtacacaagagagctggatggcatcgacagaatctttatcgtggttctgaattttggagaatcaacactgttaaatctacataatatgatttcgggccttcccgctaaaataagaataaggttaagtaccaattctgccgacaaaggcagtaaagttgatacaagtggcatttttctggacaagggagagggactcatctttgaacacaacacgaagaatctccttcatcgccaaacagctttcagagatagatgctttgtttccaatcgagcatgctattccagtgtactgaacatactgtatacctcgtgttaggcacctttatgaagagatgaagacactggcatttcagtgggattgtaagcatttgtaatagcttcatgtacagcatgctgcttggtgaacaatcattaattcttcgatatttctgtagcttgaatgtaaccgctttaagaaaggttctcaaatgttttgaaaaaaataaaatgtttttaaagtaaaaaaaaaaaaaaaaaattttttttttttttttttgtgtttcaagttaaaaaaaaattttttttttttttttttagaagagactggatttcaccacgttgctcgggctggtctcaaacccctgagctcaggaggtctgcccacctcggcctccaaagtgctaggattacacgcatgagccaccgcgcctggccagtatttacatgttaaatgtgaaactgggattgcggtggctcatgctgtaattcagcacttggggaggctttggttaggaggactttggttaggaggactgcttaagcccaagagttgaggctgcagtgagctgtaatagcaccactgttctccagtccgagcaacagagaacgtgtctctaataaaaacaaaaatgtgagatgatgcctaggttagaatcagcagaggagaagccagagagagcagaggcaaaggaagagaacgttcagcaagccaaatgaaaacagtgtttcaaggaggggcagtgatcccacagcatcaaatgctgaacaggactgagacctaacttaacaatgcatttggccacctagagatcactggtggcctttgacaagaagccatttttagtggaagtggtgaagaccaaagcctgactagaggctcaagggttcaagacttggaggagaaaaggcattagtgaggtagactcaaagcctttggctgcaaacccggaagcccgaggaggaggtaactggaggatagcgagggtgaaggaaggctgttttgttgttcttaagacgggcattttttggccggggggcgcgctcacgcctatactccccacactttgggaggccgaggcgggagtaatagcctcctgggcaaacgacgagctgttagtgtatcttgttaagaactaatatatatatacaaaatttttgtgcaaatcataaaataagtgctggagttcggggcccatcctctgtccgcatcttcgtgacccgggtccgagtaccccacctggaagctgcgtccgtgccgagcccagcgtgtcgctgtttcccaccctcgccggggatggaagcacgcaagcgcagacctcgagcggccgggggatccgg

SEQ ID NO: 420672 - DNA, 1871 bp, Homo sapiens
  misc_feature (1568)..(1568): n is a, c, g, or t
agaccaagcattcagcaagccactcttccacctcccttactgcaggaaggcactccgaagacataagtcggtgagacatggctgaagataaaagcaagagagactccatcgagatgagtatgaagggatgccagacaaacaacgggtttgtccataatgaagacattctggagcagaccccggatccaggcagctcaacagacaacctgaagcacagcaccaggggcatccttggctcccaggagcccgacttcaagggcgtccagccctatgcggggatgcccaaggaggtgctgttccagttctctggccaggcccgctaccgcatacctcgggagatcctcttctggctcacagtggcttctgtgctggtgctcatcgcggccaccatagccatcattgccctctctccaaagtgcctagactggtggcaggaggggcccatgtaccagatctacccaaggtctttcaaggacagtaacaaggatgggaacggagatctgaaaggtattcaagataaactggactacatcacagctttaaatataaaaactgtttggattacttcattttataaatcgtcccttaaagatttcagatatggtgttgaagatttccgggaagttgatcccatttttggaacgatggaagattttgagaatctggttgcagccatacatgataaaggtttaaaattaatcatcgatttcataccaaaccacacgagtgataaacatatttggtttcaattgagtcggacacggacaggaaaatatactgattattatatctggcatgactgtacccatgaaaatggcaaaaccattccacccaacaactggttaagtgtgtatggaaactccagttggcactttgacgaagtgcgaaaccaatgttattttcatcagtttatgaaagagcaacctgatttaaatttccgcaatcctgatgttcaagaagaaataaaagaaattttacggttctggctcacaaagggtgttgatggttttagtttggatgctgttaaattcctcctagaagcaaagcacctgagagatgagatccaagtaaataagacccaaatcccggacacggtcacacaatactcggagctgtaccatgacttcaccaccacgcaggtgggaatgcacgacattgtccgcagcttccggcagaccatggaccaatacagcacggagcccggcagatacagggtcatgggggacttgaatcttattcacagagttttggccaggaccgtggaagtactatgggatcggcatttaatccaagaaagctgtttcttccctctaacaagttgcctgaacaatgctacaatattggattcttgggaacaggtgttgtataagggtcttccacatccgtgggtggtgacatgttgccaaaaaggaataatgggcctagctggggtagattgggtgagccacgaccatgccagcgggtgttcttgggagtggtggtggacgcggtcggtcagcggaattgaacataatcttgttgtgccccctcgctgggaactccttattctggaccatgggaagaacaanactgtaaatggggagacgtgcgagggcgggagttgtggatgaatgtgtgtgatgtgttatccggttatgctcgtattgtactcatgtatgtgagagaatatatgtggaagtcttgagacgtatcgaacattaatgacatctgtagggccgagtatgtgtggaatagccagtccgggtgtctaggttggaagacggagagggcgttcttgaaggaattggtggtgagggttgaagagctcgtggcagagtgtgccgctgtgagagtctggttgcggcgtgttgttgataatcctgttcttgttt

SEQ ID NO: 420673 - DNA, 807 bp, Homo sapiens
cacctatgagtgagaacatgcggtgtttggttttctgtccttgtgatagtttgcttagaatgatggtttccagcttcatccatgtccctgcaaaggacatggactcatccttttttatggctgcatagtattccatggtgtgtatgtgccacattttcttaatccagtctaacatttggtgacagcttgattatgctttctagaaggtgctagtcctatatggttaatagtgtgcattcagcccctacatcttgtacatgcaagataagcagctgtggagtgccttcccagtcttctgacaggccccgatgacactgaaccttgtcaactcttataggttcatggggactgaagcctatgcagagagtattgacaggaccgtgatgtactatggattgccatttatccaagaagctgattttcccttcaacaattacctcagcatgctagacactgtttctgggaacagcgtgtatgaggttatcacatcctggatggaaaacatgccagaaggaaaatggcctaactggatggtaagtcctcatgacagcagagtacataatgtgctgctgttgcctttgctgtccagttatctctaaaatgcaatggacctttgtctctaagtgaccatcacctctgccttatttggtgattgttcagtggtcaggcctgtcacagcctctgccaggttcttttcattaagggagggagactgcccactgaatggaatgaatattgaatgagtgcttgtctatgctcagaacactgctaggctttttggggatggatatcaaaccataatttctc

SEQ ID NO: 420674 - DNA, 1889 bp, Homo sapiens
agaccaagcattcagcaagccactcttccacctcccttactgcaggaaggcactccgaagacataagtcggtgagacatggctgaagataaaagcaagagagactccatcgagatgagtatgaagggatgccagacaaacaacgggtttgtccataatgaagacattctggagcagaccccggatccaggcagctcaacagacaacctgaagcacagcaccaggggcatccttggctcccaggagcccgacttcaagggcgtccagccctatgcggggatgcccaaggaggtgctgttccagttctctggccaggcccgctaccgcatacctcgggagatcctcttctggctcacagtggcttctgtgctggtgctcatcgcggccaccatagccatcattgccctctctccaaagtgcctagactggtggcaggaggggcccatgtaccagatctacccaaggtctttcaaggacagtaacaaggatgggaacggagatctgaaaggtattcaagataaactggactacatcacagctttaaatataaaaactgtttggattacttcattttataaatcgtcccttaaagatttcagatatggtgttgaagatttccgggaagttgatcccatttttggaacgatggaagattttgagaatctggttgcagccatacatgataaaggtttaaaattaatcatcgatttcataccaaaccacacgagtgataaacatatttggtttcaattgagtcggacacggacaggaaaatatactgattattatatctggcatgactgtacccatgaaaatggcaaaaccattccacccaacaactggttaagtgtgtatggaaactccagttggcactttgacgaagtgcgaaaccaatgttattttcatcagtttatgaaagagcaacctgatttaaatttccgcaatcctgatgttcaagaagaaataaaagaaattttacggttctggctcacaaagggtgttgatggttttagtttggatgctgttaaattcctcctagaagcaaagcacctgagagatgagatccaagtaaataagacccaaatcccggacacggtcacacaatactcggagctgtaccatgacttcaccaccacgcaggtgggaatgcacgacattgtccgcagcttccggcagaccatggaccaatacagcacggagcccggcagatacaggttcatggggactgaagcctatgcagagagtattgacaggaccgtgatgtactatggattgccatttatccaagaagctgattttcccttcaacaattacctcagcatgctagacactgtttctgggaacagcgtgtatgaggttatcacatcctggatggaaaacatgccagaaggaaaatggcctaactggatgattggtggaccagacagttcacggctgacttcgcgtttggggaatcagtatgtcaacgtgatgaacatgcttcttttcacactccctggaactcctataacttactatggagaagaaattggaatgggaaatattgtagccgcaaatctcaatgaaagctatgatattaatacccttcgctcaaagtcaccaatgcagtgggacaatagttcaaatgctggtttttctgaagctagtaacacctggttacctaccaattcagattaccacactgtgaatgttgatgtaagtatcagtgaaaattttatgttgattctagaaacaaagaaatgggtttctactgaaagtacacactcaccctgaatgtgtctaaaccttaacggatactctttaaatcaatcacagacttccttgcagttttccatttgtaaggagtttgtaaatcatgcctttgtgaaaatacaaactggtacaaatcta

SEQ ID NO: 420675 - DNA, 1616 bp, Homo sapiens
agaccaagcattcagcaagccactcttccacctcccttactgcaggaaggcactccgaagacataagtcggtgagacatggctgaagataaaagcaagagagactccatcgagatgagtatgaagggatgccagacaaacaacgggtttgtccataatgaagacattctggagcagaccccggatccaggcagctcaacagacaacctgaagcacagcaccaggggcatccttggctcccaggagcccgacttcaagggcgtccagccctatgcggggatgcccaaggaggtgctgttccagttctctggccaggcccgctaccgcatacctcgggagatcctcttctggctcacagtggcttctgtgctggtgctcatcgcggccaccatagccatcattgccctctctccaaagtgcctagactggtggcaggaggggcccatgtaccagatctacccaaggtctttcaaggacagtaacaaggatgggaacggagatctgaaaggtattcaagataaactggactacatcacagctttaaatataaaaactgtttggattacttcattttataaatcgtcccttaaagatttcagatatggtgttgaagatttccgggaagttgatcccatttttggaacgatggaagattttgagaatctggttgcagccatacatgataaaggtttaaaattaatcatcgatttcataccaaaccacacgagtgataaacatatttggtttcaattgagtcggacacggacaggaaaatatactgattattatatctggcatgactgtacccatgaaaatggcaaaaccattccacccaacaactggttaagtgtgtatggaaactccagttggcactttgacgaagtgcgaaaccaatgttattttcatcagtttatgaaagagcaacctgatttaaatttccgcaatcctgatgttcaagaagaaataaaagaaattttacggttctggctcacaaagggtgttgatggttttagtttggatgctgttaaattcctcctagaagcaaagcacctgagagatgagatccaagtaaataagacccaaatcccggacacggtcacacaatactcggagctgtaccatgacttcaccaccacgcaggtgggaatgcacgacattgtccgcagcttccggcagaccatggaccaatacagcacggagcccggcagatacaggttcatggggactgaagcctatgcagagagtattgacaggaccgtgatgtactatggattgccatttatccaagaagctgattttcccttcaacaattacctcagcatgctagacactgtttctgggaacagcgtgtatgaggttatcacatcctggatggaaaacatgccagaaggaaaatggcctaactggatgattggtggaccagacagttcacggctgacttcgcgtttggggaatcagtatgtcaacgtgatgaacatgcttcttttcacactccctggaactcctataacttactatggagaagaaattggaatgggaaatattgtagccgcaaatctcaatgaaagctatgatattgtaagttgaatacaacttgactattcatcacagctataa

SEQ ID NO: 420676 - DNA, 1504 bp, Homo sapiens
agaccaagcattcagcaagccactcttccacctcccttactgcaggaaggcactccgaagacataagtcggtgagacatggctgaagataaaagcaagagagactccatcgagatgagtatgaagggatgccagacaaacaacgggtttgtccataatgaagacattctggagcagaccccggatccaggcagctcaacagacaacctgaagcacagcaccaggggcatccttggctcccaggagcccgacttcaagggcgtccagccctatgcggggatgcccaaggaggtgctgttccagttctctggccaggcccgctaccgcatacctcgggagatcctcttctggctcacagtggcttctgtgctggtgctcatcgcggccaccatagccatcattgccctctctccaaagtgcctagactggtggcaggaggggcccatgtaccagatctacccaaggtctttcaaggacagtaacaaggatgggaacggagatctgaaaggtattcaagataaactggactacatcacagctttaaatataaaaactgtttggattacttcattttataaatcgtcccttaaagatttcagatatggtgttgaagatttccgggaagttgatcccatttttggaacgatggaagattttgagaatctggttgcagccatacatgataaaggtttaaaattaatcatcgatttcataccaaaccacacgagtgataaacatatttggtttcaattgagtcggacacggacaggaaaatatactgattattatatctggcatgactgtacccatgaaaatggcaaaaccattccacccaacaactggttaagtgtgtatggaaactccagttggcactttgacgaagtgcgaaaccaatgttattttcatcagtttatgaaagagcaacctgatttaaatttccgcaatcctgatgttcaagaagaaataaaagaaattttacggttctggctcacaaagggtgttgatggttttagtttggatgctgttaaattcctcctagaagcaaagcacctgagagatgagatccaagtaaataagacccaaatcccggacacggtcacacaatactcggagctgtaccatgacttcaccaccacgcaggtgggaatgcacgacattgtccgcagcttccggcagaccatggaccaatacagcacggagcccggcagatacaggttgaccacggcatatgctctcatttcttcccaggcttagtgtgtgatctgcagtgtatccctcacaaccaagtgtatttggaggttcaagtaataatgtaacaagcctgcataactctaattgattacagtttggttgtaccagggcctgccatattcctttcctgtttgcttattttgctgactttcagtttcctcttttgtaaaatgatgcagatcacactacgtacttcacaggagttttgtgaaaattaggttaatgaaaaagagattatattagctaaatgttag

SEQ ID NO: 420677 - DNA, 1066 bp, Homo sapiens
tctgtattttattgtttctgtattcttgtatggttgactttgagtgattcccaggatatttaccctgctattgtcttaccataatcttgatgtgtctagcctcttacaaatgagaaaatcctaccgaggaatttcccatttgtaatagtttgtcttggggagcaaagaggaggatagccaatgatcatgatgatctcctcttttctcacgcagagcaggtgttcatgataaaaagcaagtcttttgtgtcttcatgatctgaagagaggaaacaacacggatcaagatgatcctagacctcctaatcatggggatgattacaaggagttgcagaccctactctctattttgcagtgggtggagttgtggataggggtgacccatcagtcattgagaaatgaatctcctgggtgctacttgtgaaagtgaggatcctctctccctttcctgtggatgcagctgagattctggacagcctagacttcttcctcagtgtcagagtaagattgcctcaatggggcggggcaggacacactgctgacctcaccactgggcgccctgggcagccactgcgaggcctcgtcattttcgagttggtgagacaccgcggcagtcgacttggaagatgctctggtggtagaggttagattatttgtagttttgggggccttttcttcaaatatctgggaatttcattgaaaatatgtagttcaggagtgaaggggtctatattctactttataattatcattatcattttggtatcttttgggagaatggcctaaaattgggaccaagatggaaaagaagggaaaggaatgggtcaatattagaatgcccttcgttatcctttcaacttggtaaaccagagattaataccatagcaccactgtggtgaaagacggggtgggcgttccccaaaggcatgaccagcagacttctctcagattcttgagtgggtcaagcagaccattctggtctggcttctcctctcagatttatttgagtaatcccctcccttggtgataagattgtgtttcagcaagagtggtagtggtaccattcc

SEQ ID NO: 420678 - DNA, 2863 bp, Homo sapiens
ctccggattcttattggcccaacccgccgtcggtcggcggcgagtccgccccctcagaaccttacatttacagtgtagcaaaagagaaagtaactatgttgctgctggagatcaatgaagccgagtgaatgggggctgaatgtgcgagtccatagctgaagaggagcgccagatggtggaggaatacacttatttatgaaactgtcttgagttcttcttgaattgccagttttcagcctcctcatgcctccgtctcctttagacgacagggtagtagtggcactatctaggcccgtccgacctcaggatctcaacctttgtttagactctagttaccttggctctgccaacccaggcagtaacagccaccctcctgtcatcgccaccaccgttgtgtccctcaaggctgcgaatctgacgtatatgccctcatccagcggctctgcccgctcgctgaattgtggatgcagcagtgccagctgctgcactgtggcaacctacgacaaggacaatcaggcccaaacccaagccattgccgctggcaccaccaccactgccatcggaacctctaccacctgccctgctaaccagatggtcaacaataatgagaatacaggctctctaagtccatcaagtggggtgggcagccctgtgtcagggacccccaagcagctagccagcatcaaaataatctaccccaatgacttggcaaagaagatgaccaaatgcagcaagagtcacctgccgagtcagggccctgtcatcattgactgcaggcccttcatggagtacaacaagagtcacatccaaggagctgtccacattaactgtgccgataagatcagccggcggagactgcagcagggcaagatcactgtcctagacttgatttcctgtagggaaggcaaggactctttcaagaggatcttttccaaagaaattatagtttatgatgagaataccaatgaaccaagccgagtgatgccctcccagccacttcacatagtcctcgagtccctgaagagagaaggcaaagaacctctggtgttgaaaggtggacttagtagttttaagcagaaccatgaaaacctctgtgacaactccctccagctccaagagtgccgggaggtggggggcggcgcatccgcggcctcgagcttgctacctcagcccatccccaccacccctgacatcgagaacgctgagctcacccccatcttgcccttcctgttccttggcaatgagcaggatgctcaggacctggacaccatgcagcggctgaacatcggctacgtcatcaacgtcaccactcatcttcccctctaccactatgagaaaggcctgttcaactacaagcggctgccagccactgacagcaacaagcagaacctgcggcagtactttgaagaggcttttgagttcattgaggaagctcaccagtgtgggaaggggcttctcatccactgccaggctggggtgtcccgctccgccaccatcgtcatcgcttacttgatgaagcacactcggatgaccatgactgatgcttataaatttgtcaaaggcaaacgaccaattatctccccaaaccttaacttcatggggcagttgctagagttcgaggaagacctaaacaacggtgtgacaccgagaatccttacaccaaagctgatgggcgtggagacggttgtgtgacaatggtctggatggaaaggattgctgctctccattaggagacaatgaggaaggaggatggattctggttttttttctttctttttttttttgtagttgggagtaagtttgtgaatggaaacaaacttgtttaaacactttatttttaacaagtgtaagaagactataacttttgatgccattgagattcacctcccacaaactgacaaattaaggaggttaaagaagtaatttttttaagccaacaataaaaatataatacaacttgtttctcccccttttccttttaagctatttgtagagtttatgactaaatagtctgtgcaggttcatagaccgaagatactacacactttaaaccaattaaaaagaaccaaaagtaaatagaaaagacattgaatcaccaaggcctgggatcaacctgggctgtccacacagaaaacaaaaacccaaccaaaccaagccctgttgtgctcactggtgcaaagagaagatcagggcagcttaagtggtctaagaatccttcaggcattctttaaggagaaaaaggatacctttgattttgtgtgtttcatgctctggattttttttttttttccttctctgggtttaagagattttttttgaaatagtgaggaactgaccattatatgccttcactggcttcttgtgcaataatatgatgttttaagtgtgcaaacaagttagagctggcagctgaatgatagacaaatagtgcaaatttgccagcttggagatagaaaggaattcaacaatatatcaaatactttccttcccacctttttccttttttttttttttttctgatttgattctggttacagtgccataaaccttgttacatatgtatatcagaatgtaagaaaaaaaaatttatttaaaaatatttttcgcaaaaaaaaaaaaaatcttggtgtgtttctgttgattgtgtaaaaatttattttcattatataaatgaaactggtttaggatgtgtctttttttcccctctcttttaccttaactcaggttcaagcctttcttaagctctggtaacttgcatatacaacaaagttgaaataaaacagatttttatatagggaaagagagatgaggaagggaacatatccagttttctcactgtgaaacagagttagcaaggaagtgg

SEQ ID NO: 420679 - DNA, 1954 bp, Homo sapiens
ctccggattcttattggcccaacccgccgtcggtcggcggcgagtccgccccctcagaaccttacatttacagtgtagcaaaagagaaagtaactatgttgctgctggagatcaatgaagccgagtgaatgggggctgaatgtgcgagtccatagctgaagaggagcgccagatggtggaggaatacacttatttatgaaactgtcttgagttcttcttgaattgccagttttcagcctcctcatgcctccgtctcctttagacgacagggtagtagtggcactatctaggcccgtccgacctcaggatctcaacctttgtttagactctagttaccttggctctgccaacccaggcagtaacagccaccctcctgtcatcgccaccaccgttgtgtccctcaaggctgcgaatctgacgtatatgccctcatccagcggctctgcccgctcgctgaattgtggatgcagcagtgccagctgctgcactgtggcaacctacgacaaggacaatcaggcccaaacccaagccattgccgctggcaccaccaccactgccatcggaacctctaccacctgccctgctaaccagatggtcaacaataatgagaatacaggctctctaagtccatcaagtggggtgggcagccctgtgtcagggacccccaagcagctagccagcatcaaaataatctaccccaatgacttggcaaagaagatgaccaaatgcagcaagagtcacctgccgagtcagggccctgtcatcattgactgcaggcccttcatggagtacaacaagagtcacatccaaggagctgtccacattaactgtgccgataagatcagccggcggagactgcagcagggcaagatcactgtcctagacttgatttcctgtagggaaggcaaggactctttcaagaggatcttttccaaagaaattatagtttatgatgagaataccaatgaaccaagccgagtgatgccctcccagccacttcacatagtcctcgagtccctgaagagagaaggcaaagaacctctggtgttgaaaggtggacttagtagttttaagcagaaccatgaaaacctctgtgacaactccctccagctccaagagtgccgggaggtggggggcggcgcatccgcggcctcgagcttgctacctcagcccatccccaccacccctgacatcgagaacgctgagctcacccccatcttgcccttcctgttccttggcaatgagcaggatgctcaggacctggacaccatgcagcggctgaacatcggctacgtcatcaacgtcaccactcatcttcccctctaccactatgagaaaggcctgttcaactacaagcggctgccagccactgacagcaacaagcagaacctgcggcagtactttgaagaggcttttgagttcattgaggaagctcaccagtgtgggaaggggcttctcatccactgccaggctggggtgtcccgctccgccaccatcgtcatcgcttacttgatgaagcacactcggatgaccatgactgatgcttataaatttgtcaaaggcaaacgaccaattatctccccaaaccttaacttcatggggcagttgctagagttcgaggaagacctaaacaacggtgtgacaccgagaatccttacaccaaagctgatgggcgtggagacggttgtgtgacaatggtctggatggaaaggattgctgctctccattaggagacaatgaggaaggaggatggattctggttttttttctttctttttttttttgtagttgggagtaagtttgtgaatggaaacaaacttgtttaaacactttatttttaacaagtgtaagaagactataacttttgatgccattgagattcacctcccacaaactgacaaattaaggaggttaaagaagtaatttttttaagccaacaataaaaatataatac

SEQ ID NO: 420680 - DNA, 1989 bp, Homo sapiens
gtataaacaaaatagtatgcaacttacagcaatgtctctcccacttataataaaacacctaactctcatgtagcattttatccatattgagagctctgtgagatagaaattattatattacaagtcacagatatgtaaactgagatgcagagacatcaataacttgctcaaggttacaaggtggacttagtagttttaagcagaaccatgaaaacctctgtgacaactccctccagctccaagagtgccgggaggtggggggcggcgcatccgcggcctcgagcttgctacctcagcccatccccaccacccctgacatcgagaacgctgagctcacccccatcttgcccttcctgttccttggcaatgagcaggatgctcaggacctggacaccatgcagcggctgaacatcggctacgtcatcaacgtcaccactcatcttcccctctaccactatgagaaaggcctgttcaactacaagcggctgccagccactgacagcaacaagcagaacctgcggcagtactttgaagaggcttttgagttcattgaggaagctcaccagtgtgggaaggggcttctcatccactgccaggctggggtgtcccgctccgccaccatcgtcatcgcttacttgatgaagcacactcggatgaccatgactgatgcttataaatttgtcaaaggcaaacgaccaattatctccccaaaccttaacttcatggggcagttgctagagttcgaggaagacctaaacaacggtgtgacaccgagaatccttacaccaaagctgatgggcgtggagacggttgtgtgacaatggtctggatggaaaggattgctgctctccattaggagacaatgaggaaggaggatggattctggttttttttctttctttttttttttgtagttgggagtaagtttgtgaatggaaacaaacttgtttaaacactttatttttaacaagtgtaagaagactataacttttgatgccattgagattcacctcccacaaactgacaaattaaggaggttaaagaagtaatttttttaagccaacaataaaaatataatacaacttgtttctcccccttttccttttaagctatttgtagagtttatgactaaatagtctgtgcaggttcatagaccgaagatactacacactttaaaccaattaaaaagaaccaaaagtaaatagaaaagacattgaatcaccaaggcctgggatcaacctgggctgtccacacagaaaacaaaaacccaaccaaaccaagccctgttgtgctcactggtgcaaagagaagatcagggcagcttaagtggtctaagaatccttcaggcattctttaaggagaaaaaggatacctttgattttgtgtgtttcatgctctggattttttttttttttccttctctgggtttaagagattttttttgaaatagtgaggaactgaccattatatgccttcactggcttcttgtgcaataatatgatgttttaagtgtgcaaacaagttagagctggcagctgaatgatagacaaatagtgcaaatttgccagcttggagatagaaaggaattcaacaatatatcaaatactttccttcccacctttttccttttttttttttttttctgatttgattctggttacagtgccataaaccttgttacatatgtatatcagaatgtaagaaaaaaaaatttatttaaaaatatttttcgcaaaaaaaaaaaaaatcttggtgtgtttctgttgattgtgtaaaaatttattttcattatataaatgaaactggtttaggatgtgtctttttttcccctctcttttaccttaactcaggttcaagcctttcttaagctctggtaacttgcatatacaacaaagttgaaataaaacagatttttatatagggaaagagagatgaggaagggaacatatccagttttctcactgtgaaacagagttagcaaggaagtgg

SEQ ID NO: 420681 - DNA, 2009 bp, Homo sapiens
ctccggattcttattggcccaacccgccgtcggtcggcggcgagtccgccccctcagaaccttacatttacagtgtagcaaaagagaaagtaactatgttgctgctggagatcaatgaagccgagtgaatgggggctgaatgtgcgagtccatagctgaagaggagcgccagatggtggaggaatacacttatttatgaagtggacttagtagttttaagcagaaccatgaaaacctctgtgacaactccctccagctccaagagtgccgggaggtggggggcggcgcatccgcggcctcgagcttgctacctcagcccatccccaccacccctgacatcgagaacgctgagctcacccccatcttgcccttcctgttccttggcaatgagcaggatgctcaggacctggacaccatgcagcggctgaacatcggctacgtcatcaacgtcaccactcatcttcccctctaccactatgagaaaggcctgttcaactacaagcggctgccagccactgacagcaacaagcagaacctgcggcagtactttgaagaggcttttgagttcattgaggaagctcaccagtgtgggaaggggcttctcatccactgccaggctggggtgtcccgctccgccaccatcgtcatcgcttacttgatgaagcacactcggatgaccatgactgatgcttataaatttgtcaaaggcaaacgaccaattatctccccaaaccttaacttcatggggcagttgctagagttcgaggaagacctaaacaacggtgtgacaccgagaatccttacaccaaagctgatgggcgtggagacggttgtgtgacaatggtctggatggaaaggattgctgctctccattaggagacaatgaggaaggaggatggattctggttttttttctttctttttttttttgtagttgggagtaagtttgtgaatggaaacaaacttgtttaaacactttatttttaacaagtgtaagaagactataacttttgatgccattgagattcacctcccacaaactgacaaattaaggaggttaaagaagtaatttttttaagccaacaataaaaatataatacaacttgtttctcccccttttccttttaagctatttgtagagtttatgactaaatagtctgtgcaggttcatagaccgaagatactacacactttaaaccaattaaaaagaaccaaaagtaaatagaaaagacattgaatcaccaaggcctgggatcaacctgggctgtccacacagaaaacaaaaacccaaccaaaccaagccctgttgtgctcactggtgcaaagagaagatcagggcagcttaagtggtctaagaatccttcaggcattctttaaggagaaaaaggatacctttgattttgtgtgtttcatgctctggattttttttttttttccttctctgggtttaagagattttttttgaaatagtgaggaactgaccattatatgccttcactggcttcttgtgcaataatatgatgttttaagtgtgcaaacaagttagagctggcagctgaatgatagacaaatagtgcaaatttgccagcttggagatagaaaggaattcaacaatatatcaaatactttccttcccacctttttccttttttttttttttttctgatttgattctggttacagtgccataaaccttgttacatatgtatatcagaatgtaagaaaaaaaaatttatttaaaaatatttttcgcaaaaaaaaaaaaaatcttggtgtgtttctgttgattgtgtaaaaatttattttcattatataaatgaaactggtttaggatgtgtctttttttcccctctcttttaccttaactcaggttcaagcctttcttaagctctggtaacttgcatatacaacaaagttgaaataaaacagatttttatatagggaaagagagatgaggaagggaacatatccagttttctcactgtgaaacagagttagcaaggaagtgg

SEQ ID NO: 420682 - DNA, 1100 bp, Homo sapiens
ctccggattcttattggcccaacccgccgtcggtcggcggcgagtccgccccctcagaaccttacatttacagtgtagcaaaagagaaagtaactatgttgctgctggagatcaatgaagccgagtgaatgggggctgaatgtgcgagtccatagctgaagaggagcgccagatggtggaggaatacacttatttatgaagtggacttagtagttttaagcagaaccatgaaaacctctgtgacaactccctccagctccaagagtgccgggaggtggggggcggcgcatccgcggcctcgagcttgctacctcagcccatccccaccacccctgacatcgagaacgctgagctcacccccatcttgcccttcctgttccttggcaatgagcaggatgctcaggacctggacaccatgcagcggctgaacatcggctacgtcatcaacgtcaccactcatcttcccctctaccactatgagaaaggcctgttcaactacaagcggctgccagccactgacagcaacaagcagaacctgcggcagtactttgaagaggcttttgagttcattgaggaagctcaccagtgtgggaaggggcttctcatccactgccaggctggggtgtcccgctccgccaccatcgtcatcgcttacttgatgaagcacactcggatgaccatgactgatgcttataaatttgtcaaaggcaaacgaccaattatctccccaaaccttaacttcatggggcagttgctagagttcgaggaagacctaaacaacggtgtgacaccgagaatccttacaccaaagctgatgggcgtggagacggttgtgtgacaatggtctggatggaaaggattgctgctctccattaggagacaatgaggaaggaggatggattctggttttttttctttctttttttttttgtagttgggagtaagtttgtgaatggaaacaaacttgtttaaacactttatttttaacaagtgtaagaagactataacttttgatgccattgagattcacctcccacaaactgacaaattaaggaggttaaagaagtaatttttttaagccaacaataaaaatataatac

SEQ ID NO: 420683 - DNA, 1239 bp, Homo sapiens
caatgaattacgaaattcgaggctcggtaaccccacaggggctgatgggcgtggagacggttgtgtgacaatggtctggatggaaaggattgctgctctccattaggagacaatgaggaaggaggatggattctggttttttttctttctttttttttttgtagttgggagtaagtttgtgaatggaaacaaacttgtttaaacactttatttttaacaagtgtaagaagactataacttttgatgccattgagattcacctcccacaaactgacaaattaaggaggttaaagaagtaatttttttaagccaacaataaaaatataatacaacttgtttctcccccttttccttttaagctatttgtagagtttatgactaaatagtctgtgcaggttcatagaccgaagatactacacactttaaaccaattaaaaagaaccaaaagtaaatagaaaagacattgaatcaccaaggcctgggatcaacctgggctgtccacacagaaaacaaaaacccaaccaaaccaagccctgttgtgctcactggtgcaaagagaagatcagggcagcttaagtggtctaagaatccttcaggcattctttaaggagaaaaaggatacctttgattttgtgtgtttcatgctctggattttttttttttttccttctctgggtttaagagattttttttgaaatagtgaggaactgaccattatatgccttcactggcttcttgtgcaataatatgatgttttaagtgtgcaaacaagttagagctggcagctgaatgatagacaaatagtgcaaatttgccagcttggagatagaaaggaattcaacaatatatcaaatactttccttcccacctttttccttttttttttttttttctgatttgattctggttacagtgccataaaccttgttacatatgtatatcagaatgtaagaaaaaaaaatttatttaaaaatatttttcgcaaaaaaaaaaaaaatcttggtgtgtttctgttgattgtgtaaaaatttattttcattatataaatgaaactggtttaggatgtgtctttttttcccctctcttttaccttaactcaggttcaagcctttcttaagctctggtaacttgcatatacaacaaagttgaaataaaacagatttttatatagggaaagagagatgaggaagggaacatatccagttttctcactgtgaaacagagttagcaaggaagtgg

SEQ ID NO: 420684 - DNA, 823 bp, Homo sapiens
ctccggattcttattggcccaacccgccgtcggtcggcggcgagtccgccccctcagaaccttacatttacagtgtagcaaaagagaaagtaactatgttgctgctggagatcaatgaagccgagtgaatgggggctgaatgtgcgagtccatagctgaagaggagcgccagatggtggaggaatacacttatttatgaaactgtcttgagttcttcttgaattgccagttttcagcctcctcatgcctccgtctcctttagacgacagggtagtagtggcactatctaggcccgtccgacctcaggatctcaacctttgtttagactctagttaccttggctctgccaacccaggcagtaacagccaccctcctgtcatcgccaccaccgttgtgtccctcaaggctgcgaatctgacgtatatgccctcatccagcggctctgcccgctcgctgaattgtggatgcagcagtgccagctgctgcactgtggcaacctactctggtaattaaaagttggattcaaggaaaactatgaactcccacatttgttcattctcctttccatccctgaattctgtcttttgtaatgtagaccttgtgtgacccacacagcaaaatttaaaaaatgtacccacttcagatttccccacctatccaacctaatctgatatctcatcctgacagactgcagctgccaagaagaagattcctgtgctgctctcaggaaaatatgtcccacttgttttctaattcaataaagatactggtttaaatgtgaaggcacacaagagaaagatgaagccaaaggtggtcgcgggtt

SEQ ID NO: 420685 - DNA, 2810 bp, Homo sapiens
ctccggattcttattggcccaacccgccgtcggtcggcggcgagtccgccccctcagaaccttacatttacagtgtagcaaaagagaaagtaactatgttgctgctggagatcaatgaagccgagtgaatgggggctgaatgtgcgagtccatagctgaagaggagcgccagatggtggaggaatacacttatttatgaaactgtcttgagttcttcttgaattgccagttttcagcctcctcatgcctccgtctcctttagacgacagggtagtagtggcactatctaggcccgtccgacctcaggatctcaacctttgtttagactctagttaccttggctctgccaacccaggcagtaacagccaccctcctgtcatcgccaccaccgttgtgtccctcaaggctgcgaatctgacgtatatgccctcatccagcggctctgcccgctcgctgaattgtggatgcagcagtgccagctgctgcactgtggcaacctacgacaaggacaatcaggcccaaacccaagccattgccgctggcaccaccaccactgccatcggaacctctaccacctgccctgctaaccagatggtcaacaataatgagaatacaggctctctaagtccatcaagtggggtgggcagccctgtgtcagggacccccaagcagctagccagcatctcacctgccgagtcagggccctgtcatcattgactgcaggcccttcatggagtacaacaagagtcacatccaaggagctgtccacattaactgtgccgataagatcagccggcggagactgcagcagggcaagatcactgtcctagacttgatttcctgtagggaaggcaaggactctttcaagaggatcttttccaaagaaattatagtttatgatgagaataccaatgaaccaagccgagtgatgccctcccagccacttcacatagtcctcgagtccctgaagagagaaggcaaagaacctctggtgttgaaaggtggacttagtagttttaagcagaaccatgaaaacctctgtgacaactccctccagctccaagagtgccgggaggtggggggcggcgcatccgcggcctcgagcttgctacctcagcccatccccaccacccctgacatcgagaacgctgagctcacccccatcttgcccttcctgttccttggcaatgagcaggatgctcaggacctggacaccatgcagcggctgaacatcggctacgtcatcaacgtcaccactcatcttcccctctaccactatgagaaaggcctgttcaactacaagcggctgccagccactgacagcaacaagcagaacctgcggcagtactttgaagaggcttttgagttcattgaggaagctcaccagtgtgggaaggggcttctcatccactgccaggctggggtgtcccgctccgccaccatcgtcatcgcttacttgatgaagcacactcggatgaccatgactgatgcttataaatttgtcaaaggcaaacgaccaattatctccccaaaccttaacttcatggggcagttgctagagttcgaggaagacctaaacaacggtgtgacaccgagaatccttacaccaaagctgatgggcgtggagacggttgtgtgacaatggtctggatggaaaggattgctgctctccattaggagacaatgaggaaggaggatggattctggttttttttctttctttttttttttgtagttgggagtaagtttgtgaatggaaacaaacttgtttaaacactttatttttaacaagtgtaagaagactataacttttgatgccattgagattcacctcccacaaactgacaaattaaggaggttaaagaagtaatttttttaagccaacaataaaaatataatacaacttgtttctcccccttttccttttaagctatttgtagagtttatgactaaatagtctgtgcaggttcatagaccgaagatactacacactttaaaccaattaaaaagaaccaaaagtaaatagaaaagacattgaatcaccaaggcctgggatcaacctgggctgtccacacagaaaacaaaaacccaaccaaaccaagccctgttgtgctcactggtgcaaagagaagatcagggcagcttaagtggtctaagaatccttcaggcattctttaaggagaaaaaggatacctttgattttgtgtgtttcatgctctggattttttttttttttccttctctgggtttaagagattttttttgaaatagtgaggaactgaccattatatgccttcactggcttcttgtgcaataatatgatgttttaagtgtgcaaacaagttagagctggcagctgaatgatagacaaatagtgcaaatttgccagcttggagatagaaaggaattcaacaatatatcaaatactttccttcccacctttttccttttttttttttttttctgatttgattctggttacagtgccataaaccttgttacatatgtatatcagaatgtaagaaaaaaaaatttatttaaaaatatttttcgcaaaaaaaaaaaaaatcttggtgtgtttctgttgattgtgtaaaaatttattttcattatataaatgaaactggtttaggatgtgtctttttttcccctctcttttaccttaactcaggttcaagcctttcttaagctctggtaacttgcatatacaacaaagttgaaataaaacagatttttatatagggaaagagagatgaggaagggaacatatccagttttctcactgtgaaacagagttagcaaggaagtgg

SEQ ID NO: 420686 - DNA, 2451 bp, Homo sapiens
tctgtattttattgtttctgtattcttgtatggttgactttgagtgattcccaggatatttaccctgctattgtcttaccataatcttgatgtgtctagcctcttacaaatgagaaaatcctaccgaggaatttcccatttgtaatagtttgtcttggggagcaaagaggaggatagccaatgatcatgatgatctcctcttttctcacgcagagcaggtgttcatgataaaaagcaagtcttttgtgtcttcatgatctgaagagaggaaacaacacggatcaagatgatcctagacctcctaatcatggggatgattacaaggagttgcagaccctactctctattttgcagtgggtggagttgtggataggggtgacccatcagtcattgagaaatgaatctcctgggtgctacttgtgaaagtgaggatcctctctccctttcctgtggatgcagctgagattctggacagcctagacttcttcctcagtgtcagagtaagattgcctcaatggggcggggcaggacacactgctgacctcaccactgggcgccctgggcagccactgcgaggcctcgtcattttcgagttggtgagacaccgcggcagtcgacttggaagatgctctggtggtagaggtggacttagtagttttaagcagaaccatgaaaacctctgtgacaactccctccagctccaagagtgccgggaggtggggggcggcgcatccgcggcctcgagcttgctacctcagcccatccccaccacccctgacatcgagaacgctgagctcacccccatcttgcccttcctgttccttggcaatgagcaggatgctcaggacctggacaccatgcagcggctgaacatcggctacgtcatcaacgtcaccactcatcttcccctctaccactatgagaaaggcctgttcaactacaagcggctgccagccactgacagcaacaagcagaacctgcggcagtactttgaagaggcttttgagttcattgaggaagctcaccagtgtgggaaggggcttctcatccactgccaggctggggtgtcccgctccgccaccatcgtcatcgcttacttgatgaagcacactcggatgaccatgactgatgcttataaatttgtcaaaggcaaacgaccaattatctccccaaaccttaacttcatggggcagttgctagagttcgaggaagacctaaacaacggtgtgacaccgagaatccttacaccaaagctgatgggcgtggagacggttgtgtgacaatggtctggatggaaaggattgctgctctccattaggagacaatgaggaaggaggatggattctggttttttttctttctttttttttttgtagttgggagtaagtttgtgaatggaaacaaacttgtttaaacactttatttttaacaagtgtaagaagactataacttttgatgccattgagattcacctcccacaaactgacaaattaaggaggttaaagaagtaatttttttaagccaacaataaaaatataatacaacttgtttctcccccttttccttttaagctatttgtagagtttatgactaaatagtctgtgcaggttcatagaccgaagatactacacactttaaaccaattaaaaagaaccaaaagtaaatagaaaagacattgaatcaccaaggcctgggatcaacctgggctgtccacacagaaaacaaaaacccaaccaaaccaagccctgttgtgctcactggtgcaaagagaagatcagggcagcttaagtggtctaagaatccttcaggcattctttaaggagaaaaaggatacctttgattttgtgtgtttcatgctctggattttttttttttttccttctctgggtttaagagattttttttgaaatagtgaggaactgaccattatatgccttcactggcttcttgtgcaataatatgatgttttaagtgtgcaaacaagttagagctggcagctgaatgatagacaaatagtgcaaatttgccagcttggagatagaaaggaattcaacaatatatcaaatactttccttcccacctttttccttttttttttttttttctgatttgattctggttacagtgccataaaccttgttacatatgtatatcagaatgtaagaaaaaaaaatttatttaaaaatatttttcgcaaaaaaaaaaaaaatcttggtgtgtttctgttgattgtgtaaaaatttattttcattatataaatgaaactggtttaggatgtgtctttttttcccctctcttttaccttaactcaggttcaagcctttcttaagctctggtaacttgcatatacaacaaagttgaaataaaacagatttttatatagggaaagagagatgaggaagggaacatatccagttttctcactgtgaaacagagttagcaaggaagtgg

SEQ ID NO: 420687 - DNA, 1841 bp, Homo sapiens
tctacttggatttggggcgaagaaaaaatgaggtggacttagtagttttaagcagaaccatgaaaacctctgtgacaactccctccagctccaagagtgccgggaggtggggggcggcgcatccgcggcctcgagcttgctacctcagcccatccccaccacccctgacatcgagaacgctgagctcacccccatcttgcccttcctgttccttggcaatgagcaggatgctcaggacctggacaccatgcagcggctgaacatcggctacgtcatcaacgtcaccactcatcttcccctctaccactatgagaaaggcctgttcaactacaagcggctgccagccactgacagcaacaagcagaacctgcggcagtactttgaagaggcttttgagttcattgaggaagctcaccagtgtgggaaggggcttctcatccactgccaggctggggtgtcccgctccgccaccatcgtcatcgcttacttgatgaagcacactcggatgaccatgactgatgcttataaatttgtcaaaggcaaacgaccaattatctccccaaaccttaacttcatggggcagttgctagagttcgaggaagacctaaacaacggtgtgacaccgagaatccttacaccaaagctgatgggcgtggagacggttgtgtgacaatggtctggatggaaaggattgctgctctccattaggagacaatgaggaaggaggatggattctggttttttttctttctttttttttttgtagttgggagtaagtttgtgaatggaaacaaacttgtttaaacactttatttttaacaagtgtaagaagactataacttttgatgccattgagattcacctcccacaaactgacaaattaaggaggttaaagaagtaatttttttaagccaacaataaaaatataatacaacttgtttctcccccttttccttttaagctatttgtagagtttatgactaaatagtctgtgcaggttcatagaccgaagatactacacactttaaaccaattaaaaagaaccaaaagtaaatagaaaagacattgaatcaccaaggcctgggatcaacctgggctgtccacacagaaaacaaaaacccaaccaaaccaagccctgttgtgctcactggtgcaaagagaagatcagggcagcttaagtggtctaagaatccttcaggcattctttaaggagaaaaaggatacctttgattttgtgtgtttcatgctctggattttttttttttttccttctctgggtttaagagattttttttgaaatagtgaggaactgaccattatatgccttcactggcttcttgtgcaataatatgatgttttaagtgtgcaaacaagttagagctggcagctgaatgatagacaaatagtgcaaatttgccagcttggagatagaaaggaattcaacaatatatcaaatactttccttcccacctttttccttttttttttttttttctgatttgattctggttacagtgccataaaccttgttacatatgtatatcagaatgtaagaaaaaaaaatttatttaaaaatatttttcgcaaaaaaaaaaaaaatcttggtgtgtttctgttgattgtgtaaaaatttattttcattatataaatgaaactggtttaggatgtgtctttttttcccctctcttttaccttaactcaggttcaagcctttcttaagctctggtaacttgcatatacaacaaagttgaaataaaacagatttttatatagggaaagagagatgaggaagggaacatatccagttttctcactgtgaaacagagttagcaaggaagtgg

SEQ ID NO: 420688 - DNA, 5969 bp, Homo sapiens
gtaactggaagtacaagattggttatttaataatgttaaaaatgaggctttgaaaagcagaggtgctgttatcagaatagtcttctgggtataaattaaaaatgactgaagttcaagcaatggtagaattctctgtggagctaaacaagttctacaatgtggatttgtttcagagaggtttttaccagattcgtgcttctatgaaaattccatcaagaattccccacagagtagaagctagtttgttgcatgcaacaggtatgactttagcctttccagcctcagttcatgattctctaatttgcagtaaaacatttcaaattttgtacaaaaatgaagaggttgttttaaatgatgttatgatcttcaaagtaaaaatgctattggatgaaagaaagattgaagaaacccttgaggaaatgaattttctattatccttggatctacacttcacagatggagattattcggcagatgatctgaatgccttgcaactaataagtagccgaacattgaagctgcactttagcccccatagaggccttcatcatcatgttaatgttatgtttgattacttccacctttctgttgtgtctgttacagttcatgcatcattggttgcactacaccagccactaataagctttcctcgccctgtgaagacaacttggttaaatagaaatgcaccagcacaaaacaaagattccgtgattcctactcttgaaagtgtggtctttggtattaactacacaaaacagttatcaccagatggttgtagcttcatcattgcagactccttcctacatcatgcgtatcgttttcattatacactttgtgccactttgctgctagccttcaagggattgcacagctacttcattacagtaacagaagagattccttcttgtcagaaactagaactggaggaaatggatgtagaagctcgacttactgaactatgtgaagaagttaagaaaatagagaatcctgatgaactggcagaacttataaatatgaatcttgcgcaactttgctcacttttgatggctttatggggacagtttctggaagttataacgctacacgaagaactaagaatattattagcacaagagcaccatactttgagggtacgcagattttctgaggcattcttttgttttgagcatccaagagaagctgccattgcataccaggaacttcatgctcagagtcatctacagatgtgcaccgctatcaaaaatacttccttctgcagttctcttccacccttacctattgaatgtagtgaattagatggagatctcaattcattacctataatctttgaagataggtatttagattcagttactgaagacttagatgcaccctggatgggaattcagaatcttcagagatcagagtccagtaaaatggataaatatgagactgaagaaagctctgtagcaggactttctagcccagagttgaaagtcagacctgctggtgcctccagtatttggtatacagaaggtgaaaagcagctaacaaaatctctaaaaggaaagaatgaagaatcaaataaatccaaagttaaggttactaagcttatgaaaacaatgaaatctgaaaacacaaaaaaattaataaaacagaactctaaggattctgtggttttggtaggctacaaatgtttgaaaagtacagcatcaaatgatctcattaaatgctttgaaggcaatccttcacatagtcagaaggaaggtctggatcccacaatatgtggatataattttgacccaaagacctacatgagacagacaagtcaaaaggaagctagctgtttgccaactaatacagagagaactgaacaaaagtctccagatattgaaaatgttcaaccagaccagtttgatcctttgaactctggcaacctaaatctttgtgcaaatttgtccatttcaggtaaacttgatatctcccaggacgatagtgaaattacacaaatggaacacaatctggcatccagaaggtcatcagacgattgccatgatcatcaaacaaccccatctttgggagttagaacaattgaaataaagcccagtaataaagatcctttcagtggagagaatataactgtcaaactaggaccttggacagagcttcgacaagaggaaatacttgtggataatttactacccaactttgagtccttagaatctaatggtaaatctaaatctatagaaataacatttgaaaaggaagctttgcaagaagcaaagtgtctttctattggagaatcattaactaaattacgaagtaatctacctgccccttctacaaaagaatatcatgttgtagtaagtggagatacaattaagttaccagatattagtgccacatatgcctcatctagattttcagattcaggtgttgaaagtgaaccgagttcttttgcgacacatccaaacactgatttagtctttgaaactgtgcaagggcaaggtccttgcaatagtgaaagattatttcctcagcttttgatgaaacctgattataatgtaaaattttcattaggaaatcattgtactgagagtacaagtgctataagtgaaatacagtcatctttgacatccataaactctctaccctccgatgatgaactgtcacctgatgaaaattctaagaaatctgttgtacctgaatgccatctaaatgatagcaaaactgtattaaatctaggaacgactgatttgccaaaatgtgatgatactaaaaagtcaagtatcactttgcaacagcagagtgttgtattttcagggaacttggacaatgaaactgtagcaatacattccttaaattcaagcattaaagaccctttacaatttgttttttcagatgaagagacttccagtgatgtgaaaagtagttgcagctccaaacctaacttggatactatgtgtaaaggcttccagagtcctgataaatctaataactctacagggacagcaattacattaaattcaaaactgatttgtttaggcactccttgtgtcatttcaggttccatttctagtaatacagatgttagtgaagatagaactatgaaaaaaaatagtgatgtattaaatctcacacagatgtattcagaaatccctacagttgaaagtgaaactcatctgggtacaagtgatcctttttcagccagtactgatatagtaaagcaagggcttgtggaaaattattttggttctcaaagcagtacggatatttctgacacatgtgctgttagctacagcaatgcacttagccctcagaaggaaacttctgaaaaagaaattagtaatcttcagcaggaacaggataaagaggatgaggaggaagagcaggatcaacaaatggttcaaaatgggtactatgaagaaacagattattcagctttggatggaacaataaatgctcactatacaagcagagatgaactaatggaagaaagacttacaaaatctgaaaaaataaacagtgactatctgagagatggtataaacatgcctactgtctgtacttctggttgtttgtccttcccgtctgcaccacgagagtctccttgtaatgttaaatattcttccaaaagtaaatttgatgccattacaaagcagccaagcagtacttcttacaacttcacttcttcgatttcctggtatgaaagttcaccaaaacctcaaatacaagccttccttcaggcaaaagaagaactgaagctactaaaacttcctgggttcatgtacagtgaagttcctctgctggcatcctcagtaccttattttagtgtagaagaagagggtggttctgaagatggagtacatctgattgtctgtgtgcacggtttagatggaaacagtgcagatctccgattagtaaaaacttacattgaacttggattgcctgggggaagaattgattttcttatgtctgagagaaatcagaatgatacttttgctgattttgatagcatgactgatcgtcttttggatgagataatacagtatattcagatatatagtctaacagtctcaaaaataagctttattggacattcgttgggcaatttaataattcgttcagtgcttacaaggccaaggtttaaatattacctcaacaaacttcatacctttctgtctctttctggacctcaccttggtacactctacaacagcagtgctcttgttaatacaggtctctggtttatgcagaaatggaaaaaatcaggttcgcttttgcagctgacatgtcgagatcactcagaccctcgccaaacttttttatataagcttagtaacaaagcagggcttcattatttcaaaaatgttgtgctagtgggatccctacaggatcgctatgttccttatcactctgcccgcattgaaatgtgtaaaacagctttaaaggacaaacagtcaggacagatctattcagaaatgatccacaacttgcttcgacccgttctgcaaagcaaggactgtaatttggttcgctataatgtcatcaatgcattgcccaatacagctgattcactcattgggagagctgcacatatagctgttcttgattcggaaatatttttagagaaattctttctggttgctgccctcaaatatttccaatagtataaaagcattgttagcgactggacaattacctcattcaacaatgtttcaaataatgtattatattaaaatgtagatgctgataagttctaagaaatatttatacctttttatatggaagataatttatatcatccatgtttagtgctttttaaacatcaactttactttctaggtaatgtggctgtgcaatatttttttaattttatctttttacttttctattactttttcatatattttgctacctaagtatttcagtgaaactttaagcccatacctgtgtctgattgtttattattggctttccacaattcttacatcagactacattatattagagaccattattgctagaatagcatgggatttaaaattttctaatactgggggtattatttagttaattataaatttttcttttcacattttactgtgttttaactggaaataaaattatggctgctacaatatattttttgaaatcaacttctgtagttctaaaatacaactttatcatacaatcaaaccaggtagttcatataaaacagtgtaatacaagttttctataaagtcattactgttgcttaaacatatttcatgcctattaaaatatattttctactggtgatttcaacattatttctcatactgacttttattactggaaatgttcctgtacatgttggcagcagataaagatttttgaatgtttgaatgccctctgccttgatttggttggaatttttgctaaattggtaatgttgcttgaactttatgactacattttcttttaacttttttcatggacttccttatatgtacataataattaaatgttgaaatttatgaaatacttttatgaatttagataatttttaaatattgttaaaatttattgaactaaaaagtaatgtaaataaaataattcatgttaaagatggaacaaaataattaactttacatgtttggtgatacagatgcaaatgtttttgatatatggagatgttgagtcttttgactttactaaaggtgctgaatagcattaaattcactattttccttttctgttttacttgtgaaaataaaaatgcactaaggttgggtagaagttctgtttgcactcactaattgtgacagacagaggtttttgtaagtatttattgtacaattgatgcatgtttatttttagcgttgttattgcctctggtgttaataaatgaacaaatggctatctggaggaacagctacaacccttgtaatcctttgcttattctctgaatactagaggtatatatattttatttataacatagacca

SEQ ID NO: 420689 - DNA, 2480 bp, Homo sapiens
  misc_feature (14)..(15): n is a, c, g, or t
  misc_feature (26)..(26): n is a, c, g, or t
tgctgtgtgcaganncttatgaactngccaaggccaacatgcagctcctatatgagcgtcttctcagaagaaaacagctacgaacacagaaagacaaccatctagaggaaatggatgtagaagctcgacttactgaactatgtgaagaagttaagaaaatagagaatcctgatgaactggcagaacttataaatatgaatcttgcgcaactttgctcacttttgatggctttatggggacagtttctggaagttataacgctacacgaagaactaagaatattattagcacaagagcaccatactttgagggtaagttaaagagaagtgattttagagcattttaatgagtattatttacctttagaaaatttttatgaaaacaaacctgatttttacctatatattgataaatcagaaaagagacatttgtcatattgttattgtttgacttccaaaattaataatagaatagaacaatacagttaagcatatgacctatttcaatcacaatccctgctgctaagaaaaaccacctaaaagtaagtaaaataggaaaatatatgatacagaatagaataggaacctaagaataggaattaatagccaagcctcattagggacaggaatcaggaactagagagctgtctcaaacttatatctccctcttctccttttccttcccttcttctaccactgacctaatataggaatgtgtattattaacttagcaggatggagggggcagtccacacattacacatatatgtttactgtagacctagtatggacattatgcaggtatttctatgtaattttattgtatagcatctcaagaggttttacgtgttaaataactatctttccatcttgtttccttatatactctgcatgcaccctgattttactttacgtactaggagttcctccaaacatcattaatttttttccttttttaaaaaaattttttaattataaaacataacacataaagtcagaaaatgcataaaacaggcacattttatcaaataattaaagcatacaccctttcagttattatccagatcaagaagtagaacactctcaatgctacagatgttctctctgtatcttttccaattaccatacccttcctaatacttagaagtaatcactatactgtcttttgtgatgatgagttccttccattttagttttatcacctatgtatgcacactaaatagaggttgtttccacctgttattgaattctatatagatgaaattgtacagtagtattcttctctatcttgctttttcactcaagacattaggatattaatccatcttttttgacagtacctgtagattgttcattatcattgctgtaatatatctccatttgaatatacccacatttatttatccattctactgttgatagattcttggattacttctaacttgtggctattacaaaccaagctgctatgaacattcttatgtatatgtcctggcataccagtttctctgaaatacttacctgtgaggcaaattgctgagtcataggttatgcataacttcaattttactagctaatgtgacagttttcagagttgtaccaatttttactcccaccagcacagtttgttactccacacactctccaactcttgatactggcaagctttttaaactttgccaaactgatggatgcgaaatggtatattattgtggctttaatttgcatttctctgattacccatgcagttgagcactgctttgtgtgattattggttatgtaggtttgctccatatgaagtgcctattctaatgttttgcccatttctaataagataacttttttcttctttatttctgatacttttctgtgtcctttgttatgtgtttttactaatagatcctctctcatttcatggtttattattttcattgactttatattgttttttaatgaactggaggtcttaattttagaatagaaggaaactaagagaaaggccagacatggacatagccatttttggacataacatatgtggatcggtgtaaaagatggagatttttcaataaatgatgtttgagacaattgggtatccatatggtaagtattaaataaaattcagttccaagtggattgaagatttaaatgtgaaaggcaaaactgtaaagcttctaaagtataatcagaaacttacagaagactttaaaaagttggccaggagcagtggctcacactgtcccagcactttgggaggccaaggcaggtggatcacctgaggtcaggagttcaagaccagcctggccaacatagtgaaaccccatctctactaaaaatacaaaaattatccaggcgtggtggcgagtacctgtaatcccagctacttgggaggctgaggcaggtggtagaggtggaggttgcagtgagctgagatcacaccactgcactccagcctgggcaacaagagtcaaactccatctc

SEQ ID NO: 420690 - DNA, 1393 bp, Homo sapiens
gttaaaaatgaaaagaaagtaaaaagctttaaatgatgtactgtgaggtgttttgtttgttttaatggaagagtataattttgtttctttggaaatagtcctaaatattgatgaataccttttggaaggtaagaatgtcatggaatactttctatagaacattagtccacatattctgttcccgcctatctccacaccactgagcaacagtgcctgctcccagtgcaaacacacattcttatatcagcatcaagactacataacagtgaggtgggtttttttgtagagaacatacagaaatttggagaaaggatcatcaagtattgacaaagtcagaaacttagtactgctaaggaaatttattttttggtcacttaatatgatactaataacttgtttaaaatctagttaactactgcattataatttattatattctattcacagggcttcattatttcaaaaatgttgtgctagtgggatccctacaggatcgctatgttccttatcactctgcccgcattgaaatgtgtaaaacagctttaaaggacaaacagtcaggtaatggaataaaattatttcaaagagttataggtattaatgagctctttccaaaatttttcttgtagtcactttctctcgtatctgtcacccttctctttcctgttacttcctttccacccacttatattaacagctgtcctttttccattcttctcacctgccacgtgaactgcctttaccaatgaagtaatactttcatctaattacaaatgcctctccattttgctgcctcagaagtagttcatactttgatttcctctgaattaatgggattgacaattgtagtcatccttgtcatatgttctgctgtacctcgcttttacgcaaaggtggcagcaaggatttgcccctctttactgatagtaaatgataaagactttatttgttcttttgctatttgtgaataaccaaaataaatttaaagtatagccatttggagccagaaggaaacttgagtcctgtttactcattttataactaaagcccagagatactaagtggcttagcccgaatcagttaattacagacttaggtcaagaacctggtctccgggcgtggtggctcctgcctgtaatcccagtactttgggaggccaaggcaggtagatcacctgaggtcaggagttcgagaccagcctggccaacatggtgaaaccccgtctctactaaaaatacaaaaattagccgggcgtgatggcgggtacctgtaatcccagctacttgggaggctgaggcacgagaatagcttgaacccgggagggaaaggttgcagtgagccaagatcatgctgttgcactgcagcctgagagacaagaacgaaactctgtctc

SEQ ID NO: 420691 - DNA, 1262 bp, Homo sapiens
tcttataccatctgttgtaaaataacagtaagtaaacaggctattttgatttaaaccaggggtccccaaaccctgggccacagactggtacctgtctgtggcctcttaggaaccagacctcacagcaggagcactggggcgggtgagcaagcattaccacctgagctcagcctcctgtcagatcatcggtgagcattagatttgtgaacgctattttaaactgcccatgcgagggatctaggctgtgtgttccttatgagaatctagtgcctgagttggaatagtttcatcccaaaagcatccccacaactcctgtttgtggaaagattgtctttggtgaaaccagtccctggtgccaaaaaggttggggaccactgatttaaaccatttcataacaaaagtgaagtgctagctacataaatattattctttttgcataatcgaagattcatagtaggaaaatgcatatattttacctatgccttgaaaatattgttagtcaaaaactgtccatctttgaagtatagaccagagaataagagaaacagatatataatttccccaagttgtcgtttataaatacaatttcatcattttgtttgaaatgatgaattaagaagtaaataatttgtgtatgtacctaagaaggcaaatatgtaatctagtcattatattattatctttaatacgtacttatatctaagcagttacaaactatgagtaaaagttttcagattaatatgttgtttctataaacatttaaattatgtaataatgaggatcttctatacattctcacattttttccttcaaaatgtggtatatcatttcaaagtatcactatacttttacaacattagaaattttcaaattgttagtattcacatccattttatagtggatcagctttgatttttgtttctaaaactaatgctgtgagaaaattaatttttttttcctcttaaagctttattggacattcgttgggcaatttaataattcgttcagtgcttacaaggccaaggtttaaatattacctcaacaaacttcatacctttctgtctctttctggacctcaccttggtacactctacaacagcagtgctcttgttaatacaggtctctggttatgcagaaatggaaaaatcaggtcggtttggaggtgaatgtggagaatattagaactgccaaattttttatatgttgtgaaaaagggggagttttataaaagggggaatactgggaatttaaaaaaattttgg

SEQ ID NO: 420692 - DNA, 619 bp, Homo sapiens
tcttataccatctgttgtaaaataacagtaagtaaacaggctattttgatttaaaccaggggtccccaaaccctgggccacagactggtacctgtctgtggcctcttaggaaccagacctcacagcaggagcactggggcgggtgagcaagcattaccacctgagctcagcctcctgtcagatcatcggtgagcattagatttgtgaacgctattttaaactgcccatgcgagggatctaggctgtgtgttccttatgagaatctagtgcctgagttggaatagtttcatcccaaaagcatccccacaactcctgtttgtggaaagattgtctttggtgaaaccagtccctggtgccaaaaaggttggggaccactgatttaaaccatttcataacaaaagtgaagtgctagctacataaatattattctttttgcataatcgaagattcatagtaggaaaatgcatatattttacctatgccttgaaaatattgttagtcaaaaactgtccatctttgaagtatagaccagagcatcatgtgtaccaacgatcatgtctgggatcacggatacgatgtctactcataggacagctatgccatagtacagtctggccgt

SEQ ID NO: 420693 - DNA, 5835 bp, Homo sapiens
gtaactggaagtacaagattggttatttaataatgttaaaaatgaggctttgaaaagcagaggtgctgttatcagaatagtcttctgggtataaattaaaaatgactgaagttcaagcaatggtagaattctctgtggagctaaacaagttctacaatgtggatttgtttcagagaggtttttaccagattcgtgcttctatgaaaattccatcaagaattccccacagagtagaagctagtttgttgcatgcaacaggtatgactttagcctttccagcctcagttcatgattctctaatttgcagtaaaacatttcaaattttgtacaaaaatgaagaggttgttttaaatgatgttatgatcttcaaagtaaaaatgctattggatgaaagaaagattgaagaaacccttgaggaaatgaattttctattatccttggatctacacttcacagatggagattattcttcatgcatcattggttgcactacaccagccactaataagctttcctcgccctgtgaagacaacttggttaaatagaaatgcaccagcacaaaacaaagattccgtgattcctactcttgaaagtgtggtctttggtattaactacacaaaacagttatcaccagatggttgtagcttcatcattgcagactccttcctacatcatgcgtatcgttttcattatacactttgtgccactttgctgctagccttcaagggattgcacagctacttcattacagtaacagaagagattccttcttgtcagaaactagaactggaggaaatggatgtagaagctcgacttactgaactatgtgaagaagttaagaaaatagagaatcctgatgaactggcagaacttataaatatgaatcttgcgcaactttgctcacttttgatggctttatggggacagtttctggaagttataacgctacacgaagaactaagaatattattagcacaagagcaccatactttgagggtacgcagattttctgaggcattcttttgttttgagcatccaagagaagctgccattgcataccaggaacttcatgctcagagtcatctacagatgtgcaccgctatcaaaaatacttccttctgcagttctcttccacccttacctattgaatgtagtgaattagatggagatctcaattcattacctataatctttgaagataggtatttagattcagttactgaagacttagatgcaccctggatgggaattcagaatcttcagagatcagagtccagtaaaatggataaatatgagactgaagaaagctctgtagcaggactttctagcccagagttgaaagtcagacctgctggtgcctccagtatttggtatacagaaggtgaaaagcagctaacaaaatctctaaaaggaaagaatgaagaatcaaataaatccaaagttaaggttactaagcttatgaaaacaatgaaatctgaaaacacaaaaaaattaataaaacagaactctaaggattctgtggttttggtaggctacaaatgtttgaaaagtacagcatcaaatgatctcattaaatgctttgaaggcaatccttcacatagtcagaaggaaggtctggatcccacaatatgtggatataattttgacccaaagacctacatgagacagacaagtcaaaaggaagctagctgtttgccaactaatacagagagaactgaacaaaagtctccagatattgaaaatgttcaaccagaccagtttgatcctttgaactctggcaacctaaatctttgtgcaaatttgtccatttcaggtaaacttgatatctcccaggacgatagtgaaattacacaaatggaacacaatctggcatccagaaggtcatcagacgattgccatgatcatcaaacaaccccatctttgggagttagaacaattgaaataaagcccagtaataaagatcctttcagtggagagaatataactgtcaaactaggaccttggacagagcttcgacaagaggaaatacttgtggataatttactacccaactttgagtccttagaatctaatggtaaatctaaatctatagaaataacatttgaaaaggaagctttgcaagaagcaaagtgtctttctattggagaatcattaactaaattacgaagtaatctacctgccccttctacaaaagaatatcatgttgtagtaagtggagatacaattaagttaccagatattagtgccacatatgcctcatctagattttcagattcaggtgttgaaagtgaaccgagttcttttgcgacacatccaaacactgatttagtctttgaaactgtgcaagggcaaggtccttgcaatagtgaaagattatttcctcagcttttgatgaaacctgattataatgtaaaattttcattaggaaatcattgtactgagagtacaagtgctataagtgaaatacagtcatctttgacatccataaactctctaccctccgatgatgaactgtcacctgatgaaaattctaagaaatctgttgtacctgaatgccatctaaatgatagcaaaactgtattaaatctaggaacgactgatttgccaaaatgtgatgatactaaaaagtcaagtatcactttgcaacagcagagtgttgtattttcagggaacttggacaatgaaactgtagcaatacattccttaaattcaagcattaaagaccctttacaatttgttttttcagatgaagagacttccagtgatgtgaaaagtagttgcagctccaaacctaacttggatactatgtgtaaaggcttccagagtcctgataaatctaataactctacagggacagcaattacattaaattcaaaactgatttgtttaggcactccttgtgtcatttcaggttccatttctagtaatacagatgttagtgaagatagaactatgaaaaaaaatagtgatgtattaaatctcacacagatgtattcagaaatccctacagttgaaagtgaaactcatctgggtacaagtgatcctttttcagccagtactgatatagtaaagcaagggcttgtggaaaattattttggttctcaaagcagtacggatatttctgacacatgtgctgttagctacagcaatgcacttagccctcagaaggaaacttctgaaaaagaaattagtaatcttcagcaggaacaggataaagaggatgaggaggaagagcaggatcaacaaatggttcaaaatgggtactatgaagaaacagattattcagctttggatggaacaataaatgctcactatacaagcagagatgaactaatggaagaaagacttacaaaatctgaaaaaataaacagtgactatctgagagatggtataaacatgcctactgtctgtacttctggttgtttgtccttcccgtctgcaccacgagagtctccttgtaatgttaaatattcttccaaaagtaaatttgatgccattacaaagcagccaagcagtacttcttacaacttcacttcttcgatttcctggtatgaaagttcaccaaaacctcaaatacaagccttccttcaggcaaaagaagaactgaagctactaaaacttcctgggttcatgtacagtgaagttcctctgctggcatcctcagtaccttattttagtgtagaagaagagggtggttctgaagatggagtacatctgattgtctgtgtgcacggtttagatggaaacagtgcagatctccgattagtaaaaacttacattgaacttggattgcctgggggaagaattgattttcttatgtctgagagaaatcagaatgatacttttgctgattttgatagcatgactgatcgtcttttggatgagataatacagtatattcagatatatagtctaacagtctcaaaaataagctttattggacattcgttgggcaatttaataattcgttcagtgcttacaaggccaaggtttaaatattacctcaacaaacttcatacctttctgtctctttctggacctcaccttggtacactctacaacagcagtgctcttgttaatacaggtctctggtttatgcagaaatggaaaaaatcaggttcgcttttgcagctgacatgtcgagatcactcagaccctcgccaaacttttttatataagcttagtaacaaagcagggcttcattatttcaaaaatgttgtgctagtgggatccctacaggatcgctatgttccttatcactctgcccgcattgaaatgtgtaaaacagctttaaaggacaaacagtcaggacagatctattcagaaatgatccacaacttgcttcgacccgttctgcaaagcaaggactgtaatttggttcgctataatgtcatcaatgcattgcccaatacagctgattcactcattgggagagctgcacatatagctgttcttgattcggaaatatttttagagaaattctttctggttgctgccctcaaatatttccaatagtataaaagcattgttagcgactggacaattacctcattcaacaatgtttcaaataatgtattatattaaaatgtagatgctgataagttctaagaaatatttatacctttttatatggaagataatttatatcatccatgtttagtgctttttaaacatcaactttactttctaggtaatgtggctgtgcaatatttttttaattttatctttttacttttctattactttttcatatattttgctacctaagtatttcagtgaaactttaagcccatacctgtgtctgattgtttattattggctttccacaattcttacatcagactacattatattagagaccattattgctagaatagcatgggatttaaaattttctaatactgggggtattatttagttaattataaatttttcttttcacattttactgtgttttaactggaaataaaattatggctgctacaatatattttttgaaatcaacttctgtagttctaaaatacaactttatcatacaatcaaaccaggtagttcatataaaacagtgtaatacaagttttctataaagtcattactgttgcttaaacatatttcatgcctattaaaatatattttctactggtgatttcaacattatttctcatactgacttttattactggaaatgttcctgtacatgttggcagcagataaagatttttgaatgtttgaatgccctctgccttgatttggttggaatttttgctaaattggtaatgttgcttgaactttatgactacattttcttttaacttttttcatggacttccttatatgtacataataattaaatgttgaaatttatgaaatacttttatgaatttagataatttttaaatattgttaaaatttattgaactaaaaagtaatgtaaataaaataattcatgttaaagatggaacaaaataattaactttacatgtttggtgatacagatgcaaatgtttttgatatatggagatgttgagtcttttgactttactaaaggtgctgaatagcattaaattcactattttccttttctgttttacttgtgaaaataaaaatgcactaaggttgggtagaagttctgtttgcactcactaattgtgacagacagaggtttttgtaagtatttattgtacaattgatgcatgtttatttttagcgttgttattgcctctggtgttaataaatgaacaaatggctatctggaggaacagctacaacccttgtaatcctttgcttattctctgaatactagaggtatatatattttatttataacatagacca

SEQ ID NO: 420694 - DNA, 5808 bp, Homo sapiens
  misc_feature (5776)..(5776): n is a, c, g, or t
gtaactggaagtacaagattggttatttaataatgttaaaaatgaggctttgaaaagcagaggtgctgttatcagaatagtcttctgggtataaattaaaaatgactgaagttcaagcaatggtagaattctctgtggagctaaacaagttctacaatgtggatttgtttcagagaggtttttaccagattcgtgcttctatgaaaattccatcaagaattccccacagagtagaagctagtttgttgcatgcaacaggtatgactttagcctttccagcctcagttcatgattctctaatttgcagtaaaacatttcaaattttgtacaaaaatgaagaggttgttttaaatgatgttatgatcttcaaagtaaaaatgctattggatgaaagaaagattgaagaaacccttgaggaaatgaattttctattatccttggatctacacttcacagatggagattattcttcatgcatcattggttgcactacaccagccactaataagctttcctcgccctgtgaagacaacttggttaaatagaaatgcaccagcacaaaacaaagattccgtgattcctactcttgaaagtgtggtctttggtattaactacacaaaacagttatcaccagatggttgtagcttcatcattgcagactccttcctacatcatgcgtatcgttttcattatacactttgtgccactttgctgctagccttcaagggattgcacagctacttcattacagtaacagaagagattccttcttgtcagaaactagaactggaggaaatggatgtagaagctcgacttactgaactatgtgaagaagttaagaaaatagagaatcctgatgaactggcagaacttataaatatgaatcttgcgcaactttgctcacttttgatggctttatggggacagtttctggaagttataacgctacacgaagaactaagaatattattagcacaagagcaccatactttgagggtacgcagattttctgaggcattcttttgttttgagcatccaagagaagctgccattgcataccaggaacttcatgctcagagtcatctacagatgtgcaccgctatcaaaaatacttccttctgcagttctcttccacccttacctattgaatgtagtgaattagatggagatctcaattcattacctataatctttgaagataggtatttagattcagttactgaagacttagatgcaccctggatgggaattcagaatcttcagagatcagagtccagtaaaatggataaatatgagactgaagaaagctctgtagcaggactttctagcccagagttgaaagtcagacctgctggtgcctccagtatttggtatacagaaggtgaaaagcagctaacaaaatctctaaaaggaaagaatgaagaatcaaataaatccaaagttaaggttactaagcttatgaaaacaatgaaatctgaaaacacaaaaaaattaataaaacagaactctaaggattctgtggttttggtaggctacaaatgtttgaaaagtacagcatcaaatgatctcattaaatgctttgaaggcaatccttcacatagtcagaaggaaggtctggatcccacaatatgtggatataattttgacccaaagacctacatgagacagacaagtcaaaaggaagctagctgtttgccaactaatacagagagaactgaacaaaagtctccagatattgaaaatgttcaaccagaccagtttgatcctttgaactctggcaacctaaatctttgtgcaaatttgtccatttcaggtaaacttgatatctcccaggacgatagtgaaattacacaaatggaacacaatctggcatccagaaggtcatcagacgattgccatgatcatcaaacaaccccatctttgggagttagaacaattgaaataaagcccagtaataaagatcctttcagtggagagaatataactgtcaaactaggaccttggacagagcttcgacaagaggaaatacttgtggataatttactacccaactttgagtccttagaatctaatggtaaatctaaatctatagaaataacatttgaaaaggaagctttgcaagaagcaaagtgtctttctattggagaatcattaactaaattacgaagtaatctacctgccccttctacaaaagaatatcatgttgtagtaagtggagatacaattaagttaccagatattagtgccacatatgcctcatctagattttcagattcaggtgttgaaagtgaaccgagttcttttgcgacacatccaaacactgatttagtctttgaaactgtgcaagggcaaggtccttgcaatagtgaaagattatttcctcagcttttgatgaaacctgattataatgtaaaattttcattaggaaatcattgtactgagagtacaagtgctataagtgaaatacagtcatctttgacatccataaactctctaccctccgatgatgaactgtcacctgatgaaaattctaagaaatctgttgtacctgaatgccatctaaatgatagcaaaactgtattaaatctaggaacgactgatttgccaaaatgtgatgatactaaaaagtcaagtatcactttgcaacagcagagtgttgtattttcagggaacttggacaatgaaactgtagcaatacattccttaaattcaagcattaaagaccctttacaatttgttttttcagatgaagagacttccagtgatgtgaaaagtagttgcagctccaaacctaacttggatactatgtgtaaaggcttccagagtcctgataaatctaataactctacagggacagcaattacattaaattcaaaactgatttgtttaggcactccttgtgtcatttcaggttccatttctagtaatacagatgttagtgaagatagaactatgaaaaaaaatagtgatgtattaaatctcacacagatgtattcagaaatccctacagttgaaagtgaaactcatctgggtacaagtgatcctttttcagccagtactgatatagtaaagcaagggcttgtggaaaattattttggttctcaaagcagtacggatatttctgacacatgtgctgttagctacagcaatgcacttagccctcagaaggaaacttctgaaaaagaaattagtaatcttcagcaggaacaggataaagaggatgaggaggaagagcaggatcaacaaatggttcaaaatgggtactatgaagaaacagattattcagctttggatggaacaataaatgctcactatacaagcagagatgaactaatggaagaaagacttacaaaatctgaaaaaataaacagtgactatctgagagatggtataaacatgcctactgtctgtacttctggttgtttgtccttcccgtctgcaccacgagagtctccttgtaatgttaaatattcttccaaaagtaaatttgatgccattacaaagcagccaagcagtacttcttacaacttcacttcttcgatttcctggtatgaaagttcaccaaaacctcaaatacaagccttccttcaggcaaaagaagaactgaagctactaaaacttcctgggttcatgtacagtgaagttcctctgctggcatcctcagtaccttattttagtgtagaagaagagggtggttctgaagatggagtacatctgattgtctgtgtgcacggtttagatggaaacagtgcagatctccgattagtaaaaacttacattgaacttggattgcctgggggaagaattgattttcttatgtctgagagaaatcagaatgatacttttgctgattttgatagcatgactgatcgtcttttggatgagataatacagtatattcagatatatagtctaacagtctcaaaaataagctttattggacattcgttgggcaatttaataattcgttcagtgcttacaaggccaaggtttaaatattacctcaacaaacttcatacctttctgtctctttctggacctcaccttggtacactctacaacagcagtgctcttgttaatacaggtctctggtttatgcagaaatggaaaaaatcaggttcgcttttgcagctgacatgtcgagatcactcagaccctcgccaaacttttttatataagcttagtaacaaagcagggcttcattatttcaaaaatgttgtgctagtgggatccctacaggatcgctatgttccttatcactctgcccgcattgaaatgtgtaaaacagctttaaaggacaaacagtcaggacagatctattcagaaatgatccacaacttgcttcgacccgttctgcaaagcaaggactgtaatttggttcgctataatgtcatcaatgcattgcccaatacagctgattcactcattgggagagctgcacatatagctgttcttgattcggaaatatttttagagaaattctttctggttgctgccctcaaatatttccaatagtataaaagcattgttagcgactggacaattacctcattcaacaatgtttcaaataatgtattatattaaaatgtagatgctgataagttctaagaaatatttatacctttttatatggaagataatttatatcatccatgtttagtgctttttaaacatcaactttactttctaggtaatgtggctgtgcaatatttttttaattttatctttttacttttctattactttttcatatattttgctacctaagtatttcagtgaaactttaagcccatacctgtgtctgattgtttattattggctttccacaattcttacatcagactacattatattagagaccattattgctagaatagcatgggatttaaaattttctaatactgggggtattatttagttaattataaatttttcttttcacattttactgtgttttaactggaaataaaattatggctgctacaatatattttttgaaatcaacttctgtagttctaaaatacaactttatcatacaatcaaaccaggtagttcatataaaacagtgtaatacaagttttctataaagtcattactgttgcttaaacatatttcatgcctattaaaatatattttctactggtgatttcaacattatttctcatactgacttttattactggaaatgttcctgtacatgttggcagcagataaagatttttgaatgtttgaatgccctctgccttgatttggttggaatttttgctaaattggtaatgttgcttgaactttatgactacattttcttttaacttttttcatggacttccttatatgtacataataattaaatgttgaaatttatgaaatacttttatgaatttagataatttttaaatattgttaaaatttattgaactaaaaagtaatgtaaataaaataattcatgttaaagatggaacaaaataattaactttacatgtttggtgatacagatgcaaatgtttttgatatatggagatgttgagtcttttgactttactaaaggtgctgaatagcattaaattcactattttccttttctgttttacttgtgaaaataaaaatgcactaaggttgggtagaagttctgtttgcactcactaattgtgacagacagaggtttttgtaagtatttattgtacaattgatgcatgtttatttttagcgttgttattgcctctggtgttaataaatgaacaaatggctatctggagaaagatattgtgggtacttntgggtgctcaattggggtttcccccccttctc

SEQ ID NO: 420695 - DNA, 1917 bp, Homo sapiens
gtaactggaagtacaagattggttatttaataatgttaaaaatgaggctttgaaaagcagaggtgctgttatcagaatagtcttctgggtataaattaaaaatgactgaagttcaagcaatggtagaattctctgtggagctaaacaagttctacaatgtggatttgtttcagagaggtttttaccagattcgtgcttctatgaaaattccatcaagaattccccacagagtagaagctagtttgttgcatgcaacaggtatgactttagcctttccagcctcagttcatgattctctaatttgcagtaaaacatttcaaattttgtacaaaaatgaagaggttgttttaaatgatgttatgatcttcaaagtaaaaatgctattggatgaaagaaagattgaagaaacccttgaggaaatgaattttctattatccttggatctacacttcacagatggagattattcggcagatgatctgaatgccttgcaactaataagtagccgaacattgaagctgcactttagcccccatagaggccttcatcatcatgttaatgttatgtttgattacttccacctttctgttgtgtctgttacagttcatgcatcattggttgcactacaccagccactaataagctttcctcgccctgtgaagacaacttggttaaatagaaatgcaccagcacaaaacaaagattccgtgattcctactcttgaaagtgtggtctttggtattaactacacaaaacagttatcaccagatggttgtagcttcatcattgcagactccttcctacatcatgcgtatcgttttcattatacactttgtgccactttgctgctagccttcaagggattgcacagctacttcattacagtaacagaagagattccttcttgtcagaaactagaactggccaaggccaacatgcagctcctatatgagcgtcttctcagaagaaaacagctacgaacacagaaagacaaccatctagaggaaatggatgtagaagctcgacttactgaactatgtgaagaagttaagaaaatagagaatcctgatgaactggcagaacttataaatatgaatcttgcgcaactttgctcacttttgatggctttatggggacagtttctggaagttataacgctacacgaagaactaagaatattattagcacaagagcaccatactttgagggtacgcagattttctgaggcattcttttgttttgagcatccaagagaagctgccattgcataccaggaacttcatgctcagagtcatctacagatgtgcaccgctatcaaaaatacttccttctgcagttctcttccacccttacctattgaatgtagtgaattagatggagatctcaattcattacctataatctttgaagataggtatttagattcagttactgaaggtaagtgtaatctaactaaaatatacaagctatgtgtatagttttcagtatattcttcctaatatacataaaaccattccctaatgtggaatagtttttttccctctctagttttatttatgtttgaggatattagaagttatagttagaaaaagaagtcttaatcatatgagttctcacaccttgttttaaacctgaatctttttttctttggataaaagacttagatgcaccctggatgggaattcagaatcttcagagatcagagtccagtaaaatggataaatatgagactgaagaaagctctgtagcaggactttctagcccagagttgaaagtcagacctgctggtgcctccagtatttggtatacagaaggtgaaaagcagctaacaaaatctctaaaaggaaagaatgaagaatcaaataaatccaaagttaaggttactaagcttatgaaaacaatgaaatctgaaaacac

SEQ ID NO: 420696 - DNA, 5141 bp, Homo sapiens
gtaactggaagtacaagattggttatttaataatgttaaaaatgaggctttgaaaagcagaggtgctgttatcagaatagtcttctgggtataaattaaaaatgactgaagttcaagcaatggtagaattctctgtggagctaaacaagttctacaatgtggatttgtttcagagaggtttttaccagattcgtgcttctatgaaaattccatcaagaattccccacagagtagaagctagtttgttgcatgcaacaggtatgactttagcctttccagcctcagttcatgattctctaatttgcagtaaaacatttcaaattttgtacaaaaatgaagaggttgttttaaatgatgttatgatcttcaaagtaaaaatgctattggatgaaagaaagattgaagaaacccttgaggaaatgaattttctattatccttggatctacacttcacagatggagattattcttcatgcatcattggttgcactacaccagccactaataagctttcctcgccctgtgaagacaacttggttaaatagaaatgcaccagcacaaaacaaagattccgtgattcctactcttgaaagtgtggtctttggtattaactacacaaaacagttatcaccagatggttgtagcttcatcattgcagactccttcctacatcatgcgtatcgttttcattatacactttgtgccactttgctgctagccttcaagggattgcacagctacttcattacagtaacagaagagattccttcttgtcagaaactagaactggaggaaatggatgtagaagctcgacttactgaactatgtgaagaagttaagaaaatagagaatcctgatgaactggcagaacttataaatatgaatcttgcgcaactttgctcacttttgatggctttatggggacagtttctggaagttataacgctacacgaagaactaagaatattattagcacaagagcaccatactttgagggtacgcagattttctgaggcattcttttgttttgagcatccaagagaagctgccattgcataccaggaacttcatgctcagagtcatctacagatgtgcaccgctatcaaaaatacttccttctgcagttctcttccacccttacctattgaatgtagtgaattagatggagatctcaattcattacctataatctttgaagataggtatttagattcagttactgaagacttagatgcaccctggatgggaattcagaatcttcagagatcagagtccagtaaaatggataaatatgagactgaagaaagctctgtagcaggactttctagcccagagttgaaagtcagacctgctggtgcctccagtatttggtatacagaaggtgaaaagcagctaacaaaatctctaaaaggaaagaatgaagaatcaaataaatccaaagttaaggttactaagcttatgaaaacaatgaaatctgaaaacacaaaaaaattaataaaacagaactctaaggattctgtggttttggtaggctacaaatgtttgaaaagtacagcatcaaatgatctcattaaatgctttgaaggcaatccttcacatagtcagaaggaaggtctggatcccacaatatgtggatataattttgacccaaagacctacatgagacagacaagtcaaaaggaagctagctgtttgccaactaatacagagagaactgaacaaaagtctccagatattgaaaatgttcaaccagaccagtttgatcctttgaactctggcaacctaaatctttgtgcaaatttgtccatttcaggtaaacttgatatctcccaggacgatagtgaaattacacaaatggaacacaatctggcatccagaaggtcatcagacgattgccatgatcatcaaacaaccccatctttgggagttagaacaattgaaataaagcccagtaataaagatcctttcagtggagagaatataactgtcaaactaggaccttggacagagcttcgacaagaggaaatacttgtggataatttactacccaactttgagtccttagaatctaatggtaaatctaaatctatagaaataacatttgaaaaggaagctttgcaagaagcaaagtgtctttctattggagaatcattaactaaattacgaagtaatctacctgccccttctacaaaagaatatcatgttgtagtaagtggagatacaattaagttaccagatattagtgccacatatgcctcatctagattttcagattcaggtgttgaaagtgaaccgagttcttttgcgacacatccaaacactgatttagtctttgaaactgtgcaagggcaaggtccttgcaatagtgaaagattatttcctcagcttttgatgaaacctgattataatgtaaaattttcattaggaaatcattgtactgagagtacaagtgctataagtgaaatacagtcatctttgacatccataaactctctaccctccgatgatgaactgtcacctgatgaaaattctaagaaatctgttgtacctgaatgccatctaaatgatagcaaaactgtattaaatctaggaacgactgatttgccaaaatgtgatgatactaaaaagtcaagtatcactttgcaacagcagagtgttgtattttcagggaacttggacaatgaaactgtagcaatacattccttaaattcaagcattaaagaccctttacaatttgttttttcagatgaagagacttccagtgatgtgaaaagtagttgcagctccaaacctaacttggatactatgtgtaaaggcttccagagtcctgataaatctaataactctacagggacagcaattacattaaattcaaaactgatttgtttaggcactccttgtgtcatttcaggttccatttctagtaatacagatgttagtgaagatagaactatgaaaaaaaatagtgatgtattaaatctcacacagatgtattcagaaatccctacagttgaaagtgaaactcatctgggtacaagtgatcctttttcagccagtactgatatagtaaagcaagggcttgtggaaaattattttggttctcaaagcagtacggatatttctgacacatgtgctgttagctacagcaatgcacttagccctcagaaggaaacttctgaaaaagaaattagtaatcttcagcaggaacaggataaagaggatgaggaggaagagcaggatcaacaaatggttcaaaatgggtactatgaagaaacagattattcagctttggatggaacaataaatgctcactatacaagcagagatgaactaatggaagaaagacttacaaaatctgaaaaaataaacagtgactatctgagagatggtataaacatgcctactgtctgtacttctggttgtttgtccttcccgtctgcaccacgagagtctccttgtaatgttaaatattcttccaaaagtaaatttgatgccattacaaagcagccaagcagtacttcttacaacttcacttcttcgatttcctggtatgaaagttcaccaaaacctcaaatacaagccttccttcaggcaaaagaagaactgaagctactaaaacttcctgggttcatgtacagtgaagttcctctgctggcatcctcagtaccttattttagtgtagaagaagagggtggttctgaagatggagtacatctgattgtctgtgtgcacggtttagatggaaacagtgcagatctccgattagtaaaaacttacattgaacttggattgcctgggggaagaattgattttcttatgtctgagagaaatcagaatgatacttttgctgattttgatagcatgactgatcgtcttttggatgagataatacagtatattcagatatatagtctaacagtctcaaaaataagctttattggacattcgttgggcaatttaataattcgttcagtgcttacaaggccaaggtttaaatattacctcaacaaacttcatacctttctgtctctttctggacctcaccttggtacactctacaacagcagtgctcttgttaatacaggtctctggtttatgcagaaatggaaaaaatcaggttcgcttttgcagctgacatgtcgagatcactcagaccctcgccaaacttttttatataagcttagtaacaaagcagggcttcattatttcaaaaatgttgtgctagtgggatccctacaggatcgctatgttccttatcactctgcccgcattgaaatgtgtaaaacagctttaaaggacaaacagtcaggtaatggaataaaattatttcaaagagttataggtattaatgagctctttccaaaatttttcttgtagtcactttctctcgtatctgtcacccttctctttcctgttacttcctttccacccacttatattaacagctgtcctttttccattcttctcacctgccacgtgaactgcctttaccaatgaagtaatactttcatctaattacaaatgcctctccattttgctgcctcagaagtagttcatactttgatttcctctgaattaatgggattgacaattgtagtcatccttgtcatatgttctgctgtacctcgcttttacgcaaaggtggcagcaaggatttgcccctctttactgatagtaaatgataaagactttatttgttcttttgctatttgtgaataaccaaaataaatttaaagtatagccatttggagccagaaggaaacttgagtcctgtttactcattttataactaaagcccagagatactaagtggcttagcccgaatcagttaattacagacttaggtcaagaacctggtctccgggcgtggtggctcctgcctgtaatcccagtactttgggaggccaaggcaggtagatcacctgaggtcaggagttcgagaccagcctggccaacatggtgaaaccccgtctctactaaaaatacaaaaattagccgggcgtgatggcgggtacctgtaatcccagctacttgggaggctgaggcacgagaatagcttgaacccgggagggaaaggttgcagtgagccaagatcatgctgttgcactgcagcctgagagacaagaacgaaactctgtctc

SEQ ID NO: 420697 - DNA, 2087 bp, Homo sapiens
gttaaaaatgaaaagaaagtaaaaagctttaaatgatgtactgtgaggtgttttgtttgttttaatggaagagtataattttgtttctttggaaatagtcctaaatattgatgaataccttttggaaggtaagaatgtcatggaatactttctatagaacattagtccacatattctgttcccgcctatctccacaccactgagcaacagtgcctgctcccagtgcaaacacacattcttatatcagcatcaagactacataacagtgaggtgggtttttttgtagagaacatacagaaatttggagaaaggatcatcaagtattgacaaagtcagaaacttagtactgctaaggaaatttattttttggtcacttaatatgatactaataacttgtttaaaatctagttaactactgcattataatttattatattctattcacagggcttcattatttcaaaaatgttgtgctagtgggatccctacaggatcgctatgttccttatcactctgcccgcattgaaatgtgtaaaacagctttaaaggacaaacagtcaggacagatctattcagaaatgatccacaacttgcttcgacccgttctgcaaagcaaggactgtaatttggttcgctataatgtcatcaatgcattgcccaatacagctgattcactcattgggagagctgcacatatagctgttcttgattcggaaatatttttagagaaattctttctggttgctgccctcaaatatttccaatagtataaaagcattgttagcgactggacaattacctcattcaacaatgtttcaaataatgtattatattaaaatgtagatgctgataagttctaagaaatatttatacctttttatatggaagataatttatatcatccatgtttagtgctttttaaacatcaactttactttctaggtaatgtggctgtgcaatatttttttaattttatctttttacttttctattactttttcatatattttgctacctaagtatttcagtgaaactttaagcccatacctgtgtctgattgtttattattggctttccacaattcttacatcagactacattatattagagaccattattgctagaatagcatgggatttaaaattttctaatactgggggtattatttagttaattataaatttttcttttcacattttactgtgttttaactggaaataaaattatggctgctacaatatattttttgaaatcaacttctgtagttctaaaatacaactttatcatacaatcaaaccaggtagttcatataaaacagtgtaatacaagttttctataaagtcattactgttgcttaaacatatttcatgcctattaaaatatattttctactggtgatttcaacattatttctcatactgacttttattactggaaatgttcctgtacatgttggcagcagataaagatttttgaatgtttgaatgccctctgccttgatttggttggaatttttgctaaattggtaatgttgcttgaactttatgactacattttcttttaacttttttcatggacttccttatatgtacataataattaaatgttgaaatttatgaaatacttttatgaatttagataatttttaaatattgttaaaatttattgaactaaaaagtaatgtaaataaaataattcatgttaaagatggaacaaaataattaactttacatgtttggtgatacagatgcaaatgtttttgatatatggagatgttgagtcttttgactttactaaaggtgctgaatagcattaaattcactattttccttttctgttttacttgtgaaaataaaaatgcactaaggttgggtagaagttctgtttgcactcactaattgtgacagacagaggtttttgtaagtatttattgtacaattgatgcatgtttatttttagcgttgttattgcctctggtgttaataaatgaacaaatggctatctggaggaacagctacaacccttgtaatcctttgcttattctctgaatactagaggtatatatattttatttataacatagacca

SEQ ID NO: 420698 - DNA, 2016 bp, Homo sapiens
  misc_feature (173)..(173): n is a, c, g, or t
  misc_feature (200)..(200): n is a, c, g, or t
gctattgaataatgcgttcaagtccttacaaggcccaagcgtttagaactattcaccactcacacaaacctatcgataccatttctggtctgctttcttggacgcgtcgaccgtatggctaacgacgtcttactagacacagcagtgcgtcgtactgtttacatttacaaagngctcttcgtagtgtgtgtcatcgcatngcatagattggcataaaacatcaaggttcggctttgtgccacgcttcgcacacatcgtctgcatgatcattccatacccgtctgactccaaacattcttgtatataaagtcttcagttaactagcatgcagggtcgtctattatttcaacagaatgctgtgctaggtgggatccctacaggtgatcgcgtatgttcacttgatcgatgtctgcccgtcgattgtaatgtttgctaaaacatgcttgtggcaggcagcgagacagtctcagggaccatgattttgattcggaagaatgcatccatctaacttgtctgtcgtaactcgtttctgtcaaattgcatagggactgtaatttggttcgctataatgtcatcaatgcattgcccaatacagctgattcactcattgggagagctgcacatatagctgttcttgattcggaaatatttttagagaaattctttctggttgctgccctcaaatatttccaatagtataaaagcattgttagcgactggacaattacctcattcaacaatgtttcaaataatgtattatattaaaatgtagatgctgataagttctaagaaatatttatacctttttatatggaagataatttatatcatccatgtttagtgctttttaaacatcaactttactttctaggtaatgtggctgtgcaatatttttttaattttatctttttacttttctattactttttcatatattttgctacctaagtatttcagtgaaactttaagcccatacctgtgtctgattgtttattattggctttccacaattcttacatcagactacattatattagagaccattattgctagaatagcatgggatttaaaattttctaatactgggggtattatttagttaattataaatttttcttttcacattttactgtgttttaactggaaataaaattatggctgctacaatatattttttgaaatcaacttctgtagttctaaaatacaactttatcatacaatcaaaccaggtagttcatataaaacagtgtaatacaagttttctataaagtcattactgttgcttaaacatatttcatgcctattaaaatatattttctactggtgatttcaacattatttctcatactgacttttattactggaaatgttcctgtacatgttggcagcagataaagatttttgaatgtttgaatgccctctgccttgatttggttggaatttttgctaaattggtaatgttgcttgaactttatgactacattttcttttaacttttttcatggacttccttatatgtacataataattaaatgttgaaatttatgaaatacttttatgaatttagataatttttaaatattgttaaaatttattgaactaaaaagtaatgtaaataaaataattcatgttaaagatggaacaaaataattaactttacatgtttggtgatacagatgcaaatgtttttgatatatggagatgttgagtcttttgactttactaaaggtgctgaatagcattaaattcactattttccttttctgttttacttgtgaaaataaaaatgcactaaggttgggtagaagttctgtttgcactcactaattgtgacagacagaggtttttgtaagtatttattgtacaattgatgcatgtttatttttagcgttgttattgcctctggtgttaataaatgaacaaatggctatctggaggaacagctacaacccttgtaatcctttgcttattctctgaatactagaggtatatatattttatttataacatagacca

SEQ ID NO: 420699 - DNA, 1288 bp, Homo sapiens
  misc_feature (25)..(25): n is a, c, g, or t
  misc_feature (27)..(27): n is a, c, g, or t
  misc_feature (54)..(54): n is a, c, g, or t
  misc_feature (97)..(97): n is a, c, g, or t
gacgcaggcttatgcggaggagaangntttcatgttacttatactaacattagntcttctatagggtgatagattggtccaattgggtgtgaggagntcagttatatgtttagtgctttttaaacatcaactttactttctaggtaatgtggctgtgcaatatttttttaattttatctttttacttttctattactttttcatatattttgctacctaagtatttcagtgaaactttaagcccatacctgtgtctgattgtttattattggctttccacaattcttacatcagactacattatattagagaccattattgctagaatagcatgggatttaaaattttctaatactgggggtattatttagttaattataaatttttcttttcacattttactgtgttttaactggaaataaaattatggctgctacaatatattttttgaaatcaacttctgtagttctaaaatacaactttatcatacaatcaaaccaggtagttcatataaaacagtgtaatacaagttttctataaagtcattactgttgcttaaacatatttcatgcctattaaaatatattttctactggtgatttcaacattatttctcatactgacttttattactggaaatgttcctgtacatgttggcagcagataaagatttttgaatgtttgaatgccctctgccttgatttggttggaatttttgctaaattggtaatgttgcttgaactttatgactacattttcttttaacttttttcatggacttccttatatgtacataataattaaatgttgaaatttatgaaatacttttatgaatttagataatttttaaatattgttaaaatttattgaactaaaaagtaatgtaaataaaataattcatgttaaagatggaacaaaataattaactttacatgtttggtgatacagatgcaaatgtttttgatatatggagatgttgagtcttttgactttactaaaggtgctgaatagcattaaattcactattttccttttctgttttacttgtgaaaataaaaatgcactaaggttgggtagaagttctgtttgcactcactaattgtgacagacagaggtttttgtaagtatttattgtacaattgatgcatgtttatttttagcgttgttattgcctctggtgttaataaatgaacaaatggctatctggaggaacagctacaacccttgtaatcctttgcttattctctgaatactagaggtatatatattttatttataacatagacca

SEQ ID NO: 420700 - DNA, 4263 bp, Homo sapiens
gtaactggaagtacaagattggttatttaataatgttaaaaatgaggctttgaaaagcagaggtgctgttatcagaatagtcttctgggtataaattaaaaatgactgaagttcaagcaatggtagaattctctgtggagctaaacaagttctacaatgtggatttgtttcagagaggtttttaccagattcgtgcttctatgaaaattccatcaagaattccccacagagtagaagctagtttgttgcatgcaacaggtatgactttagcctttccagcctcagttcatgattctctaatttgcagtaaaacatttcaaattttgtacaaaaatgaagaggttgttttaaatgatgttatgatcttcaaagtaaaaatgctattggatgaaagaaagattgaagaaacccttgaggaaatgaattttctattatccttggatctacacttcacagatggagattattcttcatgcatcattggttgcactacaccagccactaataagctttcctcgccctgtgaagacaacttggttaaatagaaatgcaccagcacaaaacaaagattccgtgattcctactcttgaaagtgtggtctttggtattaactacacaaaacagttatcaccagatggttgtagcttcatcattgcagactccttcctacatcatgcgtatcgttttcattatacactttgtgccactttgctgctagccttcaagggattgcacagctacttcattacagtaacagaagagattccttcttgtcagaaactagaactggaggaaatggatgtagaagctcgacttactgaactatgtgaagaagttaagaaaatagagaatcctgatgaactggcagaacttataaatatgaatcttgcgcaactttgctcacttttgatggctttatggggacagtttctggaagttataacgctacacgaagaactaagaatattattagcacaagagcaccatactttgagggtacgcagattttctgaggcattcttttgttttgagcatccaagagaagctgccattgcataccaggaacttcatgctcagagtcatctacagatgtgcaccgctatcaaaaatacttccttctgcagttctcttccacccttacctattgaatgtagtgaattagatggagatctcaattcattacctataatctttgaagataggtatttagattcagttactgaagacttagatgcaccctggatgggaattcagaatcttcagagatcagagtccagtaaaatggataaatatgagactgaagaaagctctgtagcaggactttctagcccagagttgaaagtcagacctgctggtgcctccagtatttggtatacagaaggtgaaaagcagctaacaaaatctctaaaaggaaagaatgaagaatcaaataaatccaaagttaaggttactaagcttatgaaaacaatgaaatctgaaaacacaaaaaaattaataaaacagaactctaaggattctgtggttttggtaggctacaaatgtttgaaaagtacagcatcaaatgatctcattaaatgctttgaaggcaatccttcacatagtcagaaggaaggtctggatcccacaatatgtggatataattttgacccaaagacctacatgagacagacaagtcaaaaggaagctagctgtttgccaactaatacagagagaactgaacaaaagtctccagatattgaaaatgttcaaccagaccagtttgatcctttgaactctggcaacctaaatctttgtgcaaatttgtccatttcaggtaaacttgatatctcccaggacgatagtgaaattacacaaatggaacacaatctggcatccagaaggtcatcagacgattgccatgatcatcaaacaaccccatctttgggagttagaacaattgaaataaagcccagtaataaagatcctttcagtggagagaatataactgtcaaactaggaccttggacagagcttcgacaagaggaaatacttgtggataatttactacccaactttgagtccttagaatctaatggtaaatctaaatctatagaaataacatttgaaaaggaagctttgcaagaagcaaagtgtctttctattggagaatcattaactaaattacgaagtaatctacctgccccttctacaaaagaatatcatgttgtagtaagtggagatacaattaagttaccagatattagtgccacatatgcctcatctagattttcagattcaggtgttgaaagtgaaccgagttcttttgcgacacatccaaacactgatttagtctttgaaactgtgcaagggcaaggtccttgcaatagtgaaagattatttcctcagcttttgatgaaacctgattataatgtaaaattttcattaggaaatcattgtactgagagtacaagtgctataagtgaaatacagtcatctttgacatccataaactctctaccctccgatgatgaactgtcacctgatgaaaattctaagaaatctgttgtacctgaatgccatctaaatgatagcaaaactgtattaaatctaggaacgactgatttgccaaaatgtgatgatactaaaaagtcaagtatcactttgcaacagcagagtgttgtattttcagggaacttggacaatgaaactgtagcaatacattccttaaattcaagcattaaagaccctttacaatttgttttttcagatgaagagacttccagtgatgtgaaaagtagttgcagctccaaacctaacttggatactatgtgtaaaggcttccagagtcctgataaatctaataactctacagggacagcaattacattaaattcaaaactgatttgtttaggcactccttgtgtcatttcaggttccatttctagtaatacagatgttagtgaagatagaactatgaaaaaaaatagtgatgtattaaatctcacacagatgtattcagaaatccctacagttgaaagtgaaactcatctgggtacaagtgatcctttttcagccagtactgatatagtaaagcaagggcttgtggaaaattattttggttctcaaagcagtacggatatttctgacacatgtgctgttagctacagcaatgcacttagccctcagaaggaaacttctgaaaaagaaattagtaatcttcagcaggaacaggataaagaggatgaggaggaagagcaggatcaacaaatggttcaaaatgggtactatgaagaaacagattattcagctttggatggaacaataaatgctcactatacaagcagagatgaactaatggaagaaagacttacaaaatctgaaaaaataaacagtgactatctgagagatggtataaacatgcctactgtctgtacttctggttgtttgtccttcccgtctgcaccacgagagtctccttgtaatgttaaatattcttccaaaagtaaatttgatgccattacaaagcagccaagcagtacttcttacaacttcacttcttcgatttcctggtatgaaagttcaccaaaacctcaaatacaagccttccttcaggcaaaagaagaactgaagctactaaaacttcctgggttcatgtacagtgaagttcctctgctggcatcctcagtaccttattttagtgtagaagaagagggtggttctgaagatggagtacatctgattgtctgtgtgcacggtttagatggaaacagtgcagatctccgattagtaaaaacttacattgaacttggattgcctgggggaagaattgattttcttatgtctgagagaaatcagaatgatacttttgctgattttgatagcatgactgatcgtcttttggatgagataatacagtatattcagatatatagtctaacagtctcaaaaataagctttattggacattcgttgggcaatttaataattcgttcagtgcttacaaggccaaggtttaaatattacctcaacaaacttcatacctttctgtctctttctggacctcaccttggtacactctacaacagcagtgctcttgttaatacaggtctctggtttatgcagaaatggaaaaaatcaggttcgcttttgcagctgacatgtcgagatcactcagaccctcgccaaacttttttatataagcttagtaacaaagcagggcttcattatttcatggtgtgctagtgggatccctatcacgaggattccgggggccccccttttttt

SEQ ID NO: 420701 - DNA, 706 bp, Homo sapiens
  misc_feature (341)..(342): n is a, c, g, or t
  misc_feature (353)..(353): n is a, c, g, or t
gagtcaggagttctggaattaggtttgggcaagtcacatagcctatatgaaccccaatatctacacttgtaacagcagggagttaactctgagatccctgccaacctaaaattctgagtctaattaattaagacatattggattatgaaatgttgagtggcacatacatttaaattaaaaaaccaaagaaatatatacttgaatgtacatcatttgtaattttgataagctaattaactaactgcactatcagatcaacactaagtctattattaacaagttggaaaattctagtaagttttgttgtgaaaggagtatagtaactagtgctgtgtgcaganncttatgaactngccaaggccaacatgcagctcctatatgagcgtcttctcagaagaaaacagctacgaacacagaaagacaaccatctaggtacgtttacaaatagcttaagtaaatgatcccttttaattaaaaagtatgaaattttgctttaaattagcatcagatttcataaatgtatatttaataatgtggtatgtttccaccattctgaagaacttacctttaaaatcaatttggtttgtagataaattttggttaatttcctaattaatttgtaatattgaagtttttacttaaatctggaaatggtaaatgcaaaactcactggcttttttcatatgttttttaaagtttctatgaa

SEQ ID NO: 420702 - DNA, 4248 bp, Homo sapiens
aaatctgagcagtcagatcctcattatttcacatgggaaggtggcaattaataatattttctcaaacacatgaccctatattttgtcagcaagagtccccagttatgtgtcaaggagatatgacaggccccactatcatcattcttagacatttagactaattctgctcaaagtatcctttgtagactttattgcaggtctgtgaaagaataggtaaataaattgaaagtaagggctgagaaatttttgtagcaatttgacattgttataatgtccaatttttctaatattttatttttattgtatcttacgaaatatccatatgcaatggattcgaaataaagaaaatctggtccttcatcagaactaggaaagcactgatttaaacatttggtcagacattttaaattgagaattagtaagctgtgtgggctggactactgctgaagagctgtattcatgtagtgatgatcaccagatagtgaagtggaacttgttaaccagtgaaacaactcaaatagtaaagcttcctgatgatatttaccctattgattttcactggtttccaaaaagtttgggtgtaaagaaacaaacccaggcagaaagctttgtcctcacaagttctgatggtaaatttcatctgatttccaagttaggaagagtggaaaaaagtgtagaagctcactgtggagcagtacttgcaggaagatggaattatgaaggaacagcattagttacagttggagaagatggacaaataaaaatttggtcaaagactgggatgcttagatcaactttagctcagcaaggaacaccagtgtattcagtagcgtggggccctgattcagaaaaggttctttatacagcaggcaagcagctaatcattaaacctcttcaaccaaatgctaaagttttgcagtggaaagctcatgatggcattattttaaaagtagattggaactcggtcaatgatcttattttatctgctggtgaagactgtaaatataaggtatgggatagttacggccgcccactgtacaattcacaacctcatgagcatcccattacttcagttgcctgggctccagatggagaattatttgctgttggatcgtttcatactttacgcttgtgtgataaaactgggtggtcatatgcattagaaaaacccaacactggcagcatatttaatattgcatggtctatcgatggcactcagattgctggagcctgtggaaatggacatgtcgtttttgcacatgtggtggaacaacattgggagtggaaaaattttcaagtaacattaacgaaaagaagagccatgcaggttcgtaatgttcttaatgatgcagtggatttactggaattccgtgatagagtcattaaagcatctttgaactatgcacacttagttgtttcaacgtctcttcaatgttacgtgttctccacgaagaactggaacacaccaattatatttgatctcaaagaaggaactgttagtttgattctgcaggcagaaagacattttcttcttgtagatggtagtagtatctatttatattcatatgaagggcgctttatttcatctccaaaatttcctggaatgagaacagatattctgaatgcacagactgtgtctttgagtaatgataccatagcaataagagacaaagctgatgaaaaaataatcttcctctttgaggcatcaaccggaaagccgttaggtgatggaaagtttctttctcataagaatgaaatcttggaaattgctctggatcaaaaaggacttaccaatgatagaaaaattgctttcattgataaaaatagagatctctgtatcacttctgtgaaacgatttgggaaggaagaacaaattatcaagcttggaacaatggtgcatactttggcatggaacgatacatgcaatatcctttgtggacttcaagatactcgatttatagtgtggtattaccccaatacagtttatgtggacagagacattttgcctaaaacattatatgaaagggatgcaagtgaatttagtaaaaatccccatattgtgagttttgttggaaatcaagtaactattagaagagctgatggctccctggttcacatcagcataacaccatatcctgctattctccatgaatatgtaagcagttcaaaatgggaagatgctgtgagactttgtcgctttgttaaggagcaaaccatgtgggcttgtctagctgctatggcagttgctaatcgagatatgactactgcagaaatagcctatgcagcaattggtgaaattgataaggttcagtacatcaattctataaaaaatcttccatctaaagaatcaaaaatggcccacatactactgtttagtgggaacatacaggaggctgaaatagtacttcttcaggctggccttgtttatcaagcaatccagatcaatattaatctctacaactgggaaagggcactggaattggctgtaaaatacaaaacacatgttgatacagttcttgcttaccgtcaaaagtttttggagacatttggtaaacaggaaactaataaacgatacttgcattatgcagaaggtctccaaatagattgggagaaaatcaaagccaaaattgagatggaaattacaaaagaaagagagcaatcatcaagcagccaatccagcaagagtataggtttaaagccctaaatgccatgcgtatctttaagaaattttatcttttgaaacacgttctgattaaccaagggtaagcatgttttggttgctaaagaaaaaagcataatctttaaccgagtataagtacttgctgtgtatttagtgtaaaagtacatgcagaaagatgaaacacaaagtaattgatgtatttctatcttttatattttttagtccaataattagcaaaatattactatgtacttaagagatacctgtgtagtgtcgattatatgtcagttttttgcccattacttcatccctaaatcttcagcatgaacaaatattaatgtcgataataaaacattggactctttgaaatgtatgttaccattaatttctatttgacctctaaattgtaaaatgcctccaaaagtttatttatagaacaaaaatacatgaggatggatttgtacaaatgtataaaatgccactatttatacaccaagttcatagcagcattactggaatagcaaaagatggaaacagctcaagtgtctatcatgaatggataaacaaatgtgctataatacatacaatggaatattatttagctttaaaaaggaatgaaattctgataaatactacctcaggataaaccttgaaaacactatgctaagtgaaataagccagacacaaaaggccaaatatgatgccacttttatgaggtaccagcataggcaagttcacagaaacagaaaggagaatagtggttgccagggactgcagggaggaggaaatggggggtggggttattgtttaacgagtacatagtttctgtttgggatgaacaaattctggaaatggatagcgatgatggttgctcaacattttgaatgttaatgccactaaattgtacccataaaaatggttaaaatggtaaattttgttatgtatattttatcataatttaaaaaatatatctagaatgggcaagaaggattctcctcattcctctcttgacttgagaatgatcagtcaataggccctgaagtctgaatttgtgaaaatttccttgggtgacaaacttgtttgattactctatttagtgtatcccaaagttattaccacataatcttttaaacaataaaacaaataccccttagaaagtcttctgcaaacccatttctgaaaatggtacattatagggtgggtatagatgcatagatatgggattatgtatgatatatatatatatacacacacacacaaagggatagagagattacctctcttaacccccattttaattactatgtctaggttttttaaataaaaatcttttctttttaacatgtttcttttcttttccggaatattggaatattctgttcttgatccagatgaaatctgattgagcagtgtacttacaagttgtactgtgtatgtgtttcctatattgttatatttcaataagaagcttaaaatgtttaaaaataaatggttaaaaggttttatgttatgtatattttaccacaataaatgcaaaaaataaaaagtctgtgttctaaaaaaaaatc

SEQ ID NO: 420703 - DNA, 2050 bp, Homo sapiens
  misc_feature (262)..(262): n is a, c, g, or t
  misc_feature (1091)..(1091): n is a, c, g, or t
  misc_feature (1117)..(1117): n is a, c, g, or t
  misc_feature (1124)..(1124): n is a, c, g, or t
  misc_feature (1255)..(1255): n is a, c, g, or t
ctttgctccctacctatcccccaacagttcagtgtagattctttgataccttttgatctactaagtctcttttgtataccttttggctttgtgtatagaatattgtataacacaagttttaaattttcatgtggtcagatcttttctcccccaccttttggcatctggatttctttcttgctttccatttttacaattcttttaatagatgcttattttcttttatatagaaaaaaataccagtcataaaatggaaaatacntttagaatcttgaaaccatttgaccctattttacttataccttataatctgcatctgtgaattattcattaagattaaagacttttgtatgttttatgtctctttaacatggtgacacatcaagaattagtaagctgtgtgggctggactactgctgaagagctgtattcatgtagtgatgatcaccagatagtgaagtggaacttgttaaccagtgaaacaactcaaatagtaaagcttcctgatgatatttaccctattgattttcactggtttccaaaaagtttgggtgtaaagaaacaaacccaggcagaaagctttgtcctcacaagttctgatggtaagttttaaataaacattatatgctcgccattgtatttaaaagacttaatagtatgatttatgctttgagttgttttacaaaactggtatttgtggatctgcatatttttatccacatattgtatttcttttctgaatagtcacttggtttgtgtatgggctatgaaattattgtcatggaagaaagttagtttaactggcatatactaggattgaatatgggtctttggctttaatatatatatatatatatatatatttagagatggggtctcactctgttgcccaggccagagtgcagtggtgtgatcatagctcactgtagcttcaaactcctgggctcacacaatcttcctgcctcagcctcttgagtagctgggactacaggcacacactattacatctggttaattaaaacattttttttgtagagacagggtctcatcttgttgcccaggctagtcttgtactcctggcctcaagcaancttccttccttggcctcccaaagtgntgggatnacaggtatgagccaccatgcccagctggctttacttttttagtactcttatgagttgagttaagctgttatcatagttttagttcctaaattcttcaaatttaacttaatataaccacactgaaaagatanacctattcatttagtaaggtatctgttaaaatacatactttattttccagtacatgttaattttcagtacagagttgaagagttttataatttgaccgcagctttcttattggtgaataacaagtatgattttttttttcactttttaagggtatgtttttatatttgttttcttagaaatacgtgaactgttttcatctgtgttatactttacctgctgtttcaattaggagtacattgattgaaagtaacagaaacttatttggctaacttaagcacaaatggagttttttggttcacctagctgtaggggtagatcaagcactagttgcatcgggtccctgttctcaccatctcttgggtagactctctgcacatggtgaacatgatggtgagtatgacggtggccagtagcccaaggctcatcatactttgtaagactgcttcttcctcagtatctcgtgcaggcagcttgcagagggacccttaatgagcttgggtcatatgcccatcactgagtcaatcagtttagtcaagagaaatggactttgggaggctgaggtgggcgcatcatttgaggtcaggagttcgagaccagcctgagcaacatgatgaaacccccgtctgtactgaaatacaaaaaaattttagctaggcatggtggcacatgcctatagtcccagctacttgggaggctgagataggagaattgcttgaacctggaatgcagaggtttcagtgagctgagattgcgccattgcactctatcctgggcacagagcaagactccgtctc

SEQ ID NO: 420704 - DNA, 948 bp, Homo sapiens
aaatctgagcagtcagatcctcattatttcacatgggaaggtggcaattaataatattttctcaaacacatgaccctatattttgtcagcaagagtccccagttatgtgtcaaggagatatgacaggccccactatcatcattcttagacatttagactaattctgctcaaagtatcctttgtagactttattgcaggtctgtgaaagaataggtaaataaattgaaagtaagggctgagaaatttttgtagcaatttgacattgttataatgtccaatttttctaatattttatttttattgtatcttacgaaatatccatatgcaatggattcgaaataaagaaaatctggtccttcatcagaactaggaaagcactgatttaaacatttggtcagacattttaaattggtaggtgttttcatttatattatcttgtttgcttatttaactattaagtgaagatgtaattatttttattcccccttaaatagtttttactgtcttttcaaaaaaaatgtgctttcaagagttcacaccatacacaattttatagattttgaccatgtctactgtctgcctttacctttcaagccaaagaataacaatgtttttagactttcttgatctggcagtcttctcatttctacgataattttagttgacctgtgagtttgaagataatgtcatggacgtctggcatgtacttatagcaatttatataaggataagctaatgatttttggtttgagatgtgtacatatttgtttgtgtgagttttcttcctttctaggttttacctaagcttctcccattttaggttttacctaacattgtttaggcgacagcaataataatacaacagttttttcaggaatggtctgttgtccttttgtttagattgtgttttgagttttgagtattctggtgtctctttattaccttttt

SEQ ID NO: 420705 - DNA, 485 bp, Homo sapiens
agcgtaactcttagaagtcactatggtgacggggaggtaccaggtatttgagagcaatcgccaccgctttcctggaacttgagtaaatacaatcaagtggcatcttaaatttttgctggaagtggagtcatgagactaaagatatctcttttaaaagaaccaaagcatatccttttaatgcttataaatcttattggattttcttaattatagtattgttaaaagtttctctattttatatcctagttgaagaatagattttttttttcattcctttagtggctgtttacctaaattgttttaaagtatttaagatcatgtgttgtaagtaattctccaaagtgaaccgtttgctataaatcttattttaaaattcttactgacgtttttcttactctacttaagtactatacttaaatacttaaaaagcagtttttgtttactttagtaggatcttaaaaagaagctttttttttttttttttg

SEQ ID NO: 420706 - DNA, 4003 bp, Homo sapiens
agcgtaactcttagaagtcactatggtgacggggaggtaccaggtatttgagagcaatcgccaccgctttcctggaacttgagtaaatacaatcaagtggcatcttaaatttttgctggaagtggagtcatgagactaaagatatctcttttaaaagaaccaaagcagaattagtaagctgtgtgggctggactactgctgaagagctgtattcatgtagtgatgatcaccagatagtgaagtggaacttgttaaccagtgaaacaactcaaatagtaaagcttcctgatgatatttaccctattgattttcactggtttccaaaaagtttgggtgtaaagaaacaaacccaggcagaaagctttgtcctcacaagttctgatggtaaatttcatctgatttccaagttaggaagagtggaaaaaagtgtagaagctcactgtggagcagtacttgcaggaagatggaattatgaaggaacagcattagttacagttggagaagatggacaaataaaaatttggtcaaagactgggatgcttagatcaactttagctcagcaaggaacaccagtgtattcagtagcgtggggccctgattcagaaaaggttctttatacagcaggcaagcagctaatcattaaacctcttcaaccaaatgctaaagttttgcagtggaaagctcatgatggcattattttaaaagtagattggaactcggtcaatgatcttattttatctgctggtgaagactgtaaatataaggtatgggatagttacggccgcccactgtacaattcacaacctcatgagcatcccattacttcagttgcctgggctccagatggagaattatttgctgttggatcgtttcatactttacgcttgtgtgataaaactgggtggtcatatgcattagaaaaacccaacactggcagcatatttaatattgcatggtctatcgatggcactcagattgctggagcctgtggaaatggacatgtcgtttttgcacatgtggtggaacaacattgggagtggaaaaattttcaagtaacattaacgaaaagaagagccatgcaggttcgtaatgttcttaatgatgcagtggatttactggaattccgtgatagagtcattaaagcatctttgaactatgcacacttagttgtttcaacgtctcttcaatgttacgtgttctccacgaagaactggaacacaccaattatatttgatctcaaagaaggaactgttagtttgattctgcaggcagaaagacattttcttcttgtagatggtagtagtatctatttatattcatatgaagggcgctttatttcatctccaaaatttcctggaatgagaacagatattctgaatgcacagactgtgtctttgagtaatgataccatagcaataagagacaaagctgatgaaaaaataatcttcctctttgaggcatcaaccggaaagccgttaggtgatggaaagtttctttctcataagaatgaaatcttggaaattgctctggatcaaaaaggacttaccaatgatagaaaaattgctttcattgataaaaatagagatctctgtatcacttctgtgaaacgatttgggaaggaagaacaaattatcaagcttggaacaatggtgcatactttggcatggaacgatacatgcaatatcctttgtggacttcaagatactcgatttatagtgtggtattaccccaatacagtttatgtggacagagacattttgcctaaaacattatatgaaagggatgcaagtgaatttagtaaaaatccccatattgtgagttttgttggaaatcaagtaactattagaagagctgatggctccctggttcacatcagcataacaccatatcctgctattctccatgaatatgtaagcagttcaaaatgggaagatgctgtgagactttgtcgctttgttaaggagcaaaccatgtgggcttgtctagctgctatggcagttgctaatcgagatatgactactgcagaaatagcctatgcagcaattggtgaaattgataaggttcagtacatcaattctataaaaaatcttccatctaaagaatcaaaaatggcccacatactactgtttagtgggaacatacaggaggctgaaatagtacttcttcaggctggccttgtttatcaagcaatccagatcaatattaatctctacaactgggaaagggcactggaattggctgtaaaatacaaaacacatgttgatacagttcttgcttaccgtcaaaagtttttggagacatttggtaaacaggaaactaataaacgatacttgcattatgcagaaggtctccaaatagattgggagaaaatcaaagccaaaattgagatggaaattacaaaagaaagagagcaatcatcaagcagccaatccagcaagagtataggtttaaagccctaaatgccatgcgtatctttaagaaattttatcttttgaaacacgttctgattaaccaagggtaagcatgttttggttgctaaagaaaaaagcataatctttaaccgagtataagtacttgctgtgtatttagtgtaaaagtacatgcagaaagatgaaacacaaagtaattgatgtatttctatcttttatattttttagtccaataattagcaaaatattactatgtacttaagagatacctgtgtagtgtcgattatatgtcagttttttgcccattacttcatccctaaatcttcagcatgaacaaatattaatgtcgataataaaacattggactctttgaaatgtatgttaccattaatttctatttgacctctaaattgtaaaatgcctccaaaagtttatttatagaacaaaaatacatgaggatggatttgtacaaatgtataaaatgccactatttatacaccaagttcatagcagcattactggaatagcaaaagatggaaacagctcaagtgtctatcatgaatggataaacaaatgtgctataatacatacaatggaatattatttagctttaaaaaggaatgaaattctgataaatactacctcaggataaaccttgaaaacactatgctaagtgaaataagccagacacaaaaggccaaatatgatgccacttttatgaggtaccagcataggcaagttcacagaaacagaaaggagaatagtggttgccagggactgcagggaggaggaaatggggggtggggttattgtttaacgagtacatagtttctgtttgggatgaacaaattctggaaatggatagcgatgatggttgctcaacattttgaatgttaatgccactaaattgtacccataaaaatggttaaaatggtaaattttgttatgtatattttatcataatttaaaaaatatatctagaatgggcaagaaggattctcctcattcctctcttgacttgagaatgatcagtcaataggccctgaagtctgaatttgtgaaaatttccttgggtgacaaacttgtttgattactctatttagtgtatcccaaagttattaccacataatcttttaaacaataaaacaaataccccttagaaagtcttctgcaaacccatttctgaaaatggtacattatagggtgggtatagatgcatagatatgggattatgtatgatatatatatatatacacacacacacaaagggatagagagattacctctcttaacccccattttaattactatgtctaggttttttaaataaaaatcttttctttttaacatgtttcttttcttttccggaatattggaatattctgttcttgatccagatgaaatctgattgagcagtgtacttacaagttgtactgtgtatgtgtttcctatattgttatatttcaataagaagcttaaaatgtttaaaaataaatggttaaaaggttttatgttatgtatattttaccacaataaatgcaaaaaataaaaagtctgtgttctaaaaaaaaatc

SEQ ID NO: 420707 - DNA, 4228 bp, Homo sapiens
agcgtaactcttagaagtcactatggtgacggggaggtaccaggtatttgagagcaatcgccaccgctttcctggaacttgagtaaatacaatcaagtggcatcttaaatttttgctggaagtggagtcatgagactaaagatatctcttttaaaagaaccaaagcatatccttttaatgcttataaatcttattggattttcttaattatagtattgttaaaagtttctctattttatatcctagttgaagaatagattttttttttcattcctttagtggctgtttacctaaattgttttaaagtatttaagatcatgtgttaaaatctggtccttcatcagaactaggaaagcactgatttaaacatttggtcagacattttaaattgagaattagtaagctgtgtgggctggactactgctgaagagctgtattcatgtagtgatgatcaccagatagtgaagtggaacttgttaaccagtgaaacaactcaaatagtaaagcttcctgatgatatttaccctattgattttcactggtttccaaaaagtttgggtgtaaagaaacaaacccaggcagaaagctttgtcctcacaagttctgatggtaaatttcatctgatttccaagttaggaagagtggaaaaaagtgtagaagctcactgtggagcagtacttgcaggaagatggaattatgaaggaacagcattagttacagttggagaagatggacaaataaaaatttggtcaaagactgggatgcttagatcaactttagctcagcaaggaacaccagtgtattcagtagcgtggggccctgattcagaaaaggttctttatacagcaggcaagcagctaatcattaaacctcttcaaccaaatgctaaagttttgcagtggaaagctcatgatggcattattttaaaagtagattggaactcggtcaatgatcttattttatctgctggtgaagactgtaaatataaggtatgggatagttacggccgcccactgtacaattcacaacctcatgagcatcccattacttcagttgcctgggctccagatggagaattatttgctgttggatcgtttcatactttacgcttgtgtgataaaactgggtggtcatatgcattagaaaaacccaacactggcagcatatttaatattgcatggtctatcgatggcactcagattgctggagcctgtggaaatggacatgtcgtttttgcacatgtggtggaacaacattgggagtggaaaaattttcaagtaacattaacgaaaagaagagccatgcaggttcgtaatgttcttaatgatgcagtggatttactggaattccgtgatagagtcattaaagcatctttgaactatgcacacttagttgtttcaacgtctcttcaatgttacgtgttctccacgaagaactggaacacaccaattatatttgatctcaaagaaggaactgttagtttgattctgcaggcagaaagacattttcttcttgtagatggtagtagtatctatttatattcatatgaagggcgctttatttcatctccaaaatttcctggaatgagaacagatattctgaatgcacagactgtgtctttgagtaatgataccatagcaataagagacaaagctgatgaaaaaataatcttcctctttgaggcatcaaccggaaagccgttaggtgatggaaagtttctttctcataagaatgaaatcttggaaattgctctggatcaaaaaggacttaccaatgatagaaaaattgctttcattgataaaaatagagatctctgtatcacttctgtgaaacgatttgggaaggaagaacaaattatcaagcttggaacaatggtgcatactttggcatggaacgatacatgcaatatcctttgtggacttcaagatactcgatttatagtgtggtattaccccaatacagtttatgtggacagagacattttgcctaaaacattatatgaaagggatgcaagtgaatttagtaaaaatccccatattgtgagttttgttggaaatcaagtaactattagaagagctgatggctccctggttcacatcagcataacaccatatcctgctattctccatgaatatgtaagcagttcaaaatgggaagatgctgtgagactttgtcgctttgttaaggagcaaaccatgtgggcttgtctagctgctatggcagttgctaatcgagatatgactactgcagaaatagcctatgcagcaattggtgaaattgataaggttcagtacatcaattctataaaaaatcttccatctaaagaatcaaaaatggcccacatactactgtttagtgggaacatacaggaggctgaaatagtacttcttcaggctggccttgtttatcaagcaatccagatcaatattaatctctacaactgggaaagggcactggaattggctgtaaaatacaaaacacatgttgatacagttcttgcttaccgtcaaaagtttttggagacatttggtaaacaggaaactaataaacgatacttgcattatgcagaaggtctccaaatagattgggagaaaatcaaagccaaaattgagatggaaattacaaaagaaagagagcaatcatcaagcagccaatccagcaagagtataggtttaaagccctaaatgccatgcgtatctttaagaaattttatcttttgaaacacgttctgattaaccaagggtaagcatgttttggttgctaaagaaaaaagcataatctttaaccgagtataagtacttgctgtgtatttagtgtaaaagtacatgcagaaagatgaaacacaaagtaattgatgtatttctatcttttatattttttagtccaataattagcaaaatattactatgtacttaagagatacctgtgtagtgtcgattatatgtcagttttttgcccattacttcatccctaaatcttcagcatgaacaaatattaatgtcgataataaaacattggactctttgaaatgtatgttaccattaatttctatttgacctctaaattgtaaaatgcctccaaaagtttatttatagaacaaaaatacatgaggatggatttgtacaaatgtataaaatgccactatttatacaccaagttcatagcagcattactggaatagcaaaagatggaaacagctcaagtgtctatcatgaatggataaacaaatgtgctataatacatacaatggaatattatttagctttaaaaaggaatgaaattctgataaatactacctcaggataaaccttgaaaacactatgctaagtgaaataagccagacacaaaaggccaaatatgatgccacttttatgaggtaccagcataggcaagttcacagaaacagaaaggagaatagtggttgccagggactgcagggaggaggaaatggggggtggggttattgtttaacgagtacatagtttctgtttgggatgaacaaattctggaaatggatagcgatgatggttgctcaacattttgaatgttaatgccactaaattgtacccataaaaatggttaaaatggtaaattttgttatgtatattttatcataatttaaaaaatatatctagaatgggcaagaaggattctcctcattcctctcttgacttgagaatgatcagtcaataggccctgaagtctgaatttgtgaaaatttccttgggtgacaaacttgtttgattactctatttagtgtatcccaaagttattaccacataatcttttaaacaataaaacaaataccccttagaaagtcttctgcaaacccatttctgaaaatggtacattatagggtgggtatagatgcatagatatgggattatgtatgatatatatatatatacacacacacacaaagggatagagagattacctctcttaacccccattttaattactatgtctaggttttttaaataaaaatcttttctttttaacatgtttcttttcttttccggaatattggaatattctgttcttgatccagatgaaatctgattgagcagtgtacttacaagttgtactgtgtatgtgtttcctatattgttatatttcaataagaagcttaaaatgtttaaaaataaatggttaaaaggttttatgttatgtatattttaccacaataaatgcaaaaaataaaaagtctgtgttctaaaaaaaaatc

SEQ ID NO: 420708 - DNA, 3770 bp, Homo sapiens
agcggatgttgtcgctcctgcgcatgggcgaactcctggcgggacctacgcggtagaagtttctactaagtgaaaaggaagagcgagggattcttttctctgtggtctacagcagcagcactattattaaaaatatttgaaagacaacctggtaaatttcatctgatttccaagttaggaagagtggaaaaaagtgtagaagctcactgtggagcagtacttgcaggaagatggaattatgaaggaacagcattagttacagttggagaagatggacaaataaaaatttggtcaaagactgggatgcttagatcaactttagctcagcaaggaacaccagtgtattcagtagcgtggggccctgattcagaaaaggttctttatacagcaggcaagcagctaatcattaaacctcttcaaccaaatgctaaagttttgcagtggaaagctcatgatggcattattttaaaagtagattggaactcggtcaatgatcttattttatctgctggtgaagactgtaaatataaggtatgggatagttacggccgcccactgtacaattcacaacctcatgagcatcccattacttcagttgcctgggctccagatggagaattatttgctgttggatcgtttcatactttacgcttgtgtgataaaactgggtggtcatatgcattagaaaaacccaacactggcagcatatttaatattgcatggtctatcgatggcactcagattgctggagcctgtggaaatggacatgtcgtttttgcacatgtggtggaacaacattgggagtggaaaaattttcaagtaacattaacgaaaagaagagccatgcaggttcgtaatgttcttaatgatgcagtggatttactggaattccgtgatagagtcattaaagcatctttgaactatgcacacttagttgtttcaacgtctcttcaatgttacgtgttctccacgaagaactggaacacaccaattatatttgatctcaaagaaggaactgttagtttgattctgcaggcagaaagacattttcttcttgtagatggtagtagtatctatttatattcatatgaagggcgctttatttcatctccaaaatttcctggaatgagaacagatattctgaatgcacagactgtgtctttgagtaatgataccatagcaataagagacaaagctgatgaaaaaataatcttcctctttgaggcatcaaccggaaagccgttaggtgatggaaagtttctttctcataagaatgaaatcttggaaattgctctggatcaaaaaggacttaccaatgatagaaaaattgctttcattgataaaaatagagatctctgtatcacttctgtgaaacgatttgggaaggaagaacaaattatcaagcttggaacaatggtgcatactttggcatggaacgatacatgcaatatcctttgtggacttcaagatactcgatttatagtgtggtattaccccaatacagtttatgtggacagagacattttgcctaaaacattatatgaaagggatgcaagtgaatttagtaaaaatccccatattgtgagttttgttggaaatcaagtaactattagaagagctgatggctccctggttcacatcagcataacaccatatcctgctattctccatgaatatgtaagcagttcaaaatgggaagatgctgtgagactttgtcgctttgttaaggagcaaaccatgtgggcttgtctagctgctatggcagttgctaatcgagatatgactactgcagaaatagcctatgcagcaattggtgaaattgataaggttcagtacatcaattctataaaaaatcttccatctaaagaatcaaaaatggcccacatactactgtttagtgggaacatacaggaggctgaaatagtacttcttcaggctggccttgtttatcaagcaatccagatcaatattaatctctacaactgggaaagggcactggaattggctgtaaaatacaaaacacatgttgatacagttcttgcttaccgtcaaaagtttttggagacatttggtaaacaggaaactaataaacgatacttgcattatgcagaaggtctccaaatagattgggagaaaatcaaagccaaaattgagatggaaattacaaaagaaagagagcaatcatcaagcagccaatccagcaagagtataggtttaaagccctaaatgccatgcgtatctttaagaaattttatcttttgaaacacgttctgattaaccaagggtaagcatgttttggttgctaaagaaaaaagcataatctttaaccgagtataagtacttgctgtgtatttagtgtaaaagtacatgcagaaagatgaaacacaaagtaattgatgtatttctatcttttatattttttagtccaataattagcaaaatattactatgtacttaagagatacctgtgtagtgtcgattatatgtcagttttttgcccattacttcatccctaaatcttcagcatgaacaaatattaatgtcgataataaaacattggactctttgaaatgtatgttaccattaatttctatttgacctctaaattgtaaaatgcctccaaaagtttatttatagaacaaaaatacatgaggatggatttgtacaaatgtataaaatgccactatttatacaccaagttcatagcagcattactggaatagcaaaagatggaaacagctcaagtgtctatcatgaatggataaacaaatgtgctataatacatacaatggaatattatttagctttaaaaaggaatgaaattctgataaatactacctcaggataaaccttgaaaacactatgctaagtgaaataagccagacacaaaaggccaaatatgatgccacttttatgaggtaccagcataggcaagttcacagaaacagaaaggagaatagtggttgccagggactgcagggaggaggaaatggggggtggggttattgtttaacgagtacatagtttctgtttgggatgaacaaattctggaaatggatagcgatgatggttgctcaacattttgaatgttaatgccactaaattgtacccataaaaatggttaaaatggtaaattttgttatgtatattttatcataatttaaaaaatatatctagaatgggcaagaaggattctcctcattcctctcttgacttgagaatgatcagtcaataggccctgaagtctgaatttgtgaaaatttccttgggtgacaaacttgtttgattactctatttagtgtatcccaaagttattaccacataatcttttaaacaataaaacaaataccccttagaaagtcttctgcaaacccatttctgaaaatggtacattatagggtgggtatagatgcatagatatgggattatgtatgatatatatatatatacacacacacacaaagggatagagagattacctctcttaacccccattttaattactatgtctaggttttttaaataaaaatcttttctttttaacatgtttcttttcttttccggaatattggaatattctgttcttgatccagatgaaatctgattgagcagtgtacttacaagttgtactgtgtatgtgtttcctatattgttatatttcaataagaagcttaaaatgtttaaaaataaatggttaaaaggttttatgttatgtatattttaccacaataaatgcaaaaaataaaaagtctgtgttctaaaaaaaaatc

SEQ ID NO: 420709 - DNA, 3058 bp, Homo sapiens
  misc_feature (24)..(24): n is a, c, g, or t
tcgctgactctagaggataaactncgtcttgtgctgccgcctgtggaaatggacatgtcgtttttgcacatgtggtggaacaacattgggagtggaaaaattttcaagtaacattaacgaaaagaagagccatgcaggttcgtaatgttcttaatgatgcagtggatttactggaattccgtgatagagtcattaaagcatctttgaactatgcacacttagttgtttcaacgtctcttcaatgttacgtgttctccacgaagaactggaacacaccaattatatttgatctcaaagaaggaactgttagtttgattctgcaggcagaaagacattttcttcttgtagatggtagtagtatctatttatattcatatgaagggcgctttatttcatctccaaaatttcctggaatgagaacagatattctgaatgcacagactgtgtctttgagtaatgataccatagcaataagagacaaagctgatgaaaaaataatcttcctctttgaggcatcaaccggaaagccgttaggtgatggaaagtttctttctcataagaatgaaatcttggaaattgctctggatcaaaaaggacttaccaatgatagaaaaattgctttcattgataaaaatagagatctctgtatcacttctgtgaaacgatttgggaaggaagaacaaattatcaagcttggaacaatggtgcatactttggcatggaacgatacatgcaatatcctttgtggacttcaagatactcgatttatagtgtggtattaccccaatacagtttatgtggacagagacattttgcctaaaacattatatgaaagggatgcaagtgaatttagtaaaaatccccatattgtgagttttgttggaaatcaagtaactattagaagagctgatggctccctggttcacatcagcataacaccatatcctgctattctccatgaatatgtaagcagttcaaaatgggaagatgctgtgagactttgtcgctttgttaaggagcaaaccatgtgggcttgtctagctgctatggcagttgctaatcgagatatgactactgcagaaatagcctatgcagcaattggtgaaattgataaggttcagtacatcaattctataaaaaatcttccatctaaagaatcaaaaatggcccacatactactgtttagtgggaacatacaggaggctgaaatagtacttcttcaggctggccttgtttatcaagcaatccagatcaatattaatctctacaactgggaaagggcactggaattggctgtaaaatacaaaacacatgttgatacagttcttgcttaccgtcaaaagtttttggagacatttggtaaacaggaaactaataaacgatacttgcattatgcagaaggtctccaaatagattgggagaaaatcaaagccaaaattgagatggaaattacaaaagaaagagagcaatcatcaagcagccaatccagcaagagtataggtttaaagccctaaatgccatgcgtatctttaagaaattttatcttttgaaacacgttctgattaaccaagggtaagcatgttttggttgctaaagaaaaaagcataatctttaaccgagtataagtacttgctgtgtatttagtgtaaaagtacatgcagaaagatgaaacacaaagtaattgatgtatttctatcttttatattttttagtccaataattagcaaaatattactatgtacttaagagatacctgtgtagtgtcgattatatgtcagttttttgcccattacttcatccctaaatcttcagcatgaacaaatattaatgtcgataataaaacattggactctttgaaatgtatgttaccattaatttctatttgacctctaaattgtaaaatgcctccaaaagtttatttatagaacaaaaatacatgaggatggatttgtacaaatgtataaaatgccactatttatacaccaagttcatagcagcattactggaatagcaaaagatggaaacagctcaagtgtctatcatgaatggataaacaaatgtgctataatacatacaatggaatattatttagctttaaaaaggaatgaaattctgataaatactacctcaggataaaccttgaaaacactatgctaagtgaaataagccagacacaaaaggccaaatatgatgccacttttatgaggtaccagcataggcaagttcacagaaacagaaaggagaatagtggttgccagggactgcagggaggaggaaatggggggtggggttattgtttaacgagtacatagtttctgtttgggatgaacaaattctggaaatggatagcgatgatggttgctcaacattttgaatgttaatgccactaaattgtacccataaaaatggttaaaatggtaaattttgttatgtatattttatcataatttaaaaaatatatctagaatgggcaagaaggattctcctcattcctctcttgacttgagaatgatcagtcaataggccctgaagtctgaatttgtgaaaatttccttgggtgacaaacttgtttgattactctatttagtgtatcccaaagttattaccacataatcttttaaacaataaaacaaataccccttagaaagtcttctgcaaacccatttctgaaaatggtacattatagggtgggtatagatgcatagatatgggattatgtatgatatatatatatatacacacacacacaaagggatagagagattacctctcttaacccccattttaattactatgtctaggttttttaaataaaaatcttttctttttaacatgtttcttttcttttccggaatattggaatattctgttcttgatccagatgaaatctgattgagcagtgtacttacaagttgtactgtgtatgtgtttcctatattgttatatttcaataagaagcttaaaatgtttaaaaataaatggttaaaaggttttatgttatgtatattttaccacaataaatgcaaaaaataaaaagtctgtgttctaaaaaaaaatc

SEQ ID NO: 420710 - DNA, 2541 bp, Homo sapiens
tgcggccgctccaacatcagaatggtagtttctttctcataagaatgaaatcttggaaattgctctggatcaaaaaggacttaccaatgatagaaaaattgctttcattgataaaaatagagatctctgtatcacttctgtgaaacgatttgggaaggaagaacaaattatcaagcttggaacaatggtgcatactttggcatggaacgatacatgcaatatcctttgtggacttcaagatactcgatttatagtgtggtattaccccaatacagtttatgtggacagagacattttgcctaaaacattatatgaaagggatgcaagtgaatttagtaaaaatccccatattgtgagttttgttggaaatcaagtaactattagaagagctgatggctccctggttcacatcagcataacaccatatcctgctattctccatgaatatgtaagcagttcaaaatgggaagatgctgtgagactttgtcgctttgttaaggagcaaaccatgtgggcttgtctagctgctatggcagttgctaatcgagatatgactactgcagaaatagcctatgcagcaattggtgaaattgataaggttcagtacatcaattctataaaaaatcttccatctaaagaatcaaaaatggcccacatactactgtttagtgggaacatacaggaggctgaaatagtacttcttcaggctggccttgtttatcaagcaatccagatcaatattaatctctacaactgggaaagggcactggaattggctgtaaaatacaaaacacatgttgatacagttcttgcttaccgtcaaaagtttttggagacatttggtaaacaggaaactaataaacgatacttgcattatgcagaaggtctccaaatagattgggagaaaatcaaagccaaaattgagatggaaattacaaaagaaagagagcaatcatcaagcagccaatccagcaagagtataggtttaaagccctaaatgccatgcgtatctttaagaaattttatcttttgaaacacgttctgattaaccaagggtaagcatgttttggttgctaaagaaaaaagcataatctttaaccgagtataagtacttgctgtgtatttagtgtaaaagtacatgcagaaagatgaaacacaaagtaattgatgtatttctatcttttatattttttagtccaataattagcaaaatattactatgtacttaagagatacctgtgtagtgtcgattatatgtcagttttttgcccattacttcatccctaaatcttcagcatgaacaaatattaatgtcgataataaaacattggactctttgaaatgtatgttaccattaatttctatttgacctctaaattgtaaaatgcctccaaaagtttatttatagaacaaaaatacatgaggatggatttgtacaaatgtataaaatgccactatttatacaccaagttcatagcagcattactggaatagcaaaagatggaaacagctcaagtgtctatcatgaatggataaacaaatgtgctataatacatacaatggaatattatttagctttaaaaaggaatgaaattctgataaatactacctcaggataaaccttgaaaacactatgctaagtgaaataagccagacacaaaaggccaaatatgatgccacttttatgaggtaccagcataggcaagttcacagaaacagaaaggagaatagtggttgccagggactgcagggaggaggaaatggggggtggggttattgtttaacgagtacatagtttctgtttgggatgaacaaattctggaaatggatagcgatgatggttgctcaacattttgaatgttaatgccactaaattgtacccataaaaatggttaaaatggtaaattttgttatgtatattttatcataatttaaaaaatatatctagaatgggcaagaaggattctcctcattcctctcttgacttgagaatgatcagtcaataggccctgaagtctgaatttgtgaaaatttccttgggtgacaaacttgtttgattactctatttagtgtatcccaaagttattaccacataatcttttaaacaataaaacaaataccccttagaaagtcttctgcaaacccatttctgaaaatggtacattatagggtgggtatagatgcatagatatgggattatgtatgatatatatatatatacacacacacacaaagggatagagagattacctctcttaacccccattttaattactatgtctaggttttttaaataaaaatcttttctttttaacatgtttcttttcttttccggaatattggaatattctgttcttgatccagatgaaatctgattgagcagtgtacttacaagttgtactgtgtatgtgtttcctatattgttatatttcaataagaagcttaaaatgtttaaaaataaatggttaaaaggttttatgttatgtatattttaccacaataaatgcaaaaaataaaaagtctgtgttctaaaaaaaaatc

SEQ ID NO: 420711 - DNA, 3948 bp, Homo sapiens
agcgtaactcttagaagtcactatggtgacggggaggtaccaggtatttgagagcaatcgccaccgctttcctggaacttgagtaaatacaatcaagtggcatcttaaatttttgctggaagtggagtcatgagactaaagatatctcttttaaaagaaccaaagcagaattagtaagctgtgtgggctggactactgctgaagagctgtattcatgtagtgatgatcaccagatagtgaagtggaacttgttaaccagtgaaacaactcaaatagtaaagcttcctgatgatatttaccctattgattttcactggtttccaaaaagtttgggtgtaaagaaacaaacccaggcagaaagctttgtcctcacaagttctgatggtaaatttcatctgatttccaagttaggaagagtggaaaaaagtgtagaagctcactgtggagcagtacttgcaggaagatggaattatgaaggaacagcattagttacagttggagaagatggacaaataaaaatttggtcaaagactgggatgcttagatcaactttagctcagcaaggaacaccagtgtattcagtagcgtggggccctgattcagaaaaggttctttatacagcaggcaagcagctaatcattaaacctcttcaaccaaatgctaaagttttgcagtggaaagctcatgatggcattattttaaaagtagattggaactcggtcaatgatcttattttatctgctggtgaagactgtaaatataaggtatgggatagttacggccgcccactgtacaattcacaacctcatgagcatcccattacttcagttgcctgggctccagatggagaattatttgctgttggatcgtttcatactttacgcttgtgtgataaaactgggtggtcatatgcattagaaaaacccaacactggcagcatatttaatattgcatggtctatcgatggcactcagattgctggagcctgtggaaatggacatgtcgtttttgcacatgtggtggaacaacattgggagtggaaaaattttcaagtaacattaacgaaaagaagagccatgcaggttcgtaatgttcttaatgatgcagtggatttactggaattccgtgatagagtcattaaagcatctttgaactatgcacacttagttgtttcaacgtctcttcaatgttacgtgttctccacgaagaactggaacacaccaattatatttgatctcaaagaaggaactgttagtttgattctgcaggcagaaagacattttcttcttgtagatggtagtagtatctatttatattcatatgaagggcgctttatttcatctccaaaatttcctggaatgagaacagatattctgaatgcacagactgtgtctttgagtaatgataccatagcaataagagacaaagctgatgaaaaaataatcttcctctttgaggcatcaaccggaaagccgttaggtgatggaaagtttctttctcataagaatgaaatcttggaaattgctctggatcaaaaaggacttaccaatgatagaaaaattgctttcattgataaaaatagagatctctgtatcacttctgtgaaacgatttgggaaggaagaacaaattatcaagcttggaacaatggtgcatactttggcatggaacgatacatgcaatatcctttgtggacttcaagatactcgatttatagtgtggtattaccccaatacagtttatgtggacagagacattttgcctaaaacattatatgaaagggatgcaagtgaatttagtaaaaatccccatattgtgagttttgttggaaatcaagtaactattagaagagctgatggctccctggttcacatcagcataacaccatatcctgctattctccatgaatatgtaagcagttcaaaatgggaagatgctgtgagactttgtcgctttgttaaggagcaaaccatgtgggcttgtctagctgctatggcagttgctaatcgagatatgactactgcagaaatagcctatgcagcaattggtgaaattgataaggttcagtacatcaattctataaaaaatcttccatctaaagaatcaaaaatggcccacatactactgtttagtgggaacatacaggaggctgaaatagtacttcttcaggctggccttgtttatcaagcaatccagatcaatattaatctctacaactgggaaagggcactggaattggctgtaaaatacaaaacacatgttgatacagttcttgcttaccgtcaaaagtttttggagacatttggtaaacaggaaactaataaacgatacttgcattatgcagaaggtctccaaatagattgggagaaaatcaaagccaaaattgagatggaaattacaaaagaaagagagcaatcatcaagcagccaatccagcaagagtataggtttaaagccctaaatgccatgcgtatctttaagaaattttatcttttgaaacacgttctgattaaccaagggtaagcatgttttggttgctaaagaaaaaagcataatctttaaccgagtataagtacttgctgtgtatttagtgtaaaagtacatgcagaaagatgaaacacaaagtaattgatgtatttctatcttttatattttttagtccaataattagcaaaatattactatgtacttaagagatacctgtgtagtgtcgattatatgtcagttttttgcccattacttcatccctaaatcttcagcatgaacaaatattaatgtcgataataaaacattggactctttgaaatgtatgttaccattaatttctatttgacctctaaattgtaaaatgcctccaaaagtttatttatagaacaaaaatacatgaggatggatttgtacaaatgtataaaatgccactatttatacaccaagttcatagcagcattactggaatagcaaaagatggaaacagctcaagtgtctatcatgaatggataaacaaatgtgctataatacatacaatggaatattatttagactatgctaagtgaaataagccagacacaaaaggccaaatatgatgccacttttatgaggtaccagcataggcaagttcacagaaacagaaaggagaatagtggttgccagggactgcagggaggaggaaatggggggtggggttattgtttaacgagtacatagtttctgtttgggatgaacaaattctggaaatggatagcgatgatggttgctcaacattttgaatgttaatgccactaaattgtacccataaaaatggttaaaatggtaaattttgttatgtatattttatcataatttaaaaaatatatctagaatgggcaagaaggattctcctcattcctctcttgacttgagaatgatcagtcaataggccctgaagtctgaatttgtgaaaatttccttgggtgacaaacttgtttgattactctatttagtgtatcccaaagttattaccacataatcttttaaacaataaaacaaataccccttagaaagtcttctgcaaacccatttctgaaaatggtacattatagggtgggtatagatgcatagatatgggattatgtatgatatatatatatatacacacacacacaaagggatagagagattacctctcttaacccccattttaattactatgtctaggttttttaaataaaaatcttttctttttaacatgtttcttttcttttccggaatattggaatattctgttcttgatccagatgaaatctgattgagcagtgtacttacaagttgtactgtgtatgtgtttcctatattgttatatttcaataagaagcttaaaatgtttaaaaataaatggttaaaaggttttatgttatgtatattttaccacaataaatgcaaaaaataaaaagtctgtgttctaaaaaaaaatc

SEQ ID NO: 420712 - DNA, 3987 bp, Homo sapiens
agcgtaactcttagaagtcactatggtgacggggaggtaccaggtatttgagagcaatcgccaccgctttcctggaacttgagtaaatacaatcaagtggcatcttaaatttttgctggaagtggagtcatgagactaaagatatctcttttaaaagaaccaaagcagaattagtaagctgtgtgggctggactactgctgaagagctgtattcatgtagtgatgatcaccagatagtgaagtggaacttgttaaccagtgaaacaactcaaatagtaaagcttcctgatgatatttaccctattgattttcactggtttccaaaaagtttgggtgtaaagaaacaaacccaggcagaaagctttgtcctcacaagttctgatggtaaatttcatctgatttccaagttaggaagagtggaaaaaagtgtagaagctcactgtggagcagtacttgcaggaagatggaattatgaaggaacagcattagttacagttggagaagatggacaaataaaaatttggtcaaagactgggatgcttagatcaactttagctcagcaaggaacaccagtgtattcagtagcgtggggccctgattcagaaaaggttctttatacagcaggcaagcagctaatcattaaacctcttcaaccaaatgctaaagttttgcagtggaaagctcatgatggcattattttaaaagtagattggaactcggtcaatgatcttattttatctgctggtgaagactgtaaatataaggtatgggatagttacggccgcccactgtacaattcacaacctcatgagcatcccattacttcagttgcctgggctccagatggagaattatttgctgttggatcgtttcatactttacgcttgtgtgataaaactgggtggtcatatgcattagaaaaacccaacactggcagcatatttaatattgcatggtctatcgatggcactcagattgctggagcctgtggaaatggacatgtcgtttttgcacatgtggtggaacaacattgggagtggaaaaattttcaagtaacattaacgaaaagaagagccatgcaggttcgtaatgttcttaatgatgcagtggatttactggaattccgtgatagagtcattaaagcatctttgaactatgcacacttagttgtttcaacgtctcttcaatgttacgtgttctccacgaagaactggaacacaccaattatatttgatctcaaagaaggaactgttagtttgattctgcaggcagaaagacattttcttcttgtagatggtagtagtatctatttatattcatatgaagggcgctttatttcatctccaaaatttcctggaatgagaacagatattctgaatgcacagactgtgtctttgagtaatgataccatagcaataagagacaaagctgatgaaaaaataatcttcctctttgaggcatcaaccggaaagccgttaggtgatggaaagtttctttctcataagaatgaaatcttggaaattgctctggatcaaaaaggacttaccaatgatagaaaaattgctttcattgataaaaatagagatctctgtatcacttctgtgaaacgatttgggaaggaagaacaaattatcaagcttggaacaatggtgcatactttggcatggaacgatacatgcaatatcctttgtggacttcaagatactcgatttatagtgtggtattaccccaatacagtttatgtggacagagacattttgcctaaaacattatatgaaagggatgcaagtgaatttagtaaaaatccccatattgtgagttttgttggaaatcaagtaactattagaagagctgatggctccctggttcacatcagcataacaccatatcctgctattctccatgaatatgtaagcagttcaaaatgggaagatgctgtgagactttgtcgctttgttaaggagcaaaccatgtgggcttgtctagctgctatggcagttgctaatcgagatatgactactgcagaaatagcctatgcagcaattggtgaaattgataaggttcagtacatcaattctataaaaaatcttccatctaaagaatcaaaaatggcccacatactactgtttagtgggaacatacaggaggctgaaatagtacttcttcaggctggccttgtttatcaagcaatccagatcaatattaatctctacaactgggaaagggcactggaattggctgtaaaatacaaaacacatgttgatacagttcttgcttaccgtcaaaagtttttggagacatttggtaaacaggaaactaataaacgatacttgcattatgcagaaggtctccaaatagattgggagaaaatcaaagccaaaattgagatggaaattacaaaagaaagagagcaatcatcaagcagccaatccagcaagagtataggtttaaagccctaaatgccatgcgtatctttaagaaattttatcttttgaaacacgttctgattaaccaagggtaagcatgttttggttgctaaagaaaaaagcataatctttaaccgagtataagtacttgctgtgtatttagtgtaaaagtacatgcagaaagatgaaacacaaagtaattgatgtatttctatcttttatattttttagtccaataattagcaaaatattactatgtacttaagagatacctgtgtcagttttttgcccattacttcatccctaaatcttcagcatgaacaaatattaatgtcgataataaaacattggactctttgaaatgtatgttaccattaatttctatttgacctctaaattgtaaaatgcctccaaaagtttatttatagaacaaaaatacatgaggatggatttgtacaaatgtataaaatgccactatttatacaccaagttcatagcagcattactggaatagcaaaagatggaaacagctcaagtgtctatcatgaatggataaacaaatgtgctataatacatacaatggaatattatttagctttaaaaaggaatgaaattctgataaatactacctcaggataaaccttgaaaacactatgctaagtgaaataagccagacacaaaaggccaaatatgatgccacttttatgaggtaccagcataggcaagttcacagaaacagaaaggagaatagtggttgccagggactgcagggaggaggaaatggggggtggggttattgtttaacgagtacatagtttctgtttgggatgaacaaattctggaaatggatagcgatgatggttgctcaacattttgaatgttaatgccactaaattgtacccataaaaatggttaaaatggtaaattttgttatgtatattttatcataatttaaaaaatatatctagaatgggcaagaaggattctcctcattcctctcttgacttgagaatgatcagtcaataggccctgaagtctgaatttgtgaaaatttccttgggtgacaaacttgtttgattactctatttagtgtatcccaaagttattaccacataatcttttaaacaataaaacaaataccccttagaaagtcttctgcaaacccatttctgaaaatggtacattatagggtgggtatagatgcatagatatgggattatgtatgatatatatatatatacacacacacacaaagggatagagagattacctctcttaacccccattttaattactatgtctaggttttttaaataaaaatcttttctttttaacatgtttcttttcttttccggaatattggaatattctgttcttgatccagatgaaatctgattgagcagtgtacttacaagttgtactgtgtatgtgtttcctatattgttatatttcaataagaagcttaaaatgtttaaaaataaatggttaaaaggttttatgttatgtatattttaccacaataaatgcaaaaaataaaaagtctgtgttctaaaaaaaaatc

SEQ ID NO: 420713 - DNA, 1861 bp, Homo sapiens
atttgcagatattaaatcgtctttcctcttacagattatatacttcctgaagagcggaaacatttcacattatctatacataggcactggaattggctgtaaaatacaaaacacatgttgatacagttcttgcttaccgtcaaaagtttttggagacatttggtaaacaggaaactaataaacgatacttgcattatgcagaaggtctccaaatagattgggagaaaatcaaagccaaaattgagatggaaattacaaaagaaagagagcaatcatcaagcagccaatccagcaagagtataggtttaaagccctaaatgccatgcgtatctttaagaaattttatcttttgaaacacgttctgattaaccaagggtaagcatgttttggttgctaaagaaaaaagcataatctttaaccgagtataagtacttgctgtgtatttagtgtaaaagtacatgcagaaagatgaaacacaaagtaattgatgtatttctatcttttatattttttagtccaataattagcaaaatattactatgtacttaagagatacctgtgtagtgtcgattatatgtcagttttttgcccattacttcatccctaaatcttcagcatgaacaaatattaatgtcgataataaaacattggactctttgaaatgtatgttaccattaatttctatttgacctctaaattgtaaaatgcctccaaaagtttatttatagaacaaaaatacatgaggatggatttgtacaaatgtataaaatgccactatttatacaccaagttcatagcagcattactggaatagcaaaagatggaaacagctcaagtgtctatcatgaatggataaacaaatgtgctataatacatacaatggaatattatttagctttaaaaaggaatgaaattctgataaatactacctcaggataaaccttgaaaacactatgctaagtgaaataagccagacacaaaaggccaaatatgatgccacttttatgaggtaccagcataggcaagttcacagaaacagaaaggagaatagtggttgccagggactgcagggaggaggaaatggggggtggggttattgtttaacgagtacatagtttctgtttgggatgaacaaattctggaaatggatagcgatgatggttgctcaacattttgaatgttaatgccactaaattgtacccataaaaatggttaaaatggtaaattttgttatgtatattttatcataatttaaaaaatatatctagaatgggcaagaaggattctcctcattcctctcttgacttgagaatgatcagtcaataggccctgaagtctgaatttgtgaaaatttccttgggtgacaaacttgtttgattactctatttagtgtatcccaaagttattaccacataatcttttaaacaataaaacaaataccccttagaaagtcttctgcaaacccatttctgaaaatggtacattatagggtgggtatagatgcatagatatgggattatgtatgatatatatatatatacacacacacacaaagggatagagagattacctctcttaacccccattttaattactatgtctaggttttttaaataaaaatcttttctttttaacatgtttcttttcttttccggaatattggaatattctgttcttgatccagatgaaatctgattgagcagtgtacttacaagttgtactgtgtatgtgtttcctatattgttatatttcaataagaagcttaaaatgtttaaaaataaatggttaaaaggttttatgttatgtatattttaccacaataaatgcaaaaaataaaaagtctgtgttctaaaaaaaaatc

SEQ ID NO: 420714 - DNA, 1641 bp, Homo sapiens
agcgtaactcttagaagtcactatggtgacggggaggtaccaggtatttgagagcaatcgccaccgctttcctggaacttgagtaaatacaatcaagtggcatcttaaatttttgctggaagtggagtcatgagactaaagatatctcttttaaaagaaccaaagcagaattagtaagctgtgtgggctggactactgctgaagagctgtattcatgtagtgatgatcaccagatagtgaagtggaacttgttaaccagtgaaacaactcaaatagtaaagcttcctgatgatatttaccctattgattttcactggtttccaaaaagtttgggtgtaaagaaacaaacccaggcagaaagctttgtcctcacaagttctgatggtaaatttcatctgatttccaagttaggaagagtggaaaaaagtgtagaagctcactgtggagcagtacttgcaggaagatggaattatgaaggaacagcattagttacagttggagaagatggacaaataaaaatttggtcaaagactgggatgcttagatcaactttagctcagcaaggaacaccagtgtattcagtagcgtggggccctgattcagaaaaggttctttatacagcaggcaagcagctaatcattaaacctcttcaaccaaatgctaaagttttgcagtggaaagctcatgatggcattattttaaaagtagattggaactcggtcaatgatcttattttatctgctggtgaagactgtaaatataaggtatgggatagttacggccgcccactgtacaattcacaacctcatgagcatcccattacttcagttgcctgggctccagatggagaattatttgctgttggatcgtttcatactttacgcttgtgtgataaaactgggtggtcatatgcattagaaaaacccaacactggcagcatatttaatattgcatggtctatcgatggcactcagattgctggagcctgtggaaatggacatgtcgtttttgcacatgtggtggaacaacattgggagtggaaaaattttcaagtaacattaacgaaaagaagagccatgcaggttcgtaatgttcttaatgatgcagtggatttactggaattccgtgatagagtcattaaagcatctttgaactatgcacacttagttgtttcaacgtctcttcaatgttacgtgttctccacgaagaactggaacacaccaattatatttgatctcaaagaaggaactgttagtttgattctgcaggcagaaagacattttcttcttgtagatggtagtagtatctatttatattcatatgaagggcgctttatttcatctccaaaatttcctggaatgagaacagatattctgaatgcacagactgtgtctttgagtaatgataccatagcaataagagacaaagctgatgaaaaaagctttctctgagagaagacttttggtaatttttttttaaaggacttcctttttggctaagaaagaggaaaacagaatggaataatatagtatccagatggcagacagaattaagataactataaattgtgaaaataatagtaatttggaagccagatttttgttttcaataaacttaagattgaaagtccctgtgatcact

SEQ ID NO: 420715 - DNA, 1575 bp, Homo sapiens
agcgtaactcttagaagtcactatggtgacggggaggtaccaggtatttgagagcaatcgccaccgctttcctggaacttgagtaaatacaatcaagtggcatcttaaatttttgctggaagtggagtcatgagactaaagatatctcttttaaaagaaccaaagcagaattagtaagctgtgtgggctggactactgctgaagagctgtattcatgtagtgatgatcaccagatagtgaagtggaacttgttaaccagtgaaacaactcaaatagtaaagcttcctgatgatatttaccctattgattttcactggtttccaaaaagtttgggtgtaaagaaacaaacccaggcagaaagctttgtcctcacaagttctgatggtaaatttcatctgatttccaagttaggaagagtggaaaaaagtgtagaagctcactgtggagcagtacttgcaggaagatggaattatgaaggaacagcattagttacagttggagaagatggacaaataaaaatttggtcaaagactgggatgcttagatcaactttagctcagcaaggaacaccagtgtattcagtagcgtggggccctgattcagaaaaggttctttatacagcaggcaagcagctaatcattaaacctcttcaaccaaatgctaaagttttgcagtggaaagctcatgatggcattattttaaaagtagattggaactcggtcaatgatcttattttatctgctggtgaagactgtaaatataaggtatgggatagttacggccgcccactgtacaattcacaacctcatgagcatcccattacttcagttgcctgggctccagatggagaattatttgctgttggatcgtttcatactttacgcttgtgtgataaaactgggtggtcatatgcattagaaaaacccaacactggcagcatatttaatattgcatggtctatcgatggcactcagattgctggagcctgtggaaatggacatgtcgtttttgcacatgtggtggaacaacattgggagtggaaaaattttcaagtaacattaacgaaaagaagagccatgcaggttcgtaatgttcttaatgatgcagtggatttactggaattccgtgatagagtcattaaagcatctttgaactatgcacacttagttgtttcaacgtctcttcaatgttacgtgttctccacgaagaactggaacacaccaattatatttgatctcaaagaaggaactgttagtttgattctgcaggcagaaagtctatttatattcatatgaagggcgctttatttcatctccaaaatttcctggaatgagaacagatattctgaatgcacagactgtgtcttcaataagagacaaagctgatgaaaaaagctttctctgagagaagacttttggtaatttttttttaaaggacttcctttttggctaagaataatatagtatccagatggcagacagaattaagataactataaattgtgaaaataatagtaatttggaagccagatttttgttttcaataaacttaagattgaaagtccctgtgatcact

SEQ ID NO: 420716 - DNA, 215 bp, Homo sapiens
gatctgggccctgaagtatataagtaggaatttgcaagatggatgaggtagaaaatggtatttcatattgtggaataaacagagggaagagccatttgtcttatccccaactccagaactctactactcatggagtctgacacaaacaatgttaataatctgttttatttctcattatagggcactggaattggctgtaaaatacaaaacacatg

SEQ ID NO: 420717 - DNA, 476 bp, Homo sapiens
taatatttgcctttatgcctttagtgcctattacttagtctagtagtaggtgctttgttgattgaataaataaaatagatttttcaaatgtaatttctttcaggtaaatttcatctgatttccaagttaggaagagtggaaaaaagtgtagaagctcactgtggagcagtacttgcaggaagatggaattatgaaggaacagcattagttacaggtaagttgtctgtaaaaatgacatttgaaatgaatattttaaagaaaaatttccaaagaaacagaatattttcatttagcaatagtgtctttcattgtgtaatagcaaataattggcatagtattgttctacactgctatataaatgttacaattcagaatgttatattaatcattttcttatgtgacctttggagactgttctgtcaaagaaggcttttggaatggtcacgtatggaataaataaaagttgtaattcttta

SEQ ID NO: 420718 - DNA, 1696 bp, Homo sapiens
cgtaagaatctgagtttgtttttcaaagatcactaaattttagttatgattatatcacattttccaaaatgtgtggcagtttttgccctccttgctctgagtgttggtgcactggacacttttattgctgcagtatatgagcatgcggtgatattaccaaacagaacagaaacacctgtttcaaaagaagaagctttgctcctgatgaacaagaacatagatgttttggagaaagcagttaagctggcagcgaagcagggtgcacatatcattgtgaccccagaagatggaatctatggttggatcttcaccagggagagcatttacccctatctagaggatataccagaccctggagtgaactggattccatgtagagacccctggagattcggcaacacaccagtgcaacaaagactcagctgcctggccaaggacaactctatctatgtcgtggctaatattggggacaagaagccatgcaatgctagtgactctcagtgtccccctgatggccgttaccaatacaacactgatgtggtgtttgattctcagggaaaactgttggcacgctaccataagtacaatctttttgcacctgaaattcagtttgatttccccaaggattcagaacttgtgacttttgacactccctttgggaagtttggcatttttacttgctttgacattttttctcatgacccagctgcggtggtggtggatgaagtttcaattgacagcattctctaccccacagcatggtacaacacgctgcccctcctctcggctgttcccttccattcagcatgggccaaggccatgggagtcaatctacttgctgcaaatacccacaacaccagcatgcacatgacagggagtggaatctacgccccagaagcagtcaaggtgtaccactatgacatggaaacagagagtggtcagctgttgctatcagaactgaagtctcggccccgccgtgagcccacctaccctgcagctgttgactggcatgcgtatgccagcagtgtcaagccattttcctctgaacagtcagattttctggggatgatttattttgatgagtttaccttcaccaagcttaagagaaatacaggaaattacacagcttgccagaaagatctgtgttgtcacttaacttacaagatgtctgagaagcgaacagacgagatctatgccctaggtgcttttgatggactgcacacagtagaaggccaatattacttacagatatgtgcattactgaagtgtcaaaccactgacctggaaacgtgtggagaacctgtggggtcagcttttaccaagtttgaagacttctccctcagtggcacatttggaacgcgttatgttttcccacagatcattctaagtgggagtcagcttgcccctgaaagacattatgagatttcaagagatggacgcttgaggagccgaagtggagcccctttgcctgtcttagttatggccctgtatggaagagtgtttgagaaggaccctccacgcttagggcagggatctgggaaattccagtgatctcctttagcagagcccttttaggattagcctggctaagaaaggaagaaaaaaaagagatccgttagtgtctgtttagaaaagatgttataaacttacagaaacaaatataataaactgaagcagatttgaaaagcaacaagtg

SEQ ID NO: 420719 - DNA, 1742 bp, Homo sapiens
cgtaagaatctgagtttgtttttcaaagatcactaaattttagttatgattatatcacattttccaaaatgtgtggcagtttttgccctccttgctctgagtgttggtgcactggacacttttattgctgcagtatatgagcatgcggtgatattaccaaacagaacagaaacacctgtttcaaaagaagaagctttgctcctgatgaacaagaacatagatgttttggagaaagcagttaagctggcagcgaagcagggtgcacatatcattgtgaccccagaagatggaatctatggttggatcttcaccagggagagcatttacccctatctagaggatataccagaccctggagtgaactggattccatgtagagacccctggagaaatcactaaaatatagtaagtttgaggaaatgtctattgaattagattcggcaacacaccagtgcaacaaagactcagctgcctggccaaggacaactctatctatgtcgtggctaatattggggacaagaagccatgcaatgctagtgactctcagtgtccccctgatggccgttaccaatacaacactgatgtggtgtttgattctcagggaaaactgttggcacgctaccataagtacaatctttttgcacctgaaattcagtttgatttccccaaggattcagaacttgtgacttttgacactccctttgggaagtttggcatttttacttgctttgacattttttctcatgacccagctgcggtggtggtggatgaagtttcaattgacagcattctctaccccacagcatggtacaacacgctgcccctcctctcggctgttcccttccattcagcatgggccaaggccatgggagtcaatctacttgctgcaaatacccacaacaccagcatgcacatgacagggagtggaatctacgccccagaagcagtcaaggtgtaccactatgacatggaaacagagagtggtcagctgttgctatcagaactgaagtctcggccccgccgtgagcccacctaccctgcagctgttgactggcatgcgtatgccagcagtgtcaagccattttcctctgaacagtcagattttctggggatgatttattttgatgagtttaccttcaccaagcttaagagaaatacaggaaattacacagcttgccagaaagatctgtgttgtcacttaacttacaagatgtctgagaagcgaacagacgagatctatgccctaggtgcttttgatggactgcacacagtagaaggccaatattacttacagatatgtgcattactgaagtgtcaaaccactgacctggaaacgtgtggagaacctgtggggtcagcttttaccaagtttgaagacttctccctcagtggcacatttggaacgcgttatgttttcccacagatcattctaagtgggagtcagcttgcccctgaaagacattatgagatttcaagagatggacgcttgaggagccgaagtggagcccctttgcctgtcttagttatggccctgtatggaagagtgtttgagaaggaccctccacgcttagggcagggatctgggaaattccagtgatctcctttagcagagcccttttaggattagcctggctaagaaaggaagaaaaaaaagagatccgttagtgtctgtttagaaaagatgttataaacttacagaaacaaatataataaactgaagcagatttgaaaagcaacaagtg

SEQ ID NO: 420720 - DNA, 816 bp, Homo sapiens
tgatatggaatataaattgtggttttagattgccattaggctgtgatggagaatttggggttcatttttttaacataaatgtgatgttgatattcaaggcaacaggaaattcacagagaagctaaaataaaaatgttgactgctgataatggcaataatgttgtcatttgcatggtgtagaaggtgcaaattaaatacattaaataatgcatctacaacttattttctgggtatactattttgagaagttgttataattatagtaataactaatattttgtatagtgtttcatgagtttgaagaacatatttttatacatattatttgaccacctgtgcaacaaatttgttggctgcactttcgcacaaagtccctctactttccagacttgaaacatgaacctgggtcttcccaacaccaaatcctgtgtgatttttacccattctacactgctttaggagggagtgatcttgcctgagaagggctctaggttgtaacctaaactctgcactgaagttaaccctttgctttctttgaccagatttcaagagatggacgcttgaggagccgaagtggagcccctttgcctgtcttagttatggccctgtatggaagagtgtttgagaaggaccctccacgcttagggcagggatctgggaaattccagtgatctcctttagcagagcccttttaggattagcctggctaagaaaggaagaaaaaaaagagatccgttagtgtctgtttagaaaagatgttataaacttacagaaacaaatataataaactgaagcagatttgaaaagcaacaagtg

SEQ ID NO: 420721 - DNA, 803 bp, Homo sapiens
cgtaagaatctgagtttgtttttcaaagatcactaaattttagttatgattatatcacattttccaaaatgtgtggcagtttttgccctccttgctctgagtgttggtgcactggacacttttattgctgcagtatatgagcatgcggtgatattaccaaacagaacagaaacacctgtttcaaaagaagaagctttgctcctgatgaacaagaacatagatgttttggagaaagcagttaagctggcagcgaagcagggtgcacatatcattgtgaccccagaagatggaatctatggttggatcttcaccagggagagcatttacccctatctagaggatataccagaccctggagtgaactggattccatgtagagacccctggaggaagagtaaaaagatgaatgagcctgtttccaaagagctttgctatcactgtcattcagaatgcaatcaatatggccaatggaaattgtataggacttgaaaaaggaagccctacttctgggaccacattttacgaccacctagctgagtgataaatcactaaaatatagtaagtttgaggaaatgtctattgaattagattcggcaacacaccagtgcaacaaagactcagctgcctggccaaggacaactctatctatgtcgtggctaatattggggacaagaagccatgcaatgctagtgactctcagtgtccccctgatggccgttaccaatacaacactgatgtggtgtttgattctcagggaaaactgttggcacgctaccataaggtgagcatcacttgtgccttag

SEQ ID NO: 420722 - DNA, 330 bp, Homo sapiens
ctttccagacttgaaacatgaacctgggtcttcccaacaccaaatcctgtgtgatttttacccattctacactgctttaggagggagtgatcttgcctgagaagggctctaggttgtaacctaaactctgcactgaagttaaccctttgctttctttgaccagatttcaagagatggacgcttgaggagccgaagtggagcccctttgcctgtcttagttatggccctgtatggaagagtgtttgagaaggaccctccacgcttagggcagggatctgggaaattccagtgatctcctttagcagagcccttttaggattagcctggcta

SEQ ID NO: 420723 - DNA, 369 bp, Homo sapiens
tgacttcagtataaaaagtgttaatcctgacccactatattgactttaggattcattaataagttgttacctgcagtttgaaaaatacttcttatgaggcaatttaaatatgcatttatagtttgaaattgcattatttagctgagaaaatatttgcaagttttctgactccttctcttttcttttcttccatagatatgtgcattactgaagtgtcaaaccactgacctggaaacgtgtggagaacctgtggggtcagcttttaccaagtttgaagacttctccctcagtggcacatttggaacgcgttatgttttcccacagatcattctaagtgggagtcagcttgcccctgaaagacattatgag

SEQ ID NO: 420724 - DNA, 4244 bp, Homo sapiens
  misc_feature (2)..(3): n is a, c, g, or t
gnngagaagccactctcccgaaaccagagggatggggccggctgtgcagtagaacggggatcgaaaagaggaaaacaagggcacgaagaccagcgagaaagaagaggacacctgggaaaggcggaagcagaagacggggaagggaaaagaaacccatagcaggtggaaaccagatctagagcaacaccgtcaggttcacagtttgtttttctagaagagaagaaagtacctgaggattgctcttttttcctaccgttaatgaaaactacttttgtcttcatcataaaagaaaaaactaaggggaggtaaaggcagtctcctgttttattagggggagaggtgaagggaaatccaggctcactttctgaataagccactgcctggtgcacagagcagaaccatcctggtttctgaagacacatccctttcagcagaattccagccggagtcgctggcacagttctatttttatatttaaatgtatgtctcccctggcctttttttttttttttttttttttttagcaacacttttcttgtttgtaaacgcgagtgaccagaaagtgtgaatgcggagtaggaatatttttcgtgttctcttttatctgcttgccttttttagagagtagcagtggttcctatttcggaaaaggacgttctaattcaaagctctctcccaatatatttacacgaatacgcatttagaaagggaggcagcttttgaggttgcaatcctactgagaaggatggaagaaggagccaggcaccgaaacaacaccgaaaagaaacacccaggtgggggcgagtcggacgccagccccgaggctggttccggagggggcggagtagccctgaagaaagagatcggattggtcagtgcctgtggtatcatcgtagggaacatcatcggctctggaatctttgtctcgccaaagggagtgctggagaatgctggttctgtgggccttgctctcatcgtctggattgtgacgggcttcatcacagttgtgggagccctctgctatgctgaactcggggtcaccatccccaaatctggaggtgactactcctatgtcaaggacatcttcggaggactggctgggttcctgaggctgtggattgctgtgctggtgatctaccccaccaaccaggctgtcatcgccctcaccttctccaactacgtgctgcagccgctcttccccacctgcttccccccagagtctggccttcggctcctggctgccatctgcttattgctcctcacatgggtcaactgttccagtgtgcggtgggccacccgggttcaagacatcttcacagctgggaagctcctggccttggccctgattatcatcatggggattgtacagatatgcaaaggagagtacttctggctggagccaaagaatgcatttgagaatttccaggaacctgacatcggcctcgtcgcactggctttccttcagggctcctttgcctatggaggctggaactttctgaattacgtgactgaggagcttgttgatccctacaagaaccttcccagagccatcttcatctccatcccactggtcacatttgtgtatgtctttgccaatgtcgcttatgtcactgcaatgtccccccaggagctgctggcatccaacgccgtcgctgtgacttttggagagaagctcctaggagtcatggcctggatcatgcccatttctgttgccctgtccacatttggaggagttaatgggtctctcttcacctcctctcggctgttcttcgctggagcccgagagggccaccttcccagtgtgttggccatgatccacgtgaagcgctgcaccccaatcccagccctgctcttcacatgcatctccaccctgctgatgctggtcaccagcgacatgtacacactcatcaactacgtgggcttcatcaactacctcttctatggggtcacggttgctggacagatagtccttcgctggaagaagcctgatatcccccgccccatcaagatcaacctgctgttccccatcatctacttgctgttctgggccttcctgctggtcttcagcctgtggtcagagccggtggtgtgtggcattggcctggccatcatgctgacaggagtgcctgtctatttcctgggtgtttactggcaacacaagcccaagtgtttcagtgacttcattgagctgctaaccctggtgagccagaagatgtgtgtggtcgtgtaccccgaggtggagcggggctcagggacagaggaggctaatgaggacatggaggagcagcagcagcccatgtaccaacccactcccacgaaggacaaggacgtggcggggcagccccagccctgaggaccaccattccctggctactctctccttcctcccccttttatcctacctccctgccttggtcccgccaacacatgcgagtacacacacacccctctctctgcttttgtcaggcagtggtaggactttggtgtgggtggtgagaaattgtaaacaaaaactgacattcatacccaaagaaccagcctctcaccccagggtccatgtcccaggccccactccagtgctgcccacactcccagctgctggaggagaggggagatgccaaggtgccctgcaggacctccctccgggccacaccctcagctgcctcttcaggaaccggagctcattactgccttccctcccagggaggccccttcagagaggagaggccacaggagctgcattgtggggggacaggctcaagcaattctgtccccatcaaggggtcagctggagagacccaagaccctatctgttcaccagggacccaaaatccaaggggatgcttccctctgccctctttcctgcccctccccatcatacctgcacccaccccagccagggctccctgtccagaattcggttctcctcaggacgccaactcccagagctaaggaccaaggagaagaacagcctctccacccccaagccaggcggttgaggaacatattgagaaaggttcagattgcagaaacccagccctgcccctgcctcctgcatccagcccccaacatggtgccaaagcttccagaagccaaaaagcttctgatttttaaggtagtgggcatctctctcctaatgacgaagctgctcagcaactccacctgcccgccgcaggaaggagcagtcccctgctatccctgcagccactcccagcacacccgcacacagccagcaccaccgcccccaccgtgcacttctcctctctgggccttggcttgggaccaggtacgaaggatccccaagcccttcaggcctgagatcagagccagatcagccttaagtcacctcccatccaagaacttggcctaaaaatactcccctatttctaaccctcaggacggatctgatattaaatgccttccctgggaggaagggtgctttccccctccctagaggtgcccattccataccctgggagactgaggagagcattggctgaagcccagttcctttcccatccatccccaactccaataatcccccactcctcgcaggtctcagtgtcatgctgtcttggggcagggtgaaagggtagtggcagcagggcgcccactctggagatcctcaaaaaaggccctcctctgtggctggcagcctctgacctttccctgggcttcaaaggaaggctatggagtttgctgtgggccctgcaaccttcccagccactcctgctgcactaaggacttaggatccttttatcacaaatcgggattctctcccccaccccgaattctgtctgcttaaactggaatacacaggagcccttcctggcctggatggtgtctcccagcttccccgcccagcttgcccaccccatagttggtgagatgccaagtttggtctgagttgtgaccccttcagagtagatgcccggcaggctggggttggcccctggagggtcaggggaccatcttcttattccctcttttctcattcctccaacttcctcccctccttcaattatttttttgtaaagttgatgccttactttttggataaatatttttgaagctggtatttctatttcttttggattttttttaatgtaaggttgttttgggggatggagttagaaccttaatgataatttctttcgtttggtgtaggttttagagatttgttttgtggagaggtttttttcttttgatgtaataaaatttaaaatggaaatgaaaaaaaaggt

SEQ ID NO: 420725 - DNA, 2446 bp, Homo sapiens
  misc_feature (2)..(3): n is a, c, g, or t
gnngagaagccactctcccgaaaccagagggatggggccggctgtgcagtagaacggggatcgaaaagaggaaaacaagggcacgaagaccagcgagaaagaagaggacacctgggaaaggcggaagcagaagacggggaagggaaaagaaacccatagcaggtggaaaccagatctagagcaacaccgtcaggttcacagtttgtttttctagaagagaagaaagtacctgaggattgctcttttttcctaccgttaatgaaaactacttttgtcttcatcataaaagaaaaaactaaggggaggtaaaggcagtctcctgttttattagggggagaggtgaagggaaatccaggctcactttctgaataagccactgcctggtgcacagagcagaaccatcctggtttctgaagacacatccctttcagcagaattccagccggagtcgctggcacagttctatttttatatttaaatgtatgtctcccctggcctttttttttttttttttttttttttagcaacacttttcttgtttgtaaacgcgagtgaccagaaagtgtgaatgcggagtaggaatatttttcgtgttctcttttatctgcttgccttttttagagagtagcagtggttcctatttcggaaaaggacgttctaattcaaagctctctcccaatatatttacacgaatacgcatttagaaagggaggcagcttttgaggttgcaatcctactgagaaggatggaagaaggagccaggcaccgaaacaacaccgaaaagaaacacccaggtgggggcgagtcggacgccagccccgaggctggttccggagggggcggagtagccctgaagaaagagatcggattggtcagtgcctgtggtatcatcgtagggaacatcatcggctctggaatctttgtctcgccaaaaggagctgcattgtggggggacaggctcaagcaattctgtccccatcaaggggtcagctggagagacccaagaccctatctgttcaccagggacccaaaatccaaggggatgcttccctctgccctctttcctgcccctccccatcatacctgcacccaccccagccagggctccctgtccagaattcggttctcctcaggacgccaactcccagagctaaggaccaaggagaagaacagcctctccacccccaagccaggcggttgaggaacatattgagaaaggttcagattgcagaaacccagccctgcccctgcctcctgcatccagcccccaacatggtgccaaagcttccagaagccaaaaagcttctgatttttaaggtagtgggcatctctctcctaatgacgaagctgctcagcaactccacctgcccgccgcaggaaggagcagtcccctgctatccctgcagccactcccagcacacccgcacacagccagcaccaccgcccccaccgtgcacttctcctctctgggccttggcttgggaccaggtacgaaggatccccaagcccttcaggcctgagatcagagccagatcagccttaagtcacctcccatccaagaacttggcctaaaaatactcccctatttctaaccctcaggacggatctgatattaaatgccttccctgggaggaagggtgctttccccctccctagaggtgcccattccataccctgggagactgaggagagcattggctgaagcccagttcctttcccatccatccccaactccaataatcccccactcctcgcaggtctcagtgtcatgctgtcttggggcagggtgaaagggtagtggcagcagggcgcccactctggagatcctcaaaaaaggccctcctctgtggctggcagcctctgacctttccctgggcttcaaaggaaggctatggagtttgctgtgggccctgcaaccttcccagccactcctgctgcactaaggacttaggatccttttatcacaaatcgggattctctcccccaccccgaattctgtctgcttaaactggaatacacaggagcccttcctggcctggatggtgtctcccagcttccccgcccagcttgcccaccccatagttggtgagatgccaagtttggtctgagttgtgaccccttcagagtagatgcccggcaggctggggttggcccctggagggtcaggggaccatcttcttattccctcttttctcattcctccaacttcctcccctccttcaattatttttttgtaaagttgatgccttactttttggataaatatttttgaagctggtatttctatttcttttggattttttttaatgtaaggttgttttgggggatggagttagaaccttaatgataatttctttcgtttggtgtaggttttagagatttgttttgtggagaggtttttttcttttgatgtaataaaatttaaaatggaaatgaaaaaaaaggt

SEQ ID NO: 420726 - DNA, 3078 bp, Homo sapiens
cccttttgctccagctggaggggagggagtctgtgggagctggccagagcgtggcagaaggcagagaagtgaacgccccagcaaaagtgctcctcacatgggtcaactgttccagtgtgcggtgggccacccgggttcaagacatcttcacagctgggaagctcctggccttggccctgattatcatcatggggattgtacagatatgcaaaggagagtacttctggctggagccaaagaatgcatttgagaatttccaggaacctgacatcggcctcgtcgcactggctttccttcagggctcctttgcctatggaggctggaactttctgaattacgtgactgaggagcttgttgatccctacaagaaccttcccagagccatcttcatctccatcccactggtcacatttgtgtatgtctttgccaatgtcgcttatgtcactgcaatgtccccccaggagctgctggcatccaacgccgtcgctgtgacttttggagagaagctcctaggagtcatggcctggatcatgcccatttctgttgccctgtccacatttggaggagttaatgggtctctcttcacctcctctcggctgttcttcgctggagcccgagagggccaccttcccagtgtgttggccatgatccacgtgaagcgctgcaccccaatcccagccctgctcttcacatgcatctccaccctgctgatgctggtcaccagcgacatgtacacactcatcaactacgtgggcttcatcaactacctcttctatggggtcacggttgctggacagatagtccttcgctggaagaagcctgatatcccccgccccatcaagatcaacctgctgttccccatcatctacttgctgttctgggccttcctgctggtcttcagcctgtggtcagagccggtggtgtgtggcattggcctggccatcatgctgacaggagtgcctgtctatttcctgggtgtttactggcaacacaagcccaagtgtttcagtgacttcattgagctgctaaccctggtgagccagaagatgtgtgtggtcgtgtaccccgaggtggagcggggctcagggacagaggaggctaatgaggacatggaggagcagcagcagcccatgtaccaacccactcccacgaaggacaaggacgtggcggggcagccccagccctgaggaccaccattccctggctactctctccttcctcccccttttatcctacctccctgccttggtcccgccaacacatgcgagtacacacacacccctctctctgcttttgtcaggcagtggtaggactttggtgtgggtggtgagaaattgtaaacaaaaactgacattcatacccaaagaaccagcctctcaccccagggtccatgtcccaggccccactccagtgctgcccacactcccagctgctggaggagaggggagatgccaaggtgccctgcaggacctccctccgggccacaccctcagctgcctcttcaggaaccggagctcattactgccttccctcccagggaggccccttcagagaggagaggccacaggagctgcattgtggggggacaggctcaagcaattctgtccccatcaaggggtcagctggagagacccaagaccctatctgttcaccagggacccaaaatccaaggggatgcttccctctgccctctttcctgcccctccccatcatacctgcacccaccccagccagggctccctgtccagaattcggttctcctcaggacgccaactcccagagctaaggaccaaggagaagaacagcctctccacccccaagccaggcggttgaggaacatattgagaaaggttcagattgcagaaacccagccctgcccctgcctcctgcatccagcccccaacatggtgccaaagcttccagaagccaaaaagcttctgatttttaaggtagtgggcatctctctcctaatgacgaagctgctcagcaactccacctgcccgccgcaggaaggagcagtcccctgctatccctgcagccactcccagcacacccgcacacagccagcaccaccgcccccaccgtgcacttctcctctctgggccttggcttgggaccaggtacgaaggatccccaagcccttcaggcctgagatcagagccagatcagccttaagtcacctcccatccaagaacttggcctaaaaatactcccctatttctaaccctcaggacggatctgatattaaatgccttccctgggaggaagggtgctttccccctccctagaggtgcccattccataccctgggagactgaggagagcattggctgaagcccagttcctttcccatccatccccaactccaataatcccccactcctcgcaggtctcagtgtcatgctgtcttggggcagggtgaaagggtagtggcagcagggcgcccactctggagatcctcaaaaaaggccctcctctgtggctggcagcctctgacctttccctgggcttcaaaggaaggctatggagtttgctgtgggccctgcaaccttcccagccactcctgctgcactaaggacttaggatccttttatcacaaatcgggattctctcccccaccccgaattctgtctgcttaaactggaatacacaggagcccttcctggcctggatggtgtctcccagcttccccgcccagcttgcccaccccatagttggtgagatgccaagtttggtctgagttgtgaccccttcagagtagatgcccggcaggctggggttggcccctggagggtcaggggaccatcttcttattccctcttttctcattcctccaacttcctcccctccttcaattatttttttgtaaagttgatgccttactttttggataaatatttttgaagctggtatttctatttcttttggattttttttaatgtaaggttgttttgggggatggagttagaaccttaatgataatttctttcgtttggtgtaggttttagagatttgttttgtggagaggtttttttcttttgatgtaataaaatttaaaatggaaatgaaaaaaaaggt

SEQ ID NO: 420727 - DNA, 4035 bp, Homo sapiens
  misc_feature (2)..(3): n is a, c, g, or t
  misc_feature (3997)..(3997): n is a, c, g, or t
gnngagaagccactctcccgaaaccagagggatggggccggctgtgcagtagaacggggatcgaaaagaggaaaacaagggcacgaagaccagcgagaaagaagaggacacctgggaaaggcggaagcagaagacggggaagggaaaagaaacccatagcaggtggaaaccagatctagagcaacaccgtcaggttcacagtttgtttttctagaagagaagaaagtacctgaggattgctcttttttcctaccgttaatgaaaactacttttgtcttcatcataaaagaaaaaactaaggggaggtaaaggcagtctcctgttttattagggggagaggtgaagggaaatccaggctcactttctgaataagccactgcctggtgcacagagcagaaccatcctggtttctgaagacacatccctttcagcagaattccagccggagtcgctggcacagttctatttttatatttaaatgtatgtctcccctggcctttttttttttttttttttttttttagcaacacttttcttgtttgtaaacgcgagtgaccagaaagtgtgaatgcggagtaggaatatttttcgtgttctcttttatctgcttgccttttttagagagtagcagtggttcctatttcggaaaaggacgttctaattcaaagctctctcccaatatatttacacgaatacgcatttagaaagggaggcagcttttgaggttgcaatcctactgagaaggatggaagaaggagccaggcaccgaaacaacaccgaaaagaaacacccaggtgggggcgagtcggacgccagccccgaggctggttccggagggggcggagtagccctgaagaaagagatcggattggtcagtgcctgtggtatcatcgtagggaacatcatcggctctggaatctttgtctcgccaaagggagtgctggagaatgctggttctgtgggccttgctctcatcgtctggattgtgacgggcttcatcacagttgtgggagccctctgctatgctgaactcggggtcaccatccccaaatctggaggtgactactcctatgtcaaggacatcttcggaggactggctgggttcctgaggctgtggattgctgtgctggtgatctaccccaccaaccaggctgtcatcgccctcaccttctccaactacgtgctgcagccgctcttccccacctgcttccccccagagtctggccttcggctcctggctgccatctgcttattgctcctcacatgggtcaactgttccagtgtgcggtgggccacccgggttcaagacatcttcacagctgggaagctcctggccttggccctgattatcatcatggggattgtacagatatgcaaaggagagtacttctggctggagccaaagaatgcatttgagaatttccaggaacctgacatcggcctcgtcgcactggctttccttcagggctcctttgcctatggaggctggaactttctgaattacgtgactgaggagcttgttgatccctacaagaaccttcccagagccatcttcatctccatcccactggtcacatttgtgtatgtctttgccaatgtcgcttatgtcactgcaatgtccccccaggagctgctggcatccaacgccgtcgctgtgacttttggagagaagctcctaggagtcatggcctggatcatgcccatttctgttgccctgtccacatttggaggagttaatgggtctctcttcacctcctctcggctgttcttcgctggagcccgagagggccaccttcccagtgtgttggccatgatccacgtgaagcgctgcaccccaatcccagccctgctcttcacatgcatctccaccctgctgatgctggtcaccagcgacatgtacacactcatcaactacgtgggcttcatcaactacctcttctatggggtcacggttgctggacagatagtccttcgctggaagaagcctgatatcccccgccccatcaagatcaacctgctgttccccatcatctacttgctgttctgggccttcctgctggtcttcagcctgtggtcagagccggtggtgtgtggcattggcctggccatcatgctgacaggagtgcctgtctatttcctgggtgtttactggcaacacaagcccaagtgtttcagtgacttcattgagctgctaaccctggtgagccagaagatgtgtgtggtcgtgtaccccgaggtggagcggggctcagggacagaggaggctaatgaggacatggaggagcagcagcagcccatgtaccaacccactcccacgaaggacaaggacgtggcggggcagccccagccctgaggaccaccattccctggctactctctccttcctcccccttttatcctacctccctgccttggtcccgccaacacatgcgagtacacacacacccctctctctgcttttgtcaggcagtggtaggactttggtgtgggtggtgagaaattgtaaacaaaaactgacattcatacccaaagaaccagcctctcaccccagggtccatgtcccaggccccactccagtgctgcccacactcccagctgctggaggagaggggagatgccaaggtgccctgcaggacctccctccgggccacaccctcagctgcctcttcaggaaccggagctcattactgccttccctcccagggaggccccttcagagaggagaggccacaggagctgcattgtggggggacaggctcaagcaattctgtccccatcaaggggtcagctggagagacccaagaccctatctgttcaccagggacccaaaatccaaggggatgcttccctctgccctctttcctgcccctccccatcatacctgcacccaccccagccagggctccctgtccagaattcggttctcctcaggacgccaactcccagagctaaggaccaaggagaagaacagcctctccacccccaagccaggcggttgaggaacatattgagaaaggttcagattgcagaaacccagccctgcccctgcctcctgcatccagcccccaacatggtgccaaagcttccagaagccaaaaagcttctgatttttaaggtagtgggcatctctctcctaatgacgaagctgctcagcaactccacctgcccgccgcaggaaggagcagtcccctgctatccctgcagccactcccagcacacccgcacacagccagcaccaccgcccccaccgtgcacttctcctctctgggccttggcttgggaccaggtacgaaggatccccaagcccttcaggcctgagatcagagccagatcagccttaagtcacctcccatccaagaacttggcctaaaaatactcccctatttctaaccctcaggacggatctgatattaaatgccttccctgggaggaagggtgctttccccctccctagaggtgcccattccataccctgggagactgaggagagcattggctgaagcccagttcctttcccatccatccccaactccaataatcccccactcctcgcaggtctcagtgtcatgctgtcttggggcagggtgaaagggtagtggcagcagggcgcccactctggagatcctcaaaaaaggccctcctctgtggctggcagcctctgacctttccctgggcttcaaaggaaggctatggagtttgctgtgggccctgcaaccttcccagccactcctgctgcactaaggacttaggatccttttatcacaaatcgggattctctcccccaccccgaattctgtctgcttaaactggaatacacaggagcccttcctggcctggatggtgtctcccagcttccccgcccagcttgcccaccccatagttggtgagatgccaagtttggtctgagttgtgaccccttcagagtagatgcccggcaggctggggttggcccctggagggtcagaacattgatcttctaatatttgaagctgttaanctaggagagagagatcaactattttgggatcctctagc

SEQ ID NO: 420728 - DNA, 3758 bp, Homo sapiens
  misc_feature (2)..(3): n is a, c, g, or t
gnngagaagccactctcccgaaaccagagggatggggccggctgtgcagtagaacggggatcgaaaagaggaaaacaagggcacgaagaccagcgagaaagaagaggacacctgggaaaggcggaagcagaagacggggaagggaaaagaaacccatagcaggtggaaaccagatctagagcaacaccgtcaggttcacagtttgtttttctagaagagaagaaagtacctgaggattgctcttttttcctaccgttaatgaaaactacttttgtcttcatcataaaagaaaaaactaaggggaggtaaaggcagtctcctgttttattagggggagaggtgaagggaaatccaggctcactttctgaataagccactgcctggtgcacagagcagaaccatcctggtttctgaagacacatccctttcagcagaattccagccggagtcgctggcacagttctatttttatatttaaatgtatgtctcccctggcctttttttttttttttttttttttttagcaacacttttcttgtttgtaaacgcgagtgaccagaaagtgtgaatgcggagtaggaatatttttcgtgttctcttttatctgcttgccttttttagagagtagcagtggttcctatttcggaaaaggacgttctaattcaaagctctctcccaatatatttacacgaatacgcatttagaaagggaggcagcttttgaggttgcaatcctactgagaaggatggaagaaggagccaggcaccgaaacaacaccgaaaagaaacacccaggtgggggcgagtcggacgccagccccgaggctggttccggagggggcggagtagccctgaagaaagagatcggattggtcagtgcctgtggtatcatcgtagggaacatcatcggctctggaatctttgtctcgccaaagggagtgctggagaatgctggttctgtgggccttgctctcatcgtctggattgtgacgggcttcatcacagttgtgggagccctctgctatgctgaactcggggtcaccatccccaaatctggaggtgactactcctatgtcaaggacatcttcggaggactggctgggttcctgaggctgtggattgctgtgctggtgatctaccccaccaaccaggctgtcatcgccctcaccttctccaactacgtgctgcagccgctcttccccacctgcttccccccagagtctggccttcggctcctggctgccatctgcttattgctcctcacatgggtcaactgttccagtgtgcggtgggccacccgggttcaagacatcttcacagctgggaagctcctggccttggccctgattatcatcatggggattgtacagatatgcaaaggagagtacttctggctggagccaaagaatgcatttgagaatttccaggaacctgacatcggcctcgtcgcactggctttccttcagggctcctttgcctatggaggctggaactttctgaattacgtgactgaggagcttgttgatccctacaagaaccttcccagagccatcttcatctccatcccactggtcacatttgtgtatgtctttgccaatgtcgcttatgtcactgcaatgtccccccaggagctgctggcatccaacgccgtcgctgtgacttttggagagaagctcctaggagtcatggcctggatcatgcccatttctgttgccctgtccacatttggaggagttaatgggtctctcttcacctcctctcggctgttcttcgctggagcccgagagggccaccttcccagtgtgttggccatgatccacgtgaagcgctgcaccccaatcccagccctgctcttcacatgcatctccaccctgctgatgctggtcaccagcgacatgtacacactcatcaactacgtgggcttcatcaactacctcttctatggggtcacggttgctggacagatagtccttcgctggaagaagcctgatatcccccgccccatcaagatcaacctgctgttccccatcatctacttgctgttctgggccttcctgctggtcttcagcctgtggtcagagccggtggtgtgtggcattggcctggccatcatgctgacaggagtgcctgtctatttcctgggtgtttactggcaacacaagcccaagtgtttcagtgacttcattgagctgctaaccctggtgagccagaagatgtgtgtggtcgtgtaccccgaggtggagcggggctcagggacagaggaggctaatgaggacatggaggagcagcagcagcccatgtaccaacccactcccacgaaggacaaggacgtggcggggcagccccagccctgaggaccaccattccctggctactctctccttcctcccccttttatcctacctccctgccttggtcccgccaacacatgcgagtacacacacacccctctctctgcttttgtcaggcagtggtaggactttggtgtgggtggtgagaaattgtaaacaaaaactgacattcatacccaaagaaccagcctctcaccccagggtccatgtcccaggccccactccagtgctgcccacactcccagctgctggaggagaggggagatgccaaggtgccctgcaggacctccctccgggccacaccctcagctgcctcttcaggaaccggagctcattactgccttccctcccagggaggccccttcagagaggagaggccacaggagctgcattgtggggggacaggctcaagcaattctgtccccatcaaggggtcagctggagagacccaagaccctatctgttcaccagggacccaaaatccaaggggatgcttccctctgccctctttcctgcccctccccatcatacctgcacccaccccagccagggctccctgtccagaattcggttctcctcaggacgccaactcccagagctaaggaccaaggagaagaacagcctctccacccccaagccaggcggttgaggaacatattgagaaaggttcagattgcagaaacccagccctgcccctgcctcctgcatccagcccccaacatggtgccaaagcttccagaagccaaaaagcttctgatttttaaggtagtgggcatctctctcctaatgacgaagctgctcagcaactccacctgcccgccgcaggaaggagcagtcccctgctatccctgcagccactcccagcacacccgcacacagccagcaccaccgcccccaccgtgcacttctcctctctgggccttggcttgggaccaggtacgaaggatccccaagcccttcaggcctgagatcagagccagatcagccttaagtcacctcccatccaagaacttggcctaaaaatactcccctatttctaaccctcaggacggatctgatattaaatgccttccctgggaggaagggtgctttccccctccctagaggtgcccattccataccctgggagactgaggagagcattggctgaagcccagttcctttcccatccatcccctccttcaattatttttttgtaaagttgatgccttactttttggataaatatttttgaagctggtatttctatttcttttggattttttttaatgtaaggttgttttgggggatggagttagaaccttaatgataatttctttcgtttggtgtaggttttagagatttgttttgtggagaggtttttttcttttgatgtaataaaatttaaaatggaaatgaaaaaaaaggt

SEQ ID NO: 420729 - DNA, 2545 bp, Homo sapiens
  misc_feature (2)..(3): n is a, c, g, or t
gnngagaagccactctcccgaaaccagagggatggggccggctgtgcagtagaacggggatcgaaaagaggaaaacaagggcacgaagaccagcgagaaagaagaggacacctgggaaaggcggaagcagaagacggggaagggaaaagaaacccatagcaggtggaaaccagatctagagcaacaccgtcaggttcacagtttgtttttctagaagagaagaaagtacctgaggattgctcttttttcctaccgttaatgaaaactacttttgtcttcatcataaaagaaaaaactaaggggaggtaaaggcagtctcctgttttattagggggagaggtgaagggaaatccaggctcactttctgaataagccactgcctggtgcacagagcagaaccatcctggtttctgaagacacatccctttcagcagaattccagccggagtcgctggcacagttctatttttatatttaaatgtatgtctcccctggcctttttttttttttttttttttttttagcaacacttttcttgtttgtaaacgcgagtgaccagaaagtgtgaatgcggagtaggaatatttttcgtgttctcttttatctgcttgccttttttagagagtagcagtggttcctatttcggaaaaggacgttctaattcaaagctctctcccaatatatttacacgaatacgcatttagaaagggaggcagcttttgaggttgcaatcctactgagaaggatggaagaaggagccaggcaccgaaacaacaccgaaaagaaacacccaggtgggggcgagtcggacgccagccccgaggctggttccggagggggcggagtagccctgaagaaagagatcggattggtcagtgcctgtggtatcatcgtagggaacatcatcggctctggaatctttgtctcgccaaagggagtgctggagaatgctggttctgtgggccttgctctcatcgtctggattgtgacgggcttcatcacagttgtgggagccctctgctatgctgaactcggggtcaccatccccaaatctggaggtgactactcctatgtcaaggacatcttcggaggactggctgggttcctgaggctgtggattgctgtgctggtgatctaccccaccaaccaggctgtcatcgccctcaccttctccaactacgtgctgcagccgctcttccccacctgcttccccccagagtctggccttcggctcctggctgccatctgcttattgctcctcacatgggtcaactgttccagtgtgcggtgggccacccgggttcaagacatcttcacagctgggaagctcctggccttggccctgattatcatcatggggattgtacagatatgcaaaggagagtacttctggctggagccaaagaatgcatttgagaatttccaggaacctgacatcggcctcgtcgcactggctttccttcagggctcctttgcctatggaggctggaactttctgaattacgtgactgaggagcttgttgatccctacaagaaccttcccagagccatcttcatctccatcccactggtcacatttgtgtatgtctttgccaatgtcgcttatgtcactgcaatgtccccccaggagctgctggcatccaacgccgtcgctgtgacttttggagagaagctcctaggagtcatggcctggatcatgcccatttctgttgccctgtccacatttggaggagttaatgggtctctcttcacctcctctcggctgttcttcgctggagcccgagagggccaccttcccagtgtgttggccatgatccacgtgaagcgctgcaccccaatcccagccctgctcttcacatgcatctccaccctgctgatgctggtcaccagcgacatgtacacactcatcaactacgtgggcttcatcaactacctcttctatggggtcacggttgctggacagatagtccttcgctggaagaagcctgatatcccccgccccatcaagatcaacctgctgttccccatcatctacttgctgttctgggccttcctgctggtcttcagcctgtggtcagagccggtggtgtgtggcattggcctggccatcatgctgacaggagtgcctgtctatttcctgggtgtttactggcaacacaagcccaagtgtttcagtgacttcattggtgagttgttggaggctctggctggcttcagggcctcctgggctggaatgcagtggtcagtgatggggttggggagccaccagggccaggagatctaggctcaccttctcctcagtccacagagccctggaagagtccagagcaggggaagcagatgccttttcccagagacctctgagggtagagaacagctggcatttccacacagaccttagacccgcaagaataggcaacctgggctgggcacagtggctcacgcctgtaatcccagcactttgggaggctgagacagaggatcacttgagcccaggaggttgagaccagcctggtcgacatagcaagactccatctctgttatt

SEQ ID NO: 420730 - DNA, 617 bp, Homo sapiens
  misc_feature (46)..(47): n is a, c, g, or t
gacgggagtgcaccttgcatatgaggtgatctagaggctcccttcnngcatcaaggaaggctatggagtttgctgtgggccctgcaaccttcccagccactcctgctgcactaaggacttaggatccttttatcacaaatcgggattctctcccccaccccgaattctgtctgcttaaactggaatacacaggagcccttcctggcctggatggtgtctcccagcttccccgcccagcttgcccaccccatagttggtgagatgccaagtttggtctgagttgtgaccccttcagagtagatgcccggcaggctggggttggcccctggagggtcaggggaccatcttcttattccctcttttctcattcctccaacttcctcccctccttcaattatttttttgtaaagttgatgccttactttttggataaatatttttgaagctggtatttctatttcttttggattttttttaatgtaaggttgttttgggggatggagttagaaccttaatgataatttctttcgtttggtgtaggttttagagatttgttttgtggagaggtttttttcttttgatgtaataaaatttaaaatggaaatgaaaaaaaaggt

SEQ ID NO: 420731 - DNA, 452 bp, Homo sapiens
atatcccccgccccatcaaggtgagagaaactccctttggggtcccctccccttcctctatggttctagctgcagttcagatttttaaatcacctctgttcttagctgctgaccacacgtcatcatctctgatggtagcagaccctttggaaagcaagggccatttgtgaatgggaccactatttccattctccactggggatgagatcggagcagactgcagctggggaataagtcagatcaaatgtgactttcatcatgacattcctttgtttcctaccagtctaagccttaaactccagctgacttttcaaggttctcttatctccccaacacttcctccttgtccctccagatagctgggttcactatgtgctatgtctccatcccagaatgacttcctcctcccatctgcccatctacattttaaccattttccaaatgcgcctcaa

SEQ ID NO: 420732 - DNA, 3591 bp, Homo sapiens
  misc_feature (2)..(3): n is a, c, g, or t
gnngagaagccactctcccgaaaccagagggatggggccggctgtgcagtagaacggggatcgaaaagaggaaaacaagggcacgaagaccagcgagaaagaagaggacacctgggaaaggcggaagcagaagacggggaagggaaaagaaacccatagcaggtggaaaccagatctagagcaacaccgtcaggttcacagtttgtttttctagaagagaagaaagtacctgaggattgctcttttttcctaccgttaatgaaaactacttttgtcttcatcataaaagaaaaaactaaggggaggtaaaggcagtctcctgttttattagggggagaggtgaagggaaatccaggctcactttctgaataagccactgcctggtgcacagagcagaaccatcctggtttctgaagacacatccctttcagcagaattccagccggagtcgctggcacagttctatttttatatttaaatgtatgtctcccctggcctttttttttttttttttttttttttagcaacacttttcttgtttgtaaacgcgagtgaccagaaagtgtgaatgcggagtaggaatatttttcgtgttctcttttatctgcttgccttttttagagagtagcagtggttcctatttcggaaaaggacgttctaattcaaagctctctcccaatatatttacacgaatacgcatttagaaagggaggcagcttttgaggttgcaatcctactgagaaggatggaagaaggagccaggcaccgaaacaacaccgaaaagaaacacccaggtgggggcgagtcggacgccagccccgaggctggttccggagggggcggagtagccctgaagaaagagatcggattggtcagtgcctgtggtatcatcgtagggaacatcatcggctctggaatctttgtctcgccaaagggagtgctggagaatgctggttctgtgggccttgctctcatcgtctggattgtgacgggcttcatcacagttgtgggagccctctgctatgctgaactcggggtcaccatccccaaatctggaggtgactactcctatgtcaaggacatcttcggaggactggctgggttcctgaggctgtggattgctgtgctggtgatctaccccaccaaccaggctgtcatcgccctcaccttctccaactacgtgctgcagccgctcttccccacctgcttccccccagagtctggccttcggctcctggctgccatctgcttattgctcctcacatgggtcaactgttccagtgtgcggtgggccacccgggttcaagacatcttcacagctgggaagctcctggccttggccctgattatcatcatggggattgtacagatatgcaaaggagagtacttctggctggagccaaagaatgcatttgagaatttccaggaacctgacatcggcctcgtcgcactggctttccttcagggctcctttgcctatggaggctggaactttctgaattacgtgactgaggagcttgttgatccctacaaagctgctaaccctggtgagccagaagatgtgtgtggtcgtgtaccccgaggtggagcggggctcagggacagaggaggctaatgaggacatggaggagcagcagcagcccatgtaccaacccactcccacgaaggacaaggacgtggcggggcagccccagccctgaggaccaccattccctggctactctctccttcctcccccttttatcctacctccctgccttggtcccgccaacacatgcgagtacacacacacccctctctctgcttttgtcaggcagtggtaggactttggtgtgggtggtgagaaattgtaaacaaaaactgacattcatacccaaagaaccagcctctcaccccagggtccatgtcccaggccccactccagtgctgcccacactcccagctgctggaggagaggggagatgccaaggtgccctgcaggacctccctccgggccacaccctcagctgcctcttcaggaaccggagctcattactgccttccctcccagggaggccccttcagagaggagaggccacaggagctgcattgtggggggacaggctcaagcaattctgtccccatcaaggggtcagctggagagacccaagaccctatctgttcaccagggacccaaaatccaaggggatgcttccctctgccctctttcctgcccctccccatcatacctgcacccaccccagccagggctccctgtccagaattcggttctcctcaggacgccaactcccagagctaaggaccaaggagaagaacagcctctccacccccaagccaggcggttgaggaacatattgagaaaggttcagattgcagaaacccagccctgcccctgcctcctgcatccagcccccaacatggtgccaaagcttccagaagccaaaaagcttctgatttttaaggtagtgggcatctctctcctaatgacgaagctgctcagcaactccacctgcccgccgcaggaaggagcagtcccctgctatccctgcagccactcccagcacacccgcacacagccagcaccaccgcccccaccgtgcacttctcctctctgggccttggcttgggaccaggtacgaaggatccccaagcccttcaggcctgagatcagagccagatcagccttaagtcacctcccatccaagaacttggcctaaaaatactcccctatttctaaccctcaggacggatctgatattaaatgccttccctgggaggaagggtgctttccccctccctagaggtgcccattccataccctgggagactgaggagagcattggctgaagcccagttcctttcccatccatccccaactccaataatcccccactcctcgcaggtctcagtgtcatgctgtcttggggcagggtgaaagggtagtggcagcagggcgcccactctggagatcctcaaaaaaggccctcctctgtggctggcagcctctgacctttccctgggcttcaaaggaaggctatggagtttgctgtgggccctgcaaccttcccagccactcctgctgcactaaggacttaggatccttttatcacaaatcgggattctctcccccaccccgaattctgtctgcttaaactggaatacacaggagcccttcctggcctggatggtgtctcccagcttccccgcccagcttgcccaccccatagttggtgagatgccaagtttggtctgagttgtgaccccttcagagtagatgcccggcaggctggggttggcccctggagggtcaggggaccatcttcttattccctcttttctcattcctccaacttcctcccctccttcaattatttttttgtaaagttgatgccttactttttggataaatatttttgaagctggtatttctatttcttttggattttttttaatgtaaggttgttttgggggatggagttagaaccttaatgataatttctttcgtttggtgtaggttttagagatttgttttgtggagaggtttttttcttttgatgtaataaaatttaaaatggaaatgaaaaaaaaggt

SEQ ID NO: 420733 - DNA, 1229 bp, Homo sapiens
  misc_feature (2)..(3): n is a, c, g, or t
gnngagaagccactctcccgaaaccagagggatggggccggctgtgcagtagaacggggatcgaaaagaggaaaacaagggcacgaagaccagcgagaaagaagaggacacctgggaaaggcggaagcagaagacggggaagggaaaagaaacccatagcaggtggaaaccagatctagagcaacaccgtcaggttcacagtttgtttttctagaagagaagaaagtacctgaggattgctcttttttcctaccgttaatgaaaactacttttgtcttcatcataaaagaaaaaactaaggggaggtaaaggcagtctcctgttttattagggggagaggtgaagggaaatccaggctcactttctgaataagccactgcctggtgcacagagcagaaccatcctggtttctgaagacacatccctttcagcagaattccagccggagtcgctggcacagttctatttttatatttaaatgtatgtctcccctggcctttttttttttttttttttttttttagcaacacttttcttgtttgtaaacgcgagtgaccagaaagtgtgaatgcggagtaggaatatttttcgtgttctcttttatctgcttgccttttttagagagtagcagtggttcctatttcggaaaaggacgttctaattcaaagctctctcccaatatatttacacgaatacgcatttagaaagggaggcagcttttgaggttgcaatcctactgagaaggatggaagaaggagccaggcaccgaaacaacaccgaaaagaaacacccaggtgggggcgagtcggacgccagccccgaggctggttccggagggggcggagtagccctgaagaaagagatcggattggtcagtgcctgtggtatcatcgtagggaacatcatcggctctggaatctttgtctcgccaaagggagtgctggagaatgctggttctgtgggccttgctctcatcgtctggattgtgacgggcttcatcacagttgtgggagccctctgctatgctgaactcggggtcaccatccccaaatctggaggtgactactcctatgtcaaggacatcttcggaggactggctgggtaagaggatctgtggagacctgaatggtctaggggaaaaggaggaagacattcagaaggaggtcagattggaaaaagccaaggccaggggtttccagtctccagtgtgccacggggtgctagtgaat

SEQ ID NO: 420734 - DNA, 4137 bp, Homo sapiens
  misc_feature (2)..(3): n is a, c, g, or t
gnngagaagccactctcccgaaaccagagggatggggccggctgtgcagtagaacggggatcgaaaagaggaaaacaagggcacgaagaccagcgagaaagaagaggacacctgggaaaggcggaagcagaagacggggaagggaaaagaaacccatagcaggtggaaaccagatctagagcaacaccgtcaggttcacagtttgtttttctagaagagaagaaagtacctgaggattgctcttttttcctaccgttaatgaaaactacttttgtcttcatcataaaagaaaaaactaaggggaggtaaaggcagtctcctgttttattagggggagaggtgaagggaaatccaggctcactttctgaataagccactgcctggtgcacagagcagaaccatcctggtttctgaagacacatccctttcagcagaattccagccggagtcgctggcacagttctatttttatatttaaatgtatgtctcccctggcctttttttttttttttttttttttttagcaacacttttcttgtttgtaaacgcgagtgaccagaaagtgtgaatgcggagtaggaatatttttcgtgttctcttttatctgcttgccttttttagagagtagcagtggttcctatttcggaaaaggacgttctaattcaaagctctctcccaatatatttacacgaatacgcatttagaaagggaggcagcttttgaggttgcaatcctactgagaaggatggaagaaggagccaggcaccgaaacaacaccgaaaagaaacacccaggtgggggcgagtcggacgccagccccgaggctggttccggagggggcggagtagccctgaagaaagagatcggattggtcagtgcctgtggtatcatcgtagggaacatcatcggctctggaatctttgtctcgccaaagggagtgctggagaatgctggttctgtgggccttgctctcatcgtctggattgtgacgggcttcatcacagttgtgggagccctctgctatgctgaactcggggtcaccatccccaaatctggaggtgactactcctatgtcaaggacatcttcggaggactggctgggttcctgaggctgtggattgctgtgctggtgatctaccccaccaaccaggctgtcatcgccctcaccttctccaactacgtgctgcagccgctcttccccacctgcttccccccagagtctggccttcggctcctggctgccatctgcttattgctcctcacatgggtcaactgttccagtgtgcggtgggccacccgggttcaagacatcttcacagctgggaagctcctggccttggccctgattatcatcatggggattgtacagatatgcaaaggagagtacttctggctggagccaaagaatgcatttgagaatttccaggaacctgacatcggcctcgtcgcactggctttccttcagggctcctttgcctatggaggctggaactttctgaattacgtgactgaggagcttgttgatccctacaagaaccttcccagagccatcttcatctccatcccactggtcacatttgtgtatgtctttgccaatgtcgcttatgtcactgcaatgtccccccaggagctgctggcatccaacgccgtcgctgtgacttttggagagaagctcctaggagtcatggcctggatcatgcccatttctgttgccctgtccacatttggaggagttaatgggtctctcttcacctcctctcggctgttcttcgctggagcccgagagggccaccttcccagtgtgttggccatgatccacgtgaagcgctgcaccccaatcccagccctgctcttcacatgcatctccaccctgctgatgctggtcaccagcgacatgtacacactcatcaactacgtgggcttcatcaactacctcttctatggggtcacggttgctggacagatagtccttcgctggaagaagcctgatatcccccgccccatcaagatcaacctgctgttccccatcatctacttgctgttctgggccttcctgctggtcttcagcctgtggtcagagccggtggtgtgtggcattggcctggccatcatgctgacaggagtgcctgtctatttcctgggtgtttactggcaacacaagcccaagtgtttcagtgacttcattgagctgctaaccctggtgagccagaagatgtgtgtggtcgtgtaccccgaggtggagcggggctcagggacagaggaggctaatgaggacatggaggagcagcagcagcccatgtaccaacccactcccacgaaggacaaggacgtggcggggcagcccctctgcttttgtcaggcagtggtaggactttggtgtgggtggtgagaaattgtaaacaaaaactgacattcatacccaaagaaccagcctctcaccccagggtccatgtcccaggccccactccagtgctgcccacactcccagctgctggaggagaggggagatgccaaggtgccctgcaggacctccctccgggccacaccctcagctgcctcttcaggaaccggagctcattactgccttccctcccagggaggccccttcagagaggagaggccacaggagctgcattgtggggggacaggctcaagcaattctgtccccatcaaggggtcagctggagagacccaagaccctatctgttcaccagggacccaaaatccaaggggatgcttccctctgccctctttcctgcccctccccatcatacctgcacccaccccagccagggctccctgtccagaattcggttctcctcaggacgccaactcccagagctaaggaccaaggagaagaacagcctctccacccccaagccaggcggttgaggaacatattgagaaaggttcagattgcagaaacccagccctgcccctgcctcctgcatccagcccccaacatggtgccaaagcttccagaagccaaaaagcttctgatttttaaggtagtgggcatctctctcctaatgacgaagctgctcagcaactccacctgcccgccgcaggaaggagcagtcccctgctatccctgcagccactcccagcacacccgcacacagccagcaccaccgcccccaccgtgcacttctcctctctgggccttggcttgggaccaggtacgaaggatccccaagcccttcaggcctgagatcagagccagatcagccttaagtcacctcccatccaagaacttggcctaaaaatactcccctatttctaaccctcaggacggatctgatattaaatgccttccctgggaggaagggtgctttccccctccctagaggtgcccattccataccctgggagactgaggagagcattggctgaagcccagttcctttcccatccatccccaactccaataatcccccactcctcgcaggtctcagtgtcatgctgtcttggggcagggtgaaagggtagtggcagcagggcgcccactctggagatcctcaaaaaaggccctcctctgtggctggcagcctctgacctttccctgggcttcaaaggaaggctatggagtttgctgtgggccctgcaaccttcccagccactcctgctgcactaaggacttaggatccttttatcacaaatcgggattctctcccccaccccgaattctgtctgcttaaactggaatacacaggagcccttcctggcctggatggtgtctcccagcttccccgcccagcttgcccaccccatagttggtgagatgccaagtttggtctgagttgtgaccccttcagagtagatgcccggcaggctggggttggcccctggagggtcaggggaccatcttcttattccctcttttctcattcctccaacttcctcccctccttcaattatttttttgtaaagttgatgccttactttttggataaatatttttgaagctggtatttctatttcttttggattttttttaatgtaaggttgttttgggggatggagttagaaccttaatgataatttctttcgtttggtgtaggttttagagatttgttttgtggagaggtttttttcttttgatgtaataaaatttaaaatggaaatgaaaaaaaaggt

SEQ ID NO: 420735 - DNA, 2218 bp, Homo sapiens
atgcaggaggcagaccaggtggcgaggattctcttcaacgcactgactgctctgaagaggcagaacctggagcaggagagccaggaagggccggggccacttggccaggttggtgggatactcagcattggcctggtttctgtgtgatctcttcctacagagctgctaaccctggtgagccagaagatgtgtgtggtcgtgtaccccgaggtggagcggggctcagggacagaggaggctaatgaggacatggaggagcagcagcagcccatgtaccaacccactcccacgaaggacaaggacgtggcggggcagccccagccctgaggaccaccattccctggctactctctccttcctcccccttttatcctacctccctgccttggtcccgccaacacatgcgagtacacacacacccctctctctgcttttgtcaggcagtggtaggactttggtgtgggtggtgagaaattgtaaacaaaaactgacattcatacccaaagaaccagcctctcaccccagggtccatgtcccaggccccactccagtgctgcccacactcccagctgctggaggagaggggagatgccaaggtgccctgcaggacctccctccgggccacaccctcagctgcctcttcaggaaccggagctcattactgccttccctcccagggaggccccttcagagaggagaggccacaggagctgcattgtggggggacaggctcaagcaattctgtccccatcaaggggtcagctggagagacccaagaccctatctgttcaccagggacccaaaatccaaggggatgcttccctctgccctctttcctgcccctccccatcatacctgcacccaccccagccagggctccctgtccagaattcggttctcctcaggacgccaactcccagagctaaggaccaaggagaagaacagcctctccacccccaagccaggcggttgaggaacatattgagaaaggttcagattgcagaaacccagccctgcccctgcctcctgcatccagcccccaacatggtgccaaagcttccagaagccaaaaagcttctgatttttaaggtagtgggcatctctctcctaatgacgaagctgctcagcaactccacctgcccgccgcaggaaggagcagtcccctgctatccctgcagccactcccagcacacccgcacacagccagcaccaccgcccccaccgtgcacttctcctctctgggccttggcttgggaccaggtacgaaggatccccaagcccttcaggcctgagatcagagccagatcagccttaagtcacctcccatccaagaacttggcctaaaaatactcccctatttctaaccctcaggacggatctgatattaaatgccttccctgggaggaagggtgctttccccctccctagaggtgcccattccataccctgggagactgaggagagcattggctgaagcccagttcctttcccatccatccccaactccaataatcccccactcctcgcaggtctcagtgtcatgctgtcttggggcagggtgaaagggtagtggcagcagggcgcccactctggagatcctcaaaaaaggccctcctctgtggctggcagcctctgacctttccctgggcttcaaaggaaggctatggagtttgctgtgggccctgcaaccttcccagccactcctgctgcactaaggacttaggatccttttatcacaaatcgggattctctcccccaccccgaattctgtctgcttaaactggaatacacaggagcccttcctggcctggatggtgtctcccagcttccccgcccagcttgcccaccccatagttggtgagatgccaagtttggtctgagttgtgaccccttcagagtagatgcccggcaggctggggttggcccctggagggtcaggggaccatcttcttattccctcttttctcattcctccaacttcctcccctccttcaattatttttttgtaaagttgatgccttactttttggataaatatttttgaagctggtatttctatttcttttggattttttttaatgtaaggttgttttgggggatggagttagaaccttaatgataatttctttcgtttggtgtaggttttagagatttgttttgtggagaggtttttttcttttgatgtaataaaatttaaaatggaaatgaaaaaaaaggt

SEQ ID NO: 420736 - DNA, 2093 bp, Homo sapiens
  misc_feature (2)..(3): n is a, c, g, or t
gnngagaagccactctcccgaaaccagagggatggggccggctgtgcagtagaacggggatcgaaaagaggaaaacaagggcacgaagaccagcgagaaagaagaggacacctgggaaaggcggaagcagaagacggggaagggaaaagaaacccatagcaggtggaaaccagatctagagcaacaccgtcaggttcacagtttgtttttctagaagagaagaaagtacctgaggattgctcttttttcctaccgttaatgaaaactacttttgtcttcatcataaaagaaaaaactaaggggaggtaaaggcagtctcctgttttattagggggagaggtgaagggaaatccaggctcactttctgaataagccactgcctggtgcacagagcagaaccatcctggtttctgaagacacatccctttcagcagaattccagccggagtcgctggcacagttctatttttatatttaaatgtatgtctcccctggcctttttttttttttttttttttttttagcaacacttttcttgtttgtaaacgcgagtgaccagaaagtgtgaatgcggagtaggaatatttttcgtgttctcttttatctgcttgccttttttagagagtagcagtggttcctatttcggaaaaggacgttctaattcaaagctctctcccaatatatttacacgaatacgcatttagaaagggaggcagcttttgaggttgcaatcctactgagaaggatggaagaaggagccaggcaccgaaacaacaccgaaaagaaacacccaggtgggggcgagtcggacgccagccccgaggctggttccggagggggcggagtagccctgaagaaagagatcggattggtcagtgcctgtggtatcatcgtagggaacatcatcggctctggaatctttgtctcgccaaagggagtgctggagaatgctggttctgtgggccttgctctcatcgtctggattgtgacgggcttcatcacagttgtgggagccctctgctatgctgaactcggggtcaccatccccaaatctggaggtgactactcctatgtcaaggacatcttcggaggactggctgggttcctgaggctgtggattgctgtgctggtgatctaccccaccaaccaggctgtcatcgccctcaccttctccaactacgtgctgcagccgctcttccccacctgcttccccccagagtctggccttcggctcctggctgccatctgcttattgctcctcacatgggtcaactgttccagtgtgcggtgggccacccgggttcaagacatcttcacagctgggaagctcctggccttggccctgattatcatcatggggattgtacagatatgcaaaggagagtacttctggctggagccaaagaatgcatttgagaatttccaggaacctgacatcggcctcgtcgcactggctttccttcagggctcctttgcctatggaggctggaactttctgaattacgtgactgaggagcttgttgatccctacaagaaccttcccagagccatcttcatctccatcccactggtcacatttgtgtatgtctttgccaatgtcgcttatgtcactgcaatgtccccccaggagctgctggcatccaacgccgtcgctgtgacttttggagagaagctcctaggagtcatggcctggatcatgcccatttctgttgccctgtccacatttggaggagttaatgggtctctcttcacctcctctcggctgttcttcgctggagcccgagagggccaccttcccagtgtgttggccatgatccacgtgaagcgctgcaccccaatcccagccctgctcttcacatgcatctccaccctgctgatgctggtcaccagcgacatgtacacactcatcaactacgtgggcttcatcaactacctcttctatggggtcacggttgctggacagatagtccttcgctggaagaagcctgatatcccccgccccatcaagatcaaccgcatcacccgttcaaccgcatcacccgttcaaccgcatcacccgttcaaccgcatcacccgttcaaccgcatcccgtt

SEQ ID NO: 420737 - DNA, 3190 bp, Homo sapiens
ccaaggtagctttagtaaaatgtcgggacttgcactgggctatgatggcacatcgggaccaaagagacgtgagcttgagttccctccgaatgttaattgtgactgatggagctaacccctggtccgtgtcatcctgtgatgccttcctgagtctgttccaaagtcatggactgaagcctgaggccatctgtccgtgcgccacgtctgctgaagccatgactgtagcaatccgcaggcctggagttccaggagcccctttgccaggaagagccattctctcaatgaatggattgagctatggggtaatacgggtcaatactgaagataaaaattcagcactgacggtccaggatgtagggcatgtaatgcctggtgggatgatgtgcattgtgaaaccagatggacctccccagctctgcaaaacagatgaaattggagaaatctgtgttagctccagaactggaggcatgatgtactttgggcttgctggtgtgacaaaaaatacatttgaggtaattccagtgaattctgcaggctctcctgttggggatgtgccattcatccgatcaggattgctggggtttgtagggccgggtagtttggtgttcgtggttgggaaaatggatggcttactgatggttagtggtcgaagacataatgctgatgacattgttgctactggattggctgtagaatcaataaagactgtttatagaggaagaattgctgtgttttctgtgtctgtattttatgatgagcgcattgtggtggttgcggaacaaagacctgatgcttctgaggaagatagtttccagtggatgagccgcgtgctgcaggcgatcgatagcattcatcaagtgggggtttattgtcttgctctggtgccagccaatacattgccaaaaactccactaggaggaatccatatatctcagacgaaacaactctttctggagggatcactgcatccttgcaacatcctcatgtgcccccatacatgtgtgacaaacttgccaaagccccggcaaaaacaaccaggtgtaggccctgcttccgtgatggttgggaatctggttgctggaaaacgtatagcacaagctgctggaagggatctgggacaaatagaagagaatgatttggtgaggaagcaccagtttctggcagagatcctacagtggcgagcccaggcgactcctgaccatgtactcttcatgctgttaaatgccaagggaaccactgtatgcacagccagctgccttcagcttcataagcgagcagagaggattgcatctgttcttggtgataagggacatctaaatgcaggagataatgtggtgttgctctatccacctggcattgagttaatcgccgccttctatggctgcctgtatgcgggctgtatacctgtgaccgtcagacctccacatgctcagaacctcacggccacgctgcccactgtccgaatgattgttgatgtcagcaaagcagcctgtattctcaccagtcagaccctaatgaggctactgaggtcccgagaggcagcagcagctgtggatgtgaaaacctggccaaccatcattgacacagatgatttacccaggaaaaggttacctcagctgtataaaccgcccactcctgagatgttggcatatcttgattttagtgtctccacaactggcatgcttacaggagtgaagatgtcccactctgcagtgaacgctctgtgtcgagccatcaagctccagtgtgagttgtactcttctcggcagatcgccatctgccttgacccttactgtggacttggcttcgcgctctggtgtctctgcagtgtctattcaggccaccagtctgtcttaattcctcctatggagttagagaacaaccttttcctctggctctccacagtcaaccagtacaaaataagggacactttctgctcctattcagtgatggagctctgcaccaaaggtcttgggaaccaagtggaagtgctaaagaccagagggatcaacctctcctgcgtccggacctgtgtggtggtggcggaggagaggccccgcgttgcactccagcagtccttctctaagctcttcaaagacatcgggctgtccccgcgggctgtcagcaccacttttggatcaagagtcaatgtagcaatatgtttacagggaacctcagggcctgatccgactactgtgtatgtggatctgaaatcactaagacatgacagggttcgtctcgtggaacgtggcgcccctcagagtttgcttctctcagagtctggaaagattttacctggagtgaaagtggttattgttaatcctgagaccaaagggccggttggagactctcaccttggagagatttgggtgaacagtccccatacagccagcggctactacaccatctatgatagcgagactcttcaagctgatcatttcaacactcgcctcagctttggagatgcagctcagacactctgggctcggacaggataccttggttttgtccgccggaccgagctcacagcggccactggagagcgtcatgatgcattgtatgtggtgggagcgctggatgaaacactggagctgagaggattacgataccacccaatcgatattgagacctcggtgtcccggatccacagaagcattgctgaatgtgccgtgttcacatggaccaacttgcttgtggtggttgtggaactgtgcggctctgaacaggaagccctagatctggtcccattagtgaccaacgtggtcctggaagagcattacctcatcgttggcgtcgtggttgtggtggacccaggtgtcatcccgatcaactccagaggagagaagcagaggatgcacctccgtgatagcttcctagctgaccagttagaccccatctacgtggcttataacatgtaaccagccttgtggggactgcagtgggccattctgaagaatcacaaagacagaagacctctggctacgagcaggcttcaaacgatgtgaaataagctgagatggctacatgatattcttcatctcatcctgtgggattctgcaatcataaaacacaggaaaggggaattctgtgatggcaaatgaaaaaaatgttaacatttggtagacatgtgctttgacatagcgtgagcagcacattactaaagcaattacatgcatgttgcatttttttc

SEQ ID NO: 420738 - DNA, 6749 bp, Homo sapiens
  misc_feature (6747)..(6748): n is a, c, g, or t
ccaaggtagctttagtaaaatgtcgggacttgcactgggctatgatggcacatcgggaccaaagagacgtgagcttgagttccctccgaatgttaattgtgactgatggagctaacccctggtccgtgtcatcctgtgatgccttcctgagtctgttccaaagtcatggactgaagcctgaggccatctgtccgtgcgccacgtctgctgaagccatgactgtagcaatccgcaggcctggagttccaggagcccctttgccaggaagagccattctctcaatgaatggattgagctatggggtaatacgggtcaatactgaagataaaaattcagcactgacggtccaggatgtagggcatgtaatgcctggtgggatgatgtgcattgtgaaaccagatggacctccccagctctgcaaaacagatgaaattggagaaatctgtgttagctccagaactggaggcatgatgtactttgggcttgctggtgtgacaaaaaatacatttgaggtaattccagtgaattctgcaggctctcctgttggggatgtgccattcatccgatcaggattgctggggtttgtagggccgggtagtttggtgttcgtggttgggaaaatggatggcttactgatggttagtggtcgaagacataatgctgatgacattgttgctactggattggctgtagaatcaataaagactgtttatagaggaagaattgctgtgttttctgtgtctgtattttatgatgagcgcattgtggtggttgcggaacaaagacctgatgcttctgaggaagatagtttccagtggatgagccgcgtgctgcaggcgatcgatagcattcatcaagtgggggtttattgtcttgctctggtgccagccaatacattgccaaaaactccactaggaggaatccatatatctcagacgaaacaactctttctggagggatcactgcatccttgcaacatcctcatgtgcccccatacatgtgtgacaaacttgccaaagccccggcaaaaacaaccaggtgtaggccctgcttccgtgatggttgggaatctggttgctggaaaacgtatagcacaagctgctggaagggatctgggacaaatagaagagaatgatttggtgaggaagcaccagtttctggcagagatcctacagtggcgagcccaggcgactcctgaccatgtactcttcatgctgttaaatgccaagggaaccactgtatgcacagccagctgccttcagcttcataagcgagcagagaggattgcatctgttcttggtgataagggacatctaaatgcaggagataatgtggtgttgctctatccacctggcattgagttaatcgccgccttctatggctgcctgtatgcgggctgtatacctgtgaccgtcagacctccacatgctcagaacctcacggccacgctgcccactgtccgaatgattgttgatgtcagcaaagcagcctgtattctcaccagtcagaccctaatgaggctactgaggtcccgagaggcagcagcagctgtggatgtgaaaacctggccaaccatcattgacacagatgatttacccaggaaaaggttacctcagctgtataaaccgcccactcctgagatgttggcatatcttgattttagtgtctccacaactggcatgcttacaggagtgaagatgtcccactctgcagtgaacgctctgtgtcgagccatcaagctccagtgtgagttgtactcttctcggcagatcgccatctgccttgacccttactgtggacttggcttcgcgctctggtgtctctgcagtgtctattcaggccaccagtctgtcttaattcctcctatggagttagagaacaaccttttcctctggctctccacagtcaaccagtacaaaataagggacactttctgctcctattcagtgatggagctctgcaccaaaggtcttgggaaccaagtggaagtgctaaagaccagagggatcaacctctcctgcgtccggacctgtgtggtggtggcggaggagaggccccgcgttgcactccagcagtccttctctaagctcttcaaagacatcgggctgtccccgcgggctgtcagcaccacttttggatcaagagtcaatgtagcaatatgtttacagggaacctcagggcctgatccgactactgtgtatgtggatctgaaatcactaagacatgacagggttcgtctcgtggaacgtggcgcccctcagagtttgcttctctcagagtctggaaagattttacctggagtgaaagtggttattgttaatcctgagaccaaagggccggttggagactctcaccttggagagatttgggtgaacagtccccatacagccagcggctactacaccatctatgatagcgagactcttcaagctgatcatttcaacactcgcctcagctttggagatgcagctcagacactctgggctcggacaggataccttggttttgtccgccggaccgagctcacagcggccactggagagcgtcatgatgcattgtatgtggtgggagcgctggatgaaacactggagctgagaggattacgataccacccaatcgatattgagacctcggtgtcccggatccacagaagcattgctgaatgtgccgtgttcacatggaccaacttgcttgtggtggttgtggaactgtgcggctctgaacaggaagccctagatctggtcccattagtgaccaacgtggtcctggaagagcattacctcatcgttggcgtcgtggttgtggtggacccaggtgtcatcccgatcaactccagaggagagaagcagaggatgcacctccgtgatagcttcctagctgaccagttagaccccatctacgtggcttataacatgtaaccagccttgtggggactgcagtgggccattctgaagaatcacaaagacagaagacctctggctacgagcaggcttcaaacgatgtgaaataagctgagatggctacatgatattcttcatctcatcctgtgggattctgcaatcataaaacacaggaaaggggaattctgtgatggcaaatgaaaaaaatgttaacatttggtagacatgtgctttgacatagcgtgagcagcacattactaaagcaattacatgcatgttgcatttttttcatctgttgtacatagttgtatttttatctaatgccattttagaattttctaagggaatttaatgaattcacatgaaaggggtagtctgagtgacacagttccccactccgtactgtattttgccattctgccgtagctagatgttctgtggggtttgttaacatggaactactcagctttctttcagtcaacccataagcaaatcagataacccactgactatgagaattactttatatagataattcttgactgtaaaacattttgaccagtgttttacaacatgtacataagaatacacataattcaactagagatttgaagaattggcttgtatagttataacaaccacagtagaaacatttctactttgagagaatttcaatattctcttaatgttgtgtaattgattaggtaactaaaaagcgcaaattgttggcaggttttgctgcacattgttctatgtctttgttggctggtgtattttataaactaaagctgcctatgtttctttttaaagctcgcattcccagaatcagcttaggcttctatgaattcagcctgtttctaaaagctgaaaatctcagtttaaaaatcaaaatgttaacacaaagctaagattcatcagagcccaccctattctaaggaaccacaataacttactctggccccagtgttaaaacgatctttcagatttagagtgactatgtaagaatttaggatttcctcttttccaggcacattgtaaactgtgtctacagtttatccatataacttctcttctgaaaactgaggagtgtcctctgttcttccagttcacgagggcagggggtttaaaacaagaatgataggccaggaaggcagtggggatccaccatcacatggaactgtaaggccatataactacacaaaactgaccaatctgggttgccaaagcagccaggcttatgctgaaaccggggaagtctgacatatgcaggaaactcttttgaaataactttggtgcccaggccaagtagaatgagatgagactgagtttggcctctggctcggtttcctttctttggtctgatacttcatgtatttgaatatagttaaatcgtattatttttttcttaacagaaatatttttaaaaatgaaaaagtactcaaaagtgagaagagttaacttgtcaaagcagaatggttctctttgacccactctggtctattgtgtaaatatttatttagactattttaataatacatattatttaccccactgtaacatcatgtaaactaagtatgtttttaaacaatttttaagacttgtaattaccctgaaaataaggtttataatgcaaagaccagctcctttgcggtggcagtgctctagggctgccattacacggtcttgtgatgtgactaaaagccactttgtgactcccttcatgtaatcctcttttcctccccactcctccacagagggcagagctcaggacatttgccagttccagatctctttttcagcattttgatggaattaatttacacgtaatgagggaagtcctaggatggatagaaaaaaagcacttacattggggcacacaggaaatcccagtgtctagcaatggtttggtttgcagagaacacagcctgatacttaattttcttaaaactatttttaatgatccactaaacaaagcaggggatcctgaagctgatataaataagtctagctctataatccccaagttctaaaagttatggttagatgctattctgtgggttgctttgataattcttactaacacagattagggtataggcatctagagatgcactgtccactgtaaatactataatgagagccacatctgtaatttaaatgtttctagtaaccacatttttttaaaagtaaaaagaaacccatggtattgatttaaatatattttatttaacccaatagctcaaaaacactatcatttcaacataggatcaatataaaaattattaatgagttattttactttttttcatattaggcctttgaaattcagtgtgtattaaacacatctcaattcaaaccatcaccatatttcaagtctttgtagccaaatgtgactagtggctaccatattagacagtgcagatctatactcattccttcaaatacattactctgttaatctcaaagtgtggccaactcccatttacttagaggctgattatctagttttgtagttcctcaggcctctaatttattttttgctttctgctttattgatcttttgcatgtcccccaaagccagaatctgctcatggaggaaggaaggctaagaactgtccttgaggaacttcatcagtaactctggtaaagcatcctgtggagggagaggagagcccagtcatttgcttagatggtgtttgtgggatcacctgcagatttaaagcctactctgccacagactcgagtaagaaaatgttctcttgatgacacagtgctcctactctatccacattaagtagcacttttgtggtagaactgattcttaaggcaggcctgaaaggccattactaatagaaacacagcctttccaatcctctggaacatattctgtctgggtttttaatgtctgtggaaaaaaactaaacaagtctctgtctcagttaagagaaatctattggtctgaaggtttctgaacctctttctggttctcagcagaagtaactgaagtagatcaggaaggggctgcctcaggaaaattcctagatcctaggaattcagtgagaccctgggaaggaccagcatgctaatcagtgtcagtgaatccacagtctttacttcctgcctcataaagggccaggtctccccagtaccaagtcctttcctcatgaagttgtgttgcctcaggctgtttagggaccattgcctgtcttggtcacatgagtctgtctccttactttagtccctgggcaatccttgcttaatgcttttgttgactcaacgagggcccgaggccttaggttttctattaaggtctctgccccaggcatggtgctctatatcttggccaaataaattactttccttgaatatccaggaatcttttagtctaaagcaatgaggagttatcacctcatcctcaaactccaacaagatctatgccttagtgttgtttttgttgtctgctttgatgtaaaagcaagagtatttggagcaagaagctgcaatgcgccaaatacacaataggccttttctttatcattcatacgacatttctggtttaggtgtatgtagttgggccatgttacttgtccagaggaagagactaaagatataagaataattttttagtcctaaatgctgttttgtttactttctgtcaagatatttacccgtgtcaaattcaaactacagtactgtgtaattatgtataaagtttttttatttatttgaagttagactagatatacgtttttaaatttaacatctggctggacagtgttctattaactcattgaatgtgtttcctttgtcttgtgttaataaatattgatgcctgattctgtttaannc

SEQ ID NO: 420739 - DNA, 6822 bp, Homo sapiens
  misc_feature (6820)..(6821): n is a, c, g, or t
tcgttatttatcggcaccttccagcagtattgtatgacttaccagttgtgaatgcttcaagtccatttctttacctggaaggccaaatactgagagatgttaaagttacctggttttcactgtaattgccaagccattgggactggcagaaaattagagcatactgcttccaagagtgtttgagtttgacctgcctaagggtaacacctcattcatctaacctgtttatttgggctttgcattcatcgttaatatgtcactgtctctacaagctttacatttcaaatatacctatgtagtttcaggtttatgtttagcattcctgtttggtatttttacttaatgccactcagtaaaggcaggactttcttgggttcacaggatgaagctgttattttacaaagttttctagaatctttgtcctttacctgtattttctgtacgttagggatgatgtgcattgtgaaaccagatggacctccccagctctgcaaaacagatgaaattggagaaatctgtgttagctccagaactggaggcatgatgtactttgggcttgctggtgtgacaaaaaatacatttgaggtaattccagtgaattctgcaggctctcctgttggggatgtgccattcatccgatcaggattgctggggtttgtagggccgggtagtttggtgttcgtggttgggaaaatggatggcttactgatggttagtggtcgaagacataatgctgatgacattgttgctactggattggctgtagaatcaataaagactgtttatagaggaagaattgctgtgttttctgtgtctgtattttatgatgagcgcattgtggtggttgcggaacaaagacctgatgcttctgaggaagatagtttccagtggatgagccgcgtgctgcaggcgatcgatagcattcatcaagtgggggtttattgtcttgctctggtgccagccaatacattgccaaaaactccactaggaggaatccatatatctcagacgaaacaactctttctggagggatcactgcatccttgcaacatcctcatgtgcccccatacatgtgtgacaaacttgccaaagccccggcaaaaacaaccaggtgtaggccctgcttccgtgatggttgggaatctggttgctggaaaacgtatagcacaagctgctggaagggatctgggacaaatagaagagaatgatttggtgaggaagcaccagtttctggcagagatcctacagtggcgagcccaggcgactcctgaccatgtactcttcatgctgttaaatgccaagggaaccactgtatgcacagccagctgccttcagcttcataagcgagcagagaggattgcatctgttcttggtgataagggacatctaaatgcaggagataatgtggtgttgctctatccacctggcattgagttaatcgccgccttctatggctgcctgtatgcgggctgtatacctgtgaccgtcagacctccacatgctcagaacctcacggccacgctgcccactgtccgaatgattgttgatgtcagcaaagcagcctgtattctcaccagtcagaccctaatgaggctactgaggtcccgagaggcagcagcagctgtggatgtgaaaacctggccaaccatcattgacacagatgatttacccaggaaaaggttacctcagctgtataaaccgcccactcctgagatgttggcatatcttgattttagtgtctccacaactggcatgcttacaggagtgaagatgtcccactctgcagtgaacgctctgtgtcgagccatcaagctccagtgtgagttgtactcttctcggcagatcgccatctgccttgacccttactgtggacttggcttcgcgctctggtgtctctgcagtgtctattcaggccaccagtctgtcttaattcctcctatggagttagagaacaaccttttcctctggctctccacagtcaaccagtacaaaataagggacactttctgctcctattcagtgatggagctctgcaccaaaggtcttgggaaccaagtggaagtgctaaagaccagagggatcaacctctcctgcgtccggacctgtgtggtggtggcggaggagaggccccgcgttgcactccagcagtccttctctaagctcttcaaagacatcgggctgtccccgcgggctgtcagcaccacttttggatcaagagtcaatgtagcaatatgtttacagggaacctcagggcctgatccgactactgtgtatgtggatctgaaatcactaagacatgacagggttcgtctcgtggaacgtggcgcccctcagagtttgcttctctcagagtctggaaagattttacctggagtgaaagtggttattgttaatcctgagaccaaagggccggttggagactctcaccttggagagatttgggtgaacagtccccatacagccagcggctactacaccatctatgatagcgagactcttcaagctgatcatttcaacactcgcctcagctttggagatgcagctcagacactctgggctcggacaggataccttggttttgtccgccggaccgagctcacagcggccactggagagcgtcatgatgcattgtatgtggtgggagcgctggatgaaacactggagctgagaggattacgataccacccaatcgatattgagacctcggtgtcccggatccacagaagcattgctgaatgtgccgtgttcacatggaccaacttgcttgtggtggttgtggaactgtgcggctctgaacaggaagccctagatctggtcccattagtgaccaacgtggtcctggaagagcattacctcatcgttggcgtcgtggttgtggtggacccaggtgtcatcccgatcaactccagaggagagaagcagaggatgcacctccgtgatagcttcctagctgaccagttagaccccatctacgtggcttataacatgtaaccagccttgtggggactgcagtgggccattctgaagaatcacaaagacagaagacctctggctacgagcaggcttcaaacgatgtgaaataagctgagatggctacatgatattcttcatctcatcctgtgggattctgcaatcataaaacacaggaaaggggaattctgtgatggcaaatgaaaaaaatgttaacatttggtagacatgtgctttgacatagcgtgagcagcacattactaaagcaattacatgcatgttgcatttttttcatctgttgtacatagttgtatttttatctaatgccattttagaattttctaagggaatttaatgaattcacatgaaaggggtagtctgagtgacacagttccccactccgtactgtattttgccattctgccgtagctagatgttctgtggggtttgttaacatggaactactcagctttctttcagtcaacccataagcaaatcagataacccactgactatgagaattactttatatagataattcttgactgtaaaacattttgaccagtgttttacaacatgtacataagaatacacataattcaactagagatttgaagaattggcttgtatagttataacaaccacagtagaaacatttctactttgagagaatttcaatattctcttaatgttgtgtaattgattaggtaactaaaaagcgcaaattgttggcaggttttgctgcacattgttctatgtctttgttggctggtgtattttataaactaaagctgcctatgtttctttttaaagctcgcattcccagaatcagcttaggcttctatgaattcagcctgtttctaaaagctgaaaatctcagtttaaaaatcaaaatgttaacacaaagctaagattcatcagagcccaccctattctaaggaaccacaataacttactctggccccagtgttaaaacgatctttcagatttagagtgactatgtaagaatttaggatttcctcttttccaggcacattgtaaactgtgtctacagtttatccatataacttctcttctgaaaactgaggagtgtcctctgttcttccagttcacgagggcagggggtttaaaacaagaatgataggccaggaaggcagtggggatccaccatcacatggaactgtaaggccatataactacacaaaactgaccaatctgggttgccaaagcagccaggcttatgctgaaaccggggaagtctgacatatgcaggaaactcttttgaaataactttggtgcccaggccaagtagaatgagatgagactgagtttggcctctggctcggtttcctttctttggtctgatacttcatgtatttgaatatagttaaatcgtattatttttttcttaacagaaatatttttaaaaatgaaaaagtactcaaaagtgagaagagttaacttgtcaaagcagaatggttctctttgacccactctggtctattgtgtaaatatttatttagactattttaataatacatattatttaccccactgtaacatcatgtaaactaagtatgtttttaaacaatttttaagacttgtaattaccctgaaaataaggtttataatgcaaagaccagctcctttgcggtggcagtgctctagggctgccattacacggtcttgtgatgtgactaaaagccactttgtgactcccttcatgtaatcctcttttcctccccactcctccacagagggcagagctcaggacatttgccagttccagatctctttttcagcattttgatggaattaatttacacgtaatgagggaagtcctaggatggatagaaaaaaagcacttacattggggcacacaggaaatcccagtgtctagcaatggtttggtttgcagagaacacagcctgatacttaattttcttaaaactatttttaatgatccactaaacaaagcaggggatcctgaagctgatataaataagtctagctctataatccccaagttctaaaagttatggttagatgctattctgtgggttgctttgataattcttactaacacagattagggtataggcatctagagatgcactgtccactgtaaatactataatgagagccacatctgtaatttaaatgtttctagtaaccacatttttttaaaagtaaaaagaaacccatggtattgatttaaatatattttatttaacccaatagctcaaaaacactatcatttcaacataggatcaatataaaaattattaatgagttattttactttttttcatattaggcctttgaaattcagtgtgtattaaacacatctcaattcaaaccatcaccatatttcaagtctttgtagccaaatgtgactagtggctaccatattagacagtgcagatctatactcattccttcaaatacattactctgttaatctcaaagtgtggccaactcccatttacttagaggctgattatctagttttgtagttcctcaggcctctaatttattttttgctttctgctttattgatcttttgcatgtcccccaaagccagaatctgctcatggaggaaggaaggctaagaactgtccttgaggaacttcatcagtaactctggtaaagcatcctgtggagggagaggagagcccagtcatttgcttagatggtgtttgtgggatcacctgcagatttaaagcctactctgccacagactcgagtaagaaaatgttctcttgatgacacagtgctcctactctatccacattaagtagcacttttgtggtagaactgattcttaaggcaggcctgaaaggccattactaatagaaacacagcctttccaatcctctggaacatattctgtctgggtttttaatgtctgtggaaaaaaactaaacaagtctctgtctcagttaagagaaatctattggtctgaaggtttctgaacctctttctggttctcagcagaagtaactgaagtagatcaggaaggggctgcctcaggaaaattcctagatcctaggaattcagtgagaccctgggaaggaccagcatgctaatcagtgtcagtgaatccacagtctttacttcctgcctcataaagggccaggtctccccagtaccaagtcctttcctcatgaagttgtgttgcctcaggctgtttagggaccattgcctgtcttggtcacatgagtctgtctccttactttagtccctgggcaatccttgcttaatgcttttgttgactcaacgagggcccgaggccttaggttttctattaaggtctctgccccaggcatggtgctctatatcttggccaaataaattactttccttgaatatccaggaatcttttagtctaaagcaatgaggagttatcacctcatcctcaaactccaacaagatctatgccttagtgttgtttttgttgtctgctttgatgtaaaagcaagagtatttggagcaagaagctgcaatgcgccaaatacacaataggccttttctttatcattcatacgacatttctggtttaggtgtatgtagttgggccatgttacttgtccagaggaagagactaaagatataagaataattttttagtcctaaatgctgttttgtttactttctgtcaagatatttacccgtgtcaaattcaaactacagtactgtgtaattatgtataaagtttttttatttatttgaagttagactagatatacgtttttaaatttaacatctggctggacagtgttctattaactcattgaatgtgtttcctttgtcttgtgttaataaatattgatgcctgattctgtttaannc

SEQ ID NO: 420740 - DNA, 6694 bp, Homo sapiens
  misc_feature (6692)..(6693): n is a, c, g, or t
ccaaggtagctttagtaaaatgtcgggacttgcactgggctatgatggcacatcgggaccaaagagacgtgagcttgagttccctccgaatgttaattgtgactgatggagctaacccctggtccgtgtcatcctgtgatgccttcctgagtctgttccaaagtcatggactgaagcctgaggccatctgtccgtgcgccacgtctgctgaagccatgactgtagcaatccgcaggcctggagttccaggagcccctttgccaggaagagccattctctcaatgaatggattgagctatggggtaatacgggtcaatactgaagataaaaattcagcactgacggtccaggatgtagggcatgtaatgcctggtgggatgatgtgcattgtgaaaccagatggacctccccagctctgcaaaacagatgaaattggagaaatctgtgttagctccagaactggaggcatgatgtactttgggcttgctggtgtgacaaaaaatacatttgaggtaattccagtgaattctgcaggctctcctgttggggatgtgccattcatccgatcaggattgctggggtttgtagggccgggtagtttggtgttcgtggttgggaaaatggatggcttactgatggttagtggtcgaagacataatgctgatgacattgttgctactggattggctgtagaatcaataaagactgtttatagaggaagaattgctgtgttttctgtgtctgtattttatgatgagcgcattgtggtggttgcggaacaaagacctgatgcttctgaggaagatagtttccagtggatgagccgcgtgctgcaggcgatcgatagcattcatcaagtgggggtttattgtcttgctctggtgccagccaatacattgccaaaaactccactaggaggaatccatatatctcagacgaaacaactctttctggagggatcactgcatccttgcaacatcctcatgtgcccccatacatgtgtgacaaacttgccaaagccccggcaaaaacaaccaggtgtaggccctgcttccgtgatggttgggaatctggttgctggaaaacgtatagcacaagctgctggaagggatctgggacaaatagaagagaatgatttggtgaggaagcaccagtttctggcagagatcctacagtggcgagcccaggcgactcctgaccatgtactcttcatgctgttaaatgccaagggaaccactgtatgcacagccagctgccttcagcttcataagcgagcagagaggattgcatctgttcttggtgataagggacatctaaatgcaggagataatgtggtgttgctctatccacctggcattgagttaatcgccgccttctatggctgcctgtatgcgggctgtatacctgtgaccgtcagacctccacatgctcagaacctcacggccacgctgcccactgtccgaatgattgttgatgtcagcaaagcagcctgtattctcaccagtcagaccctaatgaggctactgaggtcccgagaggcagcagcagctgtggatgtgaaaacctggccaaccatcattgacacagatgatttacccaggaaaaggttacctcagctgtataaaccgcccactcctgagatgttggcatatcttgattttagtgtctccacaactggcatgcttacaggagtgaagatgtcccactctgcagtgaacgctctgtgtcgagccatcaagctccagtgtgagttgtactcttctcggcagatcgccatctgccttgacccttactgtggacttggcttcgcgctctggtgtctctgcagtgtctattcaggccaccagtctgtcttaattcctcctatggagttagagaacaaccttttcctctggctctccacagtcaaccagtacaaaataagggacactttctgctcctattcagtgatggagctctgcaccaaaggtcttgggaaccaagtggaagtgctaaagaccagagggatcaacctctcctgcgtccggacctgtgtggtggtggcggaggagaggccccgcgttgcactccagcagtccttctctaagctcttcaaagacatcgggctgtccccgcgggctgtcagcaccacttttggatcaagagtcaatgtagcaatatgtttacagggaacctcagggcctgatccgactactgtgtatgtggatctgaaatcactaagacatgacagggttcgtctcgtggaacgtggcgcccctcagagtttgcttctctcagagtctggaaagattttacctggagtgaaagtggttattgttaatcctgagaccaaagggccggttggagactctcaccttggagagatttgggtgaacagtccccatacagccagcggctactacaccatctatgatagcgagactcttcaagctgatcatttcaacactcgcctcagctttggagatgcagctcagacactctgggctcggacaggataccttggttttgtccgccggaccgagctcacagcggccactggagagcgtcatgatgcattgtatgtggtgggagcgctggatgaaacactggagctgagaggattacgataccacccaatcgatattgagacctcggtgtcccggatccacagaagcattgctgaatgtgccgtgttcacatggaccaacttgcttgtggtggttgtggaactgtgcggctctgaacaggaagccctagatctggtcccattagtgaccaacgtggtcctggaagagcattacctcatcgttggcgtcgtggttgtggtggacccaggtgtcatcccgatcaactccagaggagagaagcagaggatgcacctccgtgatagcttcctagctgaccagttagaccccatctacgtggcttataacatgtaaccagccttgtggggactgcagtgggccattctgaagaatcacaaagacagaagacctctggctacgagcaggcttcaaacgatgtgaaataagctgagatggctacatgatattcttcatctcatcctgtgggattctgcaatcataaaacacaggaaaggggaattctgtgatggcaaatgaaaaaaatgttaacatttggtagacatgtgctttgacatagcgtgagcagcacattactaaagcaattacatgcatgttgcatttttttcatctgttgtacatagttgtatttttatctaatgccattttagaattttctaagggaatttaatgaattcacatgaaaggggtagtctgagtgacacagttccccactccgtactgtattttgccattctgccgtagctagatgttctgtggggtttgttaacatggaactactcagctttctttcagtcaacccataagcaaatcagataacccactgactatgagaattactttatatagataattcttgactgtaaaacattttgaccagtgttttacaacatgtacataagaatacacataattcaactagagatttgaagaattggcttgtatagttataacaaccacagtagaaacatttctactttgagagaatttcaatattctcttaatgttgtgtaattgattaggtaactaaaaagcgcaaattgttggcaggttttgctgcacattgttctatgtctttgttggctggtgtattttataaactaaagctgcctatgtttctttttaaagctcgcattcccagaatcagcttaggcttctatgaattcagcctgtttctaaaagctgaaaatctcagtttaaaaatcaaaatgttaacacaaagctaagattcatcagagcccaccctattctaaggaaccacaataacttactctggccccagtgttaaaacgatctttcagatttagagtgactatgtaagaatttaggatttcctcttttccaggcacattgtaaactgtgtctacagtttatccatataacttctcttctgaaaactgaggagtgtcctctgttcttccagttcacgagggcagggggtttaaaacaagaatgataggccaggaaggcagtggggatccaccatcacatggaactgtaaggccatataactacacaaaactgaccaatctgggttgccaaagcagccaggcttatgctgaaaccggggaagtctgacatatgcaggaaactcttttgaaataactttggtgcccaggccaagtagaatgagatgagactgagtttggcctctggctcggtttcctttctttggtctgatacttcatgtatttgaatatagttaaatcgtattatttttttcttaacagaaatatttttaaaaatgaaaaagtactcaaaagtgagaagagttaacttgtcaaagcagaatggttctctttgacccactctggtctattgtgtaaatatttatttagactattttaataatacatattatttaccccactgtaacatcatgtaaactaagtatgtttttaaacaatttttaagacttgtaattaccctgaaaataaggtttataatgcaaagaccagctcctttgcggtggcagtgctctagggctgccattacacggtcttgtgatgtgacacagagggcagagctcaggacatttgccagttccagatctctttttcagcattttgatggaattaatttacacgtaatgagggaagtcctaggatggatagaaaaaaagcacttacattggggcacacaggaaatcccagtgtctagcaatggtttggtttgcagagaacacagcctgatacttaattttcttaaaactatttttaatgatccactaaacaaagcaggggatcctgaagctgatataaataagtctagctctataatccccaagttctaaaagttatggttagatgctattctgtgggttgctttgataattcttactaacacagattagggtataggcatctagagatgcactgtccactgtaaatactataatgagagccacatctgtaatttaaatgtttctagtaaccacatttttttaaaagtaaaaagaaacccatggtattgatttaaatatattttatttaacccaatagctcaaaaacactatcatttcaacataggatcaatataaaaattattaatgagttattttactttttttcatattaggcctttgaaattcagtgtgtattaaacacatctcaattcaaaccatcaccatatttcaagtctttgtagccaaatgtgactagtggctaccatattagacagtgcagatctatactcattccttcaaatacattactctgttaatctcaaagtgtggccaactcccatttacttagaggctgattatctagttttgtagttcctcaggcctctaatttattttttgctttctgctttattgatcttttgcatgtcccccaaagccagaatctgctcatggaggaaggaaggctaagaactgtccttgaggaacttcatcagtaactctggtaaagcatcctgtggagggagaggagagcccagtcatttgcttagatggtgtttgtgggatcacctgcagatttaaagcctactctgccacagactcgagtaagaaaatgttctcttgatgacacagtgctcctactctatccacattaagtagcacttttgtggtagaactgattcttaaggcaggcctgaaaggccattactaatagaaacacagcctttccaatcctctggaacatattctgtctgggtttttaatgtctgtggaaaaaaactaaacaagtctctgtctcagttaagagaaatctattggtctgaaggtttctgaacctctttctggttctcagcagaagtaactgaagtagatcaggaaggggctgcctcaggaaaattcctagatcctaggaattcagtgagaccctgggaaggaccagcatgctaatcagtgtcagtgaatccacagtctttacttcctgcctcataaagggccaggtctccccagtaccaagtcctttcctcatgaagttgtgttgcctcaggctgtttagggaccattgcctgtcttggtcacatgagtctgtctccttactttagtccctgggcaatccttgcttaatgcttttgttgactcaacgagggcccgaggccttaggttttctattaaggtctctgccccaggcatggtgctctatatcttggccaaataaattactttccttgaatatccaggaatcttttagtctaaagcaatgaggagttatcacctcatcctcaaactccaacaagatctatgccttagtgttgtttttgttgtctgctttgatgtaaaagcaagagtatttggagcaagaagctgcaatgcgccaaatacacaataggccttttctttatcattcatacgacatttctggtttaggtgtatgtagttgggccatgttacttgtccagaggaagagactaaagatataagaataattttttagtcctaaatgctgttttgtttactttctgtcaagatatttacccgtgtcaaattcaaactacagtactgtgtaattatgtataaagtttttttatttatttgaagttagactagatatacgtttttaaatttaacatctggctggacagtgttctattaactcattgaatgtgtttcctttgtcttgtgttaataaatattgatgcctgattctgtttaannc

SEQ ID NO: 420741 - DNA, 1333 bp, Homo sapiens
  misc_feature (1331)..(1332): n is a, c, g, or t
tagctcggtaccccacaccacctgagtcttgctttattgatcttttgcatgtcccccaaagccagaatctgctcatggaggaaggaaggctaagaactgtccttgaggaacttcatcagtaactctggtaaagcatcctgtggagggagaggagagcccagtcatttgcttagatggtgtttgtgggatcacctgcagatttaaagcctactctgccacagactcgagtaagaaaatgttctcttgatgacacagtgctcctactctatccacattaagtagcacttttgtggtagaactgattcttaaggcaggcctgaaaggccattactaatagaaacacagcctttccaatcctctggaacatattctgtctgggtttttaatgtctgtggaaaaaaactaaacaagtctctgtctcagttaagagaaatctattggtctgaaggtttctgaacctctttctggttctcagcagaagtaactgaagtagatcaggaaggggctgcctcaggaaaattcctagatcctaggaattcagtgagaccctgggaaggaccagcatgctaatcagtgtcagtgaatccacagtctttacttcctgcctcataaagggccaggtctccccagtaccaagtcctttcctcatgaagttgtgttgcctcaggctgtttagggaccattgcctgtcttggtcacatgagtctgtctccttactttagtccctgggcaatccttgcttaatgcttttgttgactcaacgagggcccgaggccttaggttttctattaaggtctctgccccaggcatggtgctctatatcttggccaaataaattactttccttgaatatccaggaatcttttagtctaaagcaatgaggagttatcacctcatcctcaaactccaacaagatctatgccttagtgttgtttttgttgtctgctttgatgtaaaagcaagagtatttggagcaagaagctgcaatgcgccaaatacacaataggccttttctttatcattcatacgacatttctggtttaggtgtatgtagttgggccatgttacttgtccagaggaagagactaaagatataagaataattttttagtcctaaatgctgttttgtttactttctgtcaagatatttacccgtgtcaaattcaaactacagtactgtgtaattatgtataaagtttttttatttatttgaagttagactagatatacgtttttaaatttaacatctggctggacagtgttctattaactcattgaatgtgtttcctttgtcttgtgttaataaatattgatgcctgattctgtttaannc

SEQ ID NO: 420742 - DNA, 6666 bp, Homo sapiens
  misc_feature (6664)..(6665): n is a, c, g, or t
ccaaggtagctttagtaaaatgtcgggacttgcactgggctatgatggcacatcgggaccaaagagacgtgagcttgagttccctccgaatgttaattgtgactgatggagctaacccctggtccgtgtcatcctgtgatgccttcctgagtctgttccaaagtcatggactgaagcctgaggccatctgtccgtgcgccacgtctgctgaagccatgactgtagcaatccgcaggcctggagttccaggagcccctttgccaggaagagccattctctcaatgaatggattgagctatggggtaatacgggtcaatactgaagataaaaattcagcactgacggtccaggatgtagggcatgtaatgcctggtgggatgatgtgcattgtgaaaccagatggacctccccagctctgcaaaacagatgaaattggagaaatctgtgttagctccagaactggaggcatgatgtactttgggcttgctggtgtgacaaaaaatacatttgaggtaattccagtgaattctgcaggctctcctgttggggatgtgccattcatccgatcaggattgctggggtttgtagggccgggtagtttggtgttcgtggttgggaaaatggatggcttactgatggttagtggtcgaagacataatgctgatgacattgttgctactggattggctgtagaatcaataaagactgtttatagaggaagaattgctgtgttttctgtgtctgtattttatgatgagcgcattgtggtggttgcggaacaaagacctgatgcttctgaggaagatagtttccagtggatgagccgcgtgctgcaggcgatcgatagcattcatcaagtgggggtttattgtcttgctctggtgccagccaatacattgccaaaaactccactaggaggaatccatatatctcagacgaaacaactctttctggagggatcactgcatccttgcaacatcctcatgtgcccccatacatgtgtgacaaacttgccaaagccccggcaaaaacaaccaggtgtaggccctgcttccgtgatggttgggaatctggttgctggaaaacgtatagcacaagctgctggaagggatctgggacaaatagaagagaatgatttggtgaggaagcaccagtttctggcagagatcctacagtggcgagcccaggcgactcctgaccatgtactcttcatgctgttaaatgccaagggaaccactgtatgcacagccagctgccttcagcttcataagcgagcagagaggattgcatctgttcttggtgataagggacatctaaatgcaggagataatgtggtgttgctctatccacctggcattgagttaatcgccgccttctatggctgcctgtatgcgggctgtatacctgtgaccgtcagacctccacatgctcagaacctcacggccacgctgcccactgtccgaatgattgttgatgtcagcaaagcagcctgtattctcaccagtcagaccctaatgaggctactgaggtcccgagaggcagcagcagctgtggatgtgaaaacctggccaaccatcattgacacagatgatttacccaggaaaaggttacctcagctgtataaaccgcccactcctgagatgttggcatatcttgattttagtgtctccacaactggcatgcttacaggagtgaagatgtcccactctgcagtgaacgctctgtgtcgagccatcaagctccagtgtgagttgtactcttctcggcagatcgccatctgccttgacccttactgtggacttggcttcgcgctctggtgtctctgcagtgtctattcaggccaccagtctgtcttaattcctcctatggagttagagaacaaccttttcctctggctctccacagtcaaccagtacaaaataagggacactttctgctcctattcagtgatggagctctgcaccaaaggtcttgggaaccaagtggaagtgctaaagaccagagggatcaacctctcctgcgtccggacctgtgtggtggtggcggaggagaggccccgcgttgcactccagcagtccttctctaagctcttcaaagacatcgggctgtccccgcgggctgtcagcaccacttttggatcaagagtcaatgtagcaatatgtttacagggaacctcagggcctgatccgactactgtgtatgtggatctgaaatcactaagacatgacagggttcgtctcgtggaacgtggcgcccctcagagtttgcttctctcagagtctggaaagattttacctggagtgaaagtggttattgttaatcctgagaccaaagggccggttggagactctcaccttggagagatttgggtgaacagtccccatacagccagcggctactacaccatctatgatagcgagactcttcaagctgatcatttcaacactcgcctcagctttggagatgcagctcagacactctgggctcggacaggataccttggttttgtccgccggaccgagctcacagcggccactggagagcgtcatgatgcattgtatgtggtgggagcgctggatgaaacactggagctgagaggattacgataccacccaatcgatattgagacctcggtgtcccggatccacagaagcattgctgaatgtgccgtgttcacatggaccaacttgcttgtggtggttgtggaactgtgcggctctgaacaggaagccctagatctggtcccattagtgaccaacgtggtcctggaagagcattacctcatcgttggcgtcgtggttgtggtggacccaggtgtcatcccgatcaactccagaggagagaagcagaggatgcacctccgtgatagcttcctagctgaccagttagaccccatctacgtggcttataacatgtaaccagccttgtggggactgcagtgggccattctgaagaatcacaaagacagaagacctctggctacgagcaggcttcaaacgatgtgaaataagctgagatggctacatgatattcttcatctcatcctgtgggattctgcaatcataaaacacaggaaaggggaattctgtgatggcaaatgaaaaaaatgttaacatttggtagacatgtgctttgacatagcgtgagcagcacattactaaagcaattacatgcatgttgcatttttttcatctgttgtacatagttgtatttttatctaatgccattttagaattttctaagggaatttaatgaattcacatgaaaggggtagtctgagtgacacagttccccactccgtactgtattttgccattctgccgtagctagatgttctgtggggtttgttaacatggaactactcagctttctttcagtcaacccataagcaaatcagataacccactgactatgagaattactttatatagataattcttgactgtaaaacattttgaccagtgttttacaacatgtacataagaatacacataattcaactagagatttgaagaattggcttgtatagttataacaaccacagtagaaacatttctactttgagagaatttcaatattctcttaatgttgtgtaattgattaggtaactaaaaagcgcaaattgttggcaggttttgctgcacattgttctatgtctttgttggctggtgtattttataaactaaagctgcctatgtttctttttaaagctcgcattcccagaatcagcttaggcttctatgaattcagcctgtttctaaaagctgaaaatctcagtttaaaaatcaaaatgttaacacaaagctaagattcatcagagcccaccctattctaaggaaccacaataacttactctggccccagtgttaaaacgatctttcagatttagagtgactatgtaagaatttaggatttcctcttttccaggcacattgtaaactgtgtctacagtttatccatataacttctcttctgaaaactgaggagtgtcctctgttcttccagttcacgagggcagggggtttaaaacaagaatgataggccaggaaggcagtggggatccaccatcacatggaactgtaaggccatataactacacaaaactgaccaatctgggttgccaaagcagccaggcttatgctgaaaccggggaagtctgacatatgcaggaaactcttttgaaataactttggtgcccaggccaagtagaatgagatgagactgagtttggcctctggctcggtttcctttctttggtctgatacttcatgtatttgaatatagttaaatcgtattatttttttcttaacagaaatatttttaaaaatgaaaaagtactcaaaagtgagaagagttaacttgtcaaagcagaatggttctctttgacccactctggtctattgtgtaaatatttatttagactattttaataatacatattatttaccccactgtaacatcatgtaaactaagtatgtttttaaacaatttttaagacttgtaattaccctgaaaataaggtttataatgcaaagaccagctcctttgcggtggcagtgctctagggctgccattacacggtcttgtgatgtgactaaaagccactttgtgactcccttcatgtaatcctcttttcctccccactcctccacagagggcagagctcaggacatttgccagttccagatctctttttcagcattttgatggaattaatttacacgtaatgagggaagtcctaggatggatagaaaaaaagcacttacattggggcacacaggaaatcccagtgtctagcaatggtttggtttgcagagaacacagcctgatacttaattttcttaaaactatttttaatgatccactaaacaaagcaggggatcctgaagctgatataaataagtctagctctataatccccaagttctaaaagttatggttagatgctattctgtgggttgctttgataattcttactaacacagattagggtataggcatctagagatgcactgtccactgtaaatactataatgagagccacatctgtaatttaaatgtttctagtaaccacatttttttaaaagtaaaaagaaacccatggtattgatttaaatatattttatttaacccaatagctcaaaaacactatcatttcaacataggatcaatataaaaattattaatgagttattttactttttttcatattaggcctttgaaattcagtgtgtattaaacacatctcaattcaaaccatcaccatatttcaagtctttgtagccaaatgtgactagtggctaccatattagacagtgcagatctatactcattccttcaaatacattactctgttaatctcaaagtgtggccaactcccatttacttagaggctgattatctagttttgtagttcctcaggcctctaatttattttttgctttctgctttattgatcttttgcatgtcccccaaagccagaatctgctcatggaggaaggaaggctaagaactgtccttgaggaacttcatcagtaactctggtaaagcatcctgtggagggagaggagagcccagtcatttgcttagatggtgtttgtgggatcacctgcagatttaaagcctactctgccacagactcgagtaagaaaatgttctcttgatgacacagtgctcctactctatccacattaagtagcacttttgtggtagaactgattcttaaggcaggcctgaaaggccattactaatagaaacacagcctttccaatcctctggaacatattctgtctgggtttttaatgtctgtggaaaaaaactaaacaagtctctgtctcagttaagagaaatctattggtctgaaggtttctgaacctctttctggttctcagcagaagtaactgaagtagatcaggaaggggctgcctcaggaaaattcctagatcctaggaattcagtgagaccctgggaaggaccagcatgctaatcagtgtcagtgaatccacagtctttacttcctgcctcataaagggccaggtctccccagtaccaagtcctttcctcatgaagttgtgttgcctcaggctgtttagggaccattgcctgtcttggtcacatgagtctgtctccttactttagtccctgggcaatccttgcttaatgcttttgttgactcaacgagggcccgaggccttaggttttctattaaggtctctgccccaggcatggtgctctatatcttggccaaataaattactttccttgaatatccaggaatcttttagtctaaagcaatgaggagttatcacctcatcctcaaactccaacaagatctatgccttagtgttgtttttgttgtctgctttgatgtaaaagcaagagtatttggagcaagaagctgcaatgcgccaaatacacaataggccttttctttatcattcatacgacatttctggtttaggtgtatgtagttgggccatgttacttgtccagaggaagagactaaagatataagaataattttttagtcctaaatgctgttttgtttactttctgtcaagatatttacccgtgtcaaattcaaactacagtactgtgtaattattcattgaatgtgtttcctttgtcttgtgttaataaatattgatgcctgattctgtttaannc

SEQ ID NO: 420743 - DNA, 2175 bp, Homo sapiens
ccaaggtagctttagtaaaatgtcgggacttgcactgggctatgatggcacatcgggaccaaagagacgtgagcttgagttccctccgaatgttaattgtgactgatggagctaacccctggtccgtgtcatcctgtgatgccttcctgagtctgttccaaagtcatggactgaagcctgaggccatctgtccgtgcgccacgtctgctgaagccatgactgtagcaatccgcaggcctggagttccaggagcccctttgccaggaagagccattctctcaatgaatggattgagctatggggtaatacgggtcaatactgaagataaaaattcagcactgacggtccaggatgtagggcatgtaatgcctggtgggatgatgtgcattgtgaaaccagatggacctccccagctctgcaaaacagatgaaattggagaaatctgtgttagctccagaactggaggcatgatgtactttgggcttgctggtgtgacaaaaaatacatttgaggtaattccagtgaattctgcaggctctcctgttggggatgtgccattcatccgatcaggattgctggggtttgtagggccgggtagtttggtgttcgtggttgggaaaatggatggcttactgatggttagtggtcgaagacataatgctgatgacattgttgctactggattggctgtagaatcaataaagactgtttatagaggaagaattgctgtgttttctgtgtctgtattttatgatgagcgcattgtggtggttgcggaacaaagacctgatgcttctgaggaagatagtttccagtggatgagccgcgtgctgcaggcgatcgatagcattcatcaagtgggggtttattgtcttgctctggtgccagccaatacattgccaaaaactccactaggaggaatccatatatctcagacgaaacaactctttctggagggatcactgcatccttgcaacatcctcatgtgcccccatacatgtgtgacaaacttgccaaagccccggcaaaaacaaccaggtgtaggccctgcttccgtgatggttgggaatctggttgctggaaaacgtatagcacaagctgctggaagggatctgggacaaatagaagagaatgatttggtgaggaagcaccagtttctggcagagatcctacagtggcgagcccaggcgactcctgaccatgtactcttcatgctgttaaatgccaagggaaccactgtatgcacagccagctgccttcagcttcataagcgagcagagaggattgcatctgttcttggtgataagggacatctaaatgcaggagataatgtggtgttgctctatccacctggcattgagttaatcgccgccttctatggctgcctgtatgcgggctgtatacctgtgaccgtcagacctccacatgctcagaacctcacggccacgctgcccactgtccgaatgattgttgatgtcagcaaagcagcctgtattctcaccagtcagaccctaatgaggctactgaggtcccgagaggcagcagcagctgtggatgtgaaaacctggccaaccatcattgacacagatgatttacccaggaaaaggttacctcagctgtataaaccgcccactcctgagatgttggcatatcttgattttagtgtctccacaactggcatgcttacaggagtgaaggtaaggtgcatgctggaaaaatgccacatctgccaaaaatagagatgaccactgccccagaaactatagatgcagaggccaagtggttgtaccagagaccggtaggcagagtgaagatctaagtcgctgctctatttaaataaaggcattggctcctctggaatgagttatcacaaggaatttgtattattaagcgtctgaacctagcatagaagctgaaagaaaaagagttttagttaaaatatgtatgaaatctgatatttagatatcataaaatgcagtattcgctgggcacggtggctcacgcctgttatcccaagtgctaggattacaggtgtgagccaccacacccagtcccattccttcctttttatcctgggatacactattgggttcaagcctgttatcacctctcacctgaactattgcagcctctcctaactgtctctcaagtttcagtggctcgtatcaccaatcc

SEQ ID NO: 420744 - DNA, 555 bp, Homo sapiens
tgatggttgggaatctggttgctggaaaacgtatagcacaagctgctggaagggatctgggacaaatagaagagaatgatttggtgaggaaggtaagtgttcctgaagtgttaccttcttacagtcaagtcaaggacagaacttactgcaggtagcagctgggggatgcattatatgacttgttataagttgctgaccctgagtcctttttctggtttatgacttcagcaccagtttctggcagagatcctacagtggcgagcccaggcgactcctgaccatgtactcttcatgctgttaaatgccaaggtattaaaaattcaatggtatatctaatcagctgactactataggaccatcttaggcactcttgatctctttctttcatcagaaaatttctgttgccatctctgaagaaggagttaatggctttctccttgctttggcatatgagggtaaactgtgcaatcactttaagattggactgagacctcctggagtgctatgtaatactttcttttcttatggtacaatcacgtcttctttattcagttc

SEQ ID NO: 420745 - DNA, 453 bp, Homo sapiens
aagtggttgtaccagagaccggtaggcagagtgaagatctaagtcgctgctctatttaaataaaggcattggctcctctggaatgagttatcacaaggaatttgtattattaagcgtctgaacctagcatagaagctgaaagaaaaagagttttagttaaaatatgtatgaaatctgatatttagatatcataaaatgcagtattcgctgggcacggtggctcacgcctgttatcccagctccttgggaggccaaggcgggcagatcacctgaggtcaggagttcgagaccagcctgaacaacatggaaaaccccgtctctactaaaaatagaaaatcagctgggcgtggtggtgcgtgcctgtaatcccagctactcaggaggctgaggttgcggtgagctgagatcgtgccattgcaccgcagcctgggcaacaggagtgaaactccatct

SEQ ID NO: 420746 - DNA, 775 bp, Homo sapiens
agctaatgctttttgagcatttcttcagtcagttgctttaaaagtgctttatgtgaattaacttcccaacagttctatgagggtaggtattattttagagattcattttagagaaaaagaaaacagacacaaagaggtgaaataactccaaggtcacgtagctgagggtagagctggcatttgaacagcagtctgcttcctactgtgttctgtttccccttactaagctgctagcagatacatttacctgatgtagatttgcttgcctgtgttgtctagtgttgtcctcaaccccagcccacctctaagaatgacatatgtgagctacttggttaaatatgagaggcctaagctttagcaaatctgcgaagctaaatttggccatagcaaagccacagaagagcaatgattttcatgttccagcatgttggattgacatcaggttttttcttttcatggcagatgatttacccaggaaaaggttacctcagctgtataaaccgcccactcctgagatgttggcatatcttgattttagtgtctccacaactggcatgcttacaggagtgaaggtaaggtgcatgctggaaaaatgccacatctgccaaaaatagagatgaccactgccccagaaactatagatgcagaggccaagtggttgtaccagagaccggtaggcagagtgaagatctaagtcgctgctctatttaaataaaggcattggctcctctggaatgagttatcacaaggaatttgtattattaagcgtctgaac

SEQ ID NO: 420747 - DNA, 398 bp, Homo sapiens
tcttagagctttatatctcatatgtccctacactgtcctttacactcagtaaatatctgtggaattggtggggttctgaagcatcaggtatccaggatgaattgatgattccagctcttgtctctttcactgcagtgtctattcaggccaccagtctgtcttaattcctcctatggagttagagaacaaccttttcctctggctctccacagtcaaccagtacaaaataagggacactttctgctcctattcagtgatggagctctgcaccaaaggtcttgggaaccaagtggaagtgctaaaggtaagaagcagctccagcaggtggccagtcccaaaaggttctgaagaaatgcgccaggacgtaacagggccagagcaggggctaacagacatgt

SEQ ID NO: 420748 - DNA, 484 bp, Homo sapiens
gctgtgttcacaggggcaagatgtctctcatatatatatatattcattatataatttttccctcagtcttatcaggtaaaattgaaaggtgtcatatatggtagacatgactgctgacgttctggttgggattgaggggagaaggcggggaaatgggctaagtctgggacagatgctataaaagataactgaaaaatgtagtgacaagttaatgaattgtcattgaaatttcagtgccgtgttcacatggaccaacttgcttgtggtggttgtggaactgtgcggctctgaacaggaagccctagatctggtcccattagtgaccaacgtggtcctggaagagcattacctcatcgttggcgtcgtggttgtggtggacccaggtgtcatcccgatcaactccagaggagagaagcagaggatgcacctccgtgatagcttcctagctgaccagttagaccccatctacgtggcttataacatg

SEQ ID NO: 420749 - DNA, 380 bp, Homo sapiens
tgcatcagttaaccttctattagctatcctcttcaatcatatactctctggaaagtgcactttccaggtagtttccagagtgcacctcctgagtagctgggactacaggtgcacaccaccacacctggctaattgttttgtagagacagcgtttcgtcatgttgcccaggctggtcttgaactcctggactcaggcagtccgcctgcctcgacctcccaaagtgctaggattacaggtgtgagccaccacacccagtcccattccttcctttttatcctgggatacactattgggttcaagcctgttatcacctctcacctgaactattgcagcctctcctaactgtctctcaagtttcagtggctcgtatcaccaatcc

SEQ ID NO: 420750 - DNA, 6772 bp, Homo sapiens
  misc_feature (6770)..(6771): n is a, c, g, or t
ccaaggtagctttagtaaaatgtcgggacttgcactgggctatgatggcacatcgggaccaaagagacgtgagcttgagttccctccgaatgttaattgtgactgatggagctaacccctgttgatctgttccaactccttagggtccgtgtcatcctgtgatgccttcctgagtctgttccaaagtcatggactgaagcctgaggccatctgtccgtgcgccacgtctgctgaagccatgactgtagcaatccgcaggcctggagttccaggagcccctttgccaggaagagccattctctcaatgaatggattgagctatggggtaatacgggtcaatactgaagataaaaattcagcactgacggtccaggatgtagggcatgtaatgcctggtgggatgatgtgcattgtgaaaccagatggacctccccagctctgcaaaacagatgaaattggagaaatctgtgttagctccagaactggaggcatgatgtactttgggcttgctggtgtgacaaaaaatacatttgaggtaattccagtgaattctgcaggctctcctgttggggatgtgccattcatccgatcaggattgctggggtttgtagggccgggtagtttggtgttcgtggttgggaaaatggatggcttactgatggttagtggtcgaagacataatgctgatgacattgttgctactggattggctgtagaatcaataaagactgtttatagaggaagaattgctgtgttttctgtgtctgtattttatgatgagcgcattgtggtggttgcggaacaaagacctgatgcttctgaggaagatagtttccagtggatgagccgcgtgctgcaggcgatcgatagcattcatcaagtgggggtttattgtcttgctctggtgccagccaatacattgccaaaaactccactaggaggaatccatatatctcagacgaaacaactctttctggagggatcactgcatccttgcaacatcctcatgtgcccccatacatgtgtgacaaacttgccaaagccccggcaaaaacaaccaggtgtaggccctgcttccgtgatggttgggaatctggttgctggaaaacgtatagcacaagctgctggaagggatctgggacaaatagaagagaatgatttggtgaggaagcaccagtttctggcagagatcctacagtggcgagcccaggcgactcctgaccatgtactcttcatgctgttaaatgccaagggaaccactgtatgcacagccagctgccttcagcttcataagcgagcagagaggattgcatctgttcttggtgataagggacatctaaatgcaggagataatgtggtgttgctctatccacctggcattgagttaatcgccgccttctatggctgcctgtatgcgggctgtatacctgtgaccgtcagacctccacatgctcagaacctcacggccacgctgcccactgtccgaatgattgttgatgtcagcaaagcagcctgtattctcaccagtcagaccctaatgaggctactgaggtcccgagaggcagcagcagctgtggatgtgaaaacctggccaaccatcattgacacagatgatttacccaggaaaaggttacctcagctgtataaaccgcccactcctgagatgttggcatatcttgattttagtgtctccacaactggcatgcttacaggagtgaagatgtcccactctgcagtgaacgctctgtgtcgagccatcaagctccagtgtgagttgtactcttctcggcagatcgccatctgccttgacccttactgtggacttggcttcgcgctctggtgtctctgcagtgtctattcaggccaccagtctgtcttaattcctcctatggagttagagaacaaccttttcctctggctctccacagtcaaccagtacaaaataagggacactttctgctcctattcagtgatggagctctgcaccaaaggtcttgggaaccaagtggaagtgctaaagaccagagggatcaacctctcctgcgtccggacctgtgtggtggtggcggaggagaggccccgcgttgcactccagcagtccttctctaagctcttcaaagacatcgggctgtccccgcgggctgtcagcaccacttttggatcaagagtcaatgtagcaatatgtttacagggaacctcagggcctgatccgactactgtgtatgtggatctgaaatcactaagacatgacagggttcgtctcgtggaacgtggcgcccctcagagtttgcttctctcagagtctggaaagattttacctggagtgaaagtggttattgttaatcctgagaccaaagggccggttggagactctcaccttggagagatttgggtgaacagtccccatacagccagcggctactacaccatctatgatagcgagactcttcaagctgatcatttcaacactcgcctcagctttggagatgcagctcagacactctgggctcggacaggataccttggttttgtccgccggaccgagctcacagcggccactggagagcgtcatgatgcattgtatgtggtgggagcgctggatgaaacactggagctgagaggattacgataccacccaatcgatattgagacctcggtgtcccggatccacagaagcattgctgaatgtgccgtgttcacatggaccaacttgcttgtggtggttgtggaactgtgcggctctgaacaggaagccctagatctggtcccattagtgaccaacgtggtcctggaagagcattacctcatcgttggcgtcgtggttgtggtggacccaggtgtcatcccgatcaactccagaggagagaagcagaggatgcacctccgtgatagcttcctagctgaccagttagaccccatctacgtggcttataacatgtaaccagccttgtggggactgcagtgggccattctgaagaatcacaaagacagaagacctctggctacgagcaggcttcaaacgatgtgaaataagctgagatggctacatgatattcttcatctcatcctgtgggattctgcaatcataaaacacaggaaaggggaattctgtgatggcaaatgaaaaaaatgttaacatttggtagacatgtgctttgacatagcgtgagcagcacattactaaagcaattacatgcatgttgcatttttttcatctgttgtacatagttgtatttttatctaatgccattttagaattttctaagggaatttaatgaattcacatgaaaggggtagtctgagtgacacagttccccactccgtactgtattttgccattctgccgtagctagatgttctgtggggtttgttaacatggaactactcagctttctttcagtcaacccataagcaaatcagataacccactgactatgagaattactttatatagataattcttgactgtaaaacattttgaccagtgttttacaacatgtacataagaatacacataattcaactagagatttgaagaattggcttgtatagttataacaaccacagtagaaacatttctactttgagagaatttcaatattctcttaatgttgtgtaattgattaggtaactaaaaagcgcaaattgttggcaggttttgctgcacattgttctatgtctttgttggctggtgtattttataaactaaagctgcctatgtttctttttaaagctcgcattcccagaatcagcttaggcttctatgaattcagcctgtttctaaaagctgaaaatctcagtttaaaaatcaaaatgttaacacaaagctaagattcatcagagcccaccctattctaaggaaccacaataacttactctggccccagtgttaaaacgatctttcagatttagagtgactatgtaagaatttaggatttcctcttttccaggcacattgtaaactgtgtctacagtttatccatataacttctcttctgaaaactgaggagtgtcctctgttcttccagttcacgagggcagggggtttaaaacaagaatgataggccaggaaggcagtggggatccaccatcacatggaactgtaaggccatataactacacaaaactgaccaatctgggttgccaaagcagccaggcttatgctgaaaccggggaagtctgacatatgcaggaaactcttttgaaataactttggtgcccaggccaagtagaatgagatgagactgagtttggcctctggctcggtttcctttctttggtctgatacttcatgtatttgaatatagttaaatcgtattatttttttcttaacagaaatatttttaaaaatgaaaaagtactcaaaagtgagaagagttaacttgtcaaagcagaatggttctctttgacccactctggtctattgtgtaaatatttatttagactattttaataatacatattatttaccccactgtaacatcatgtaaactaagtatgtttttaaacaatttttaagacttgtaattaccctgaaaataaggtttataatgcaaagaccagctcctttgcggtggcagtgctctagggctgccattacacggtcttgtgatgtgactaaaagccactttgtgactcccttcatgtaatcctcttttcctccccactcctccacagagggcagagctcaggacatttgccagttccagatctctttttcagcattttgatggaattaatttacacgtaatgagggaagtcctaggatggatagaaaaaaagcacttacattggggcacacaggaaatcccagtgtctagcaatggtttggtttgcagagaacacagcctgatacttaattttcttaaaactatttttaatgatccactaaacaaagcaggggatcctgaagctgatataaataagtctagctctataatccccaagttctaaaagttatggttagatgctattctgtgggttgctttgataattcttactaacacagattagggtataggcatctagagatgcactgtccactgtaaatactataatgagagccacatctgtaatttaaatgtttctagtaaccacatttttttaaaagtaaaaagaaacccatggtattgatttaaatatattttatttaacccaatagctcaaaaacactatcatttcaacataggatcaatataaaaattattaatgagttattttactttttttcatattaggcctttgaaattcagtgtgtattaaacacatctcaattcaaaccatcaccatatttcaagtctttgtagccaaatgtgactagtggctaccatattagacagtgcagatctatactcattccttcaaatacattactctgttaatctcaaagtgtggccaactcccatttacttagaggctgattatctagttttgtagttcctcaggcctctaatttattttttgctttctgctttattgatcttttgcatgtcccccaaagccagaatctgctcatggaggaaggaaggctaagaactgtccttgaggaacttcatcagtaactctggtaaagcatcctgtggagggagaggagagcccagtcatttgcttagatggtgtttgtgggatcacctgcagatttaaagcctactctgccacagactcgagtaagaaaatgttctcttgatgacacagtgctcctactctatccacattaagtagcacttttgtggtagaactgattcttaaggcaggcctgaaaggccattactaatagaaacacagcctttccaatcctctggaacatattctgtctgggtttttaatgtctgtggaaaaaaactaaacaagtctctgtctcagttaagagaaatctattggtctgaaggtttctgaacctctttctggttctcagcagaagtaactgaagtagatcaggaaggggctgcctcaggaaaattcctagatcctaggaattcagtgagaccctgggaaggaccagcatgctaatcagtgtcagtgaatccacagtctttacttcctgcctcataaagggccaggtctccccagtaccaagtcctttcctcatgaagttgtgttgcctcaggctgtttagggaccattgcctgtcttggtcacatgagtctgtctccttactttagtccctgggcaatccttgcttaatgcttttgttgactcaacgagggcccgaggccttaggttttctattaaggtctctgccccaggcatggtgctctatatcttggccaaataaattactttccttgaatatccaggaatcttttagtctaaagcaatgaggagttatcacctcatcctcaaactccaacaagatctatgccttagtgttgtttttgttgtctgctttgatgtaaaagcaagagtatttggagcaagaagctgcaatgcgccaaatacacaataggccttttctttatcattcatacgacatttctggtttaggtgtatgtagttgggccatgttacttgtccagaggaagagactaaagatataagaataattttttagtcctaaatgctgttttgtttactttctgtcaagatatttacccgtgtcaaattcaaactacagtactgtgtaattatgtataaagtttttttatttatttgaagttagactagatatacgtttttaaatttaacatctggctggacagtgttctattaactcattgaatgtgtttcctttgtcttgtgttaataaatattgatgcctgattctgtttaannc

SEQ ID NO: 420751 - DNA, 6695 bp, Homo sapiens
  misc_feature (6693)..(6694): n is a, c, g, or t
ccaaggtagctttagtaaaatgtcgggacttgcactgggctatgatggcacatcgggaccaaagagacgtgagcttgagttccctccgaatgttaattgtgactgatggagctaacccctggtccgtgtcatcctgtgatgccttcctgagtctgttccaaagtcatggactgaagcctgaggccatctgtccgtgcgccacgtctgctgaagccatgactgtagcaatccgcaggcctggagttccaggagcccctttgccaggaagagccattctctcaatgaatggattgagctatggggtaatacgggtcaatactgaagataaaaattcagcactgacggtccaggatgtagggcatgtaatgcctggtgggatgatgtgcattgtgaaaccagatggacctccccagctctgcaaaacagatgaaattggagaaatctgtgttagctccagaactggaggcatgatgtactttgggcttgctggtgtgacaaaaaatacatttgaggtaattccagtgaattctgcaggctctcctgttggggatgtgccattcatccgatcaggattgctggggtttgtagggccgggtagtttggtgttcgtggttgggaaaatggatggcttactgatggttagtggtcgaagacataatgctgatgacattgttgctactggattggctgtagaatcaataaagactgtttatagaggaagaattgctgtgttttctgtgtctgtattttatgatgagcgcattgtggtggttgcggaacaaagacctgatgcttctgaggaagatagtttccagtggatgagccgcgtgctgcaggcgatcgatagcattcatcaagtgggggtttattgtcttgctctggtgccagccaatacattgccaaaaactccactaggaggaatccatatatctcagacgaaacaactctttctggagggatcactgcatccttgcaacatcctcatgtgcccccatacatgtgtgacaaacttgccaaagccccggcaaaaacaaccaggtgtaggccctgcttccgtgatggttgggaatctggttgctggaaaacgtatagcacaagctgctggaagggatctgggacaaatagaagagaatgatttggtgaggaagcaccagtttctggcagagatcctacagtggcgagcccaggcgactcctgaccatgtactcttcatgctgttaaatgccaagggaaccactgtatgcacagccagctgccttcagcttcataagcgagcagagaggattgcatctgttcttggtgataagggacatctaaatgcaggagataatgtggtgttgctctatccacctggcattgagttaatcgccgccttctatggctgcctgtatgcgggctgtatacctgtgaccgtcagacctccacatgctcagaacctcacggccacgctgcccactgtccgaatgattgttgatgtcagcaaagcagcctgtattctcaccagtcagaccctaatgaggctactgaggtcccgagaggcagcagcagctgtggatgtgaaaacctggccaaccatcattgacacagatgatttacccaggaaaaggttacctcagctgtataaaccgcccactcctgagatgttggcatatcttgattttagtgtctccacaactggcatgcttacaggagtgaagatgtcccactctgcagtgaacgctctgtgtcgagccatcaagctccagtgtgagttgtactcttctcggcagatcgccatctgccttgacccttactgtggacttggcttcgcgctctggtgtctctgcagtgtctattcaggccaccagtctgtcttaattcctcctatggagttagagaacaaccttttcctctggctctccacagtcaaccagtacaaaataagggacactttctgctcctattcagtgatggagctctgcaccaaaggtcttgggaaccaagtggaagtgctaaagaccagagggatcaacctctcctgcgtccggacctgtgtggtggtggcggaggagaggccccgcgttgcactccagcagtccttctctaagctcttcaaagacatcgggctgtccccgcgggctgtcagcaccacttttggatcaagagtcaatgtagcaatatgtttacagggaacctcagggcctgatccgactactgtgtatgtggatctgaaatcactaagacatgacagggttcgtctcgtggaacgtggcgcccctcagagtttgcttctctcagagtctggaaagattttacctggagtgaaagtggttattgttaatcctgagaccaaagggccggttggagactctcaccttggagagatttgggtgaacagtccccatacagccagcggctactacaccatctatgatagcgagactcttcaagctgatcatttcaacactcgcctcagctttggagatgcagctcagacactctgggctcggacaggataccttggttttgtccgccggaccgagctcacagcggccactggagagcgtcatgatgcattgtatgtggtgggagcgctggatgaaacactggagctgagaggattacgataccacccaatcgatattgagacctcggtgtcccggatccacagaagcattgctgaatgtgccgtgttcacatggaccaacttgcttgtggtggttgtggaactgtgcggctctgaacaggaagccctagatctggtcccattagtgaccaacgtggtcctggaagagcattacctcatcgttggcgtcgtggttgtggtggacccaggtgtcatcccgatcaactccagaggagagaagcagaggatgcacctccgtgatagcttcctagctgaccagttagaccccatctacgtggcttataacatgtaaccagccttgtggggactgcagtgggccattctgaagaatcacaaagacagaagacctctggctacgagcaggcttcaaacgatgtgaaataagctgagatggctacatgatattcttcatctcatcctgtgggattctgcaatcataaaacacaggaaaggggaattctgtgatggcaaatgaaaaaaatgttaacatttggtagacatgtgctttgacatagcgtgagcagcacattactaaagcaattacatgcatgttgcatttttttcatctgttgtacatagttgtatttttatctaatgccattttagaattttctaagggaatttaatgaattcacatgaaaggggtagtctgagtgacacagttccccactccgtactgtattttgccattctgccgtagctagatgttctgtggggtttgttaacatggaactactcagctttctttcagtcaacccataagcaaatcagataacccactgactatgagaattactttatatagataattcttgactgtaaaacattttgaccagtgttttacaacatgtacataagaatacacataattcaactagagatttgaagaattggcttgtatagttataacaaccacagtagaaacatttctactttgagagaatttcaatattctcttaatgttgtgtaattgattaggtaactaaaaagcgcaaattgttggcaggttttgctgcacattgttctatgtctttgttggctggtgtattttataaactaaagctgcctatgtttctttttaaagctcgcattcccagaatcagcttaggcttctatgaattcagcctgtttctaaaagctgaaaatctcagtttaaaaatcaaaatgttaacacaaagctaagattcatcagagcccaccctattctaaggaaccacaataacttactctggccccagtgttaaaacgatctttcagatttagagtgactatgtaagaatttaggatttcctcttttccaggcacattgtaaactgtgtctacagtttatccatataacttctcttctgaaaactgaggagtgtcctctgttcttccagttcacgagggcagggggtttaaaacaagaatgataggccaggaaggcagtggggatccaccatcacatggaactgtaaggccatataactacacaaaactgaccaatctgggttgccaaagcagccaggcttatgctgaaaccggggaagtctgacatatgcaggaaactcttttgaaataactttggtgcccaggccaagtagaatgagatgagactgagtttggcctctggctcggtttcctttctttggtctgatacttcatgtatttgaatatagttaaatcgtattatttttttcttaacagaaatatttttaaaaatgaaaaagtactcaaaagtgagaagagttaacttgtcaaagcagaatggttctctttgacccactctggtctattgtgtaaatatttatttagactattttaataatacatattatttaccccactgtaacatcatgtaaactaagtatgtttttaaacaatttttaagacttgtaattaccctgaaaataaggtttataatgcaaagaccagctcctttgcggtggcagtgctctagggctgccattacacggtcttgtgatgtgactaaaagccactttgtgactcccttcatgtaatcctcttttcctccccactcctccacagagggcagagctcaggacatttgccagttccagatctctttttcagcattttgatggaattaatttacacgtaatgagggaagtcctaggatggatagaaaaaaagcacttacattggggcacacaggaaatcccagtgtctagcaatggtttggtttgcagagaacacagcctgatacttaattttcttaaaactatttttaatgatccactaaacaaagcaggggatcctgaagctgatataaataagtctagctctataatccccaagttctaaaagttatggttagatgctattctgtgggttgctttgataattcttactaacacagattagggtataggcatctagagatgcactgtccactgtaaatactataatgagagccacatctgtaatttaaatgtttctagtaaccacatttttttaaaagtaaaaagaaacccatggtattgatttaaatatattttatttaacccaatagctcaaaaacactatcatttcaacataggatcaatataaaaattattaatgagttattttactttttttcatattaggcctttgaaattcagtgtgtattaaacacatctcaattcaaaccatcaccatatttcaagtctttgtagccaaatgtgactagtggctaccatattagacagtgcagatctatactcattccttcaaatacattactctgttaatctcaaagtgtggccaactcccatttacttagaggctgattatctagttttgtagttcctcaggcctctaatttattttttgctttctgctttattgatcttttgcatgtcccccaaagccagaatctgctcatggaggaaggaaggctaagaactgtccttgaggaacttcatcagtaactctggtaaagcatcctgtggagggagaggagagcccagtcatttgcttagatggtgtttgtgggatcacctgcagatttaaagcctactctgccacagactcgagtaagaaaatgttctcttgatgacacagtgctcctactctatccacattaagtagcacttttgtggtagaactgattcttaaggcaggcctgaaaggccattactaatagaaacacagcctttccaatcctctggaacatattctgtctgggtttttaatgtctgtggaaaaaaactaaacaagtctctgtctcagttaagagaaatctattggtctgaaggtttctgaacctctttctggttctcagcagaagtaactgaagtagatcaggaaggggctgcctcaggatcagtgtcagtgaatccacagtctttacttcctgcctcataaagggccaggtctccccagtaccaagtcctttcctcatgaagttgtgttgcctcaggctgtttagggaccattgcctgtcttggtcacatgagtctgtctccttactttagtccctgggcaatccttgcttaatgcttttgttgactcaacgagggcccgaggccttaggttttctattaaggtctctgccccaggcatggtgctctatatcttggccaaataaattactttccttgaatatccaggaatcttttagtctaaagcaatgaggagttatcacctcatcctcaaactccaacaagatctatgccttagtgttgtttttgttgtctgctttgatgtaaaagcaagagtatttggagcaagaagctgcaatgcgccaaatacacaataggccttttctttatcattcatacgacatttctggtttaggtgtatgtagttgggccatgttacttgtccagaggaagagactaaagatataagaataattttttagtcctaaatgctgttttgtttactttctgtcaagatatttacccgtgtcaaattcaaactacagtactgtgtaattatgtataaagtttttttatttatttgaagttagactagatatacgtttttaaatttaacatctggctggacagtgttctattaactcattgaatgtgtttcctttgtcttgtgttaataaatattgatgcctgattctgtttaannc

SEQ ID NO: 420752 - DNA, 6136 bp, Homo sapiens
ccaaggtagctttagtaaaatgtcgggacttgcactgggctatgatggcacatcgggaccaaagagacgtgagcttgagttccctccgaatgttaattgtgactgatggagctaacccctggtccgtgtcatcctgtgatgccttcctgagtctgttccaaagtcatggactgaagcctgaggccatctgtccgtgcgccacgtctgctgaagccatgactgtagcaatccgcaggcctggagttccaggagcccctttgccaggaagagccattctctcaatgaatggattgagctatggggtaatacgggtcaatactgaagataaaaattcagcactgacggtccaggatgtagggcatgtaatgcctggtgggatgatgtgcattgtgaaaccagatggacctccccagctctgcaaaacagatgaaattggagaaatctgtgttagctccagaactggaggcatgatgtactttgggcttgctggtgtgacaaaaaatacatttgaggtaattccagtgaattctgcaggctctcctgttggggatgtgccattcatccgatcaggattgctggggtttgtagggccgggtagtttggtgttcgtggttgggaaaatggatggcttactgatggttagtggtcgaagacataatgctgatgacattgttgctactggattggctgtagaatcaataaagactgtttatagaggaagaattgctgtgttttctgtgtctgtattttatgatgagcgcattgtggtggttgcggaacaaagacctgatgcttctgaggaagatagtttccagtggatgagccgcgtgctgcaggcgatcgatagcattcatcaagtgggggtttattgtcttgctctggtgccagccaatacattgccaaaaactccactaggaggaatccatatatctcagacgaaacaactctttctggagggatcactgcatccttgcaacatcctcatgtgcccccatacatgtgtgacaaacttgccaaagccccggcaaaaacaaccaggtgtaggccctgcttccgtgatggttgggaatctggttgctggaaaacgtatagcacaagctgctggaagggatctgggacaaatagaagagaatgatttggtgaggaagcaccagtttctggcagagatcctacagtggcgagcccaggcgactcctgaccatgtactcttcatgctgttaaatgccaagggaaccactgtatgcacagccagctgccttcagcttcataagcgagcagagaggattgcatctgttcttggtgataagggacatctaaatgcaggagataatgtggtgttgctctatccacctggcattgagttaatcgccgccttctatggctgcctgtatgcgggctgtatacctgtgaccgtcagacctccacatgctcagaacctcacggccacgctgcccactgtccgaatgattgttgatgtcagcaaagcagcctgtattctcaccagtcagaccctaatgaggctactgaggtcccgagaggcagcagcagctgtggatgtgaaaacctggccaaccatcattgacacagatgatttacccaggaaaaggttacctcagctgtataaaccgcccactcctgagatgttggcatatcttgattttagtgtctccacaactggcatgcttacaggagtgaagatgtcccactctgcagtgaacgctctgtgtcgagccatcaagctccagtgtgagttgtactcttctcggcagatcgccatctgccttgacccttactgtggacttggcttcgcgctctggtgtctctgcagtgtctattcaggccaccagtctgtcttaattcctcctatggagttagagaacaaccttttcctctggctctccacagtcaaccagtacaaaataagggacactttctgctcctattcagtgatggagctctgcaccaaaggtcttgggaaccaagtggaagtgctaaagaccagagggatcaacctctcctgcgtccggacctgtgtggtggtggcggaggagaggccccgcgttgcactccagcagtccttctctaagctcttcaaagacatcgggctgtccccgcgggctgtcagcaccacttttggatcaagagtcaatgtagcaatatgtttacagggaacctcagggcctgatccgactactgtgtatgtggatctgaaatcactaagacatgacagggttcgtctcgtggaacgtggcgcccctcagagtttgcttctctcagagtctggaaagattttacctggagtgaaagtggttattgttaatcctgagaccaaagggccggttggagactctcaccttggagagatttgggtgaacagtccccatacagccagcggctactacaccatctatgatagcgagactcttcaagctgatcatttcaacactcgcctcagctttggagatgcagctcagacactctgggctcggacaggataccttggttttgtccgccggaccgagctcacagcggccactggagagcgtcatgatgcattgtatgtggtgggagcgctggatgaaacactggagctgagaggattacgataccacccaatcgatattgagacctcggtgtcccggatccacagaagcattgctgaatgtgccgtgttcacatggaccaacttgcttgtggtggttgtggaactgtgcggctctgaacaggaagccctagatctggtcccattagtgaccaacgtggtcctggaagagcattacctcatcgttggcgtcgtggttgtggtggacccaggtgtcatcccgatcaactccagaggagagaagcagaggatgcacctccgtgatagcttcctagctgaccagttagaccccatctacgtggcttataacatgtaaccagccttgtggggactgcagtgggccattctgaagaatcacaaagacagaagacctctggctacgagcaggcttcaaacgatgtgaaataagctgagatggctacatgatattcttcatctcatcctgtgggattctgcaatcataaaacacaggaaaggggaattctgtgatggcaaatgaaaaaaatgttaacatttggtagacatgtgctttgacatagcgtgagcagcacattactaaagcaattacatgcatgttgcatttttttcatctgttgtacatagttgtatttttatctaatgccattttagaattttctaagggaatttaatgaattcacatgaaaggggtagtctgagtgacacagttccccactccgtactgtattttgccattctgccgtagctagatgttctgtggggtttgttaacatggaactactcagctttctttcagtcaacccataagcaaatcagataacccactgactatgagaattactttatatagataattcttgactgtaaaacattttgaccagtgttttacaacatgtacataagaatacacataattcaactagagatttgaagaattggcttgtatagttataacaaccacagtagaaacatttctactttgagagaatttcaatattctcttaatgttgtgtaattgattaggtaactaaaaagcgcaaattgttggcaggttttgctgcacattgttctatgtctttgttggctggtgtattttataaactaaagctgcctatgtttctttttaaagctcgcattcccagaatcagcttaggcttctatgaattcagcctgtttctaaaagctgaaaatctcagtttaaaaatcaaaatgttaacacaaagctaagattcatcagagcccaccctattctaaggaaccacaataacttactctggccccagtgttaaaacgatctttcagatttagagtgactatgtaagaatttaggatttcctcttttccaggcacattgtaaactgtgtctacagtttatccatataacttctcttctgaaaactgaggagtgtcctctgttcttccagttcacgagggcagggggtttaaaacaagaatgataggccaggaaggcagtggggatccaccatcacatggaactgtaaggccatataactacacaaaactgaccaatctgggttgccaaagcagccaggcttatgctgaaaccggggaagtctgacatatgcaggaaactcttttgaaataactttggtgcccaggccaagtagaatgagatgagactgagtttggcctctggctcggtttcctttctttggtctgatacttcatgtatttgaatatagttaaatcgtattatttttttcttaacagaaatatttttaaaaatgaaaaagtactcaaaagtgagaagagttaacttgtcaaagcagaatggttctctttgacccactctggtctattgtgtaaatatttatttagactattttaataatacatattatttaccccactgtaacatcatgtaaactaagtatgtttttaaacaatttttaagacttgtaattaccctgaaaataaggtttataatgcaaagaccagctcctttgcggtggcagtgctctagggctgccattacacggtcttgtgatgtgactaaaagccactttgtgactcccttcatgtaatcctcttttcctccccactcctccacagagggcagagctcaggacatttgccagttccagatctctttttcagcattttgatggaattaatttacacgtaatgagggaagtcctaggatggatagaaaaaaagcacttacattggggcacacaggaaatcccagtgtctagcaatggtttggtttgcagagaacacagcctgatacttaattttcttaaaactatttttaatgatccactaaacaaagcaggggatcctgaagctgatataaataagtctagctctataatccccaagttctaaaagttatggttagatgctattctgtgggttgctttgataattcttactaacacagattagggtataggcatctagagatgcactgtccactgtaaatactataatgagagccacatctgtaatttaaatgtttctagtaaccacatttttttaaaagtaaaaagaaacccatggtattgatttaaatatattttatttaacccaatagctcaaaaacactatcatttcaacataggatcaatataaaaattattaatgagttattttactttttttcatattaggcctttgaaattcagtgtgtattaaacacatctcaattcaaaccatcaccatatttcaagtctttgtagccaaatgtgactagtggctaccatattagacagtgcagatctatactcattccttcaaatacattactctgttaatctcaaagtgtggccaactcccatttacttagaggctgattatctagttttgtagttcctcaggcctctaatttattttttgctttctgctttattgatcttttgcatgtcccccaaagccagaatctgctcatggaggaaggaaggctaagaactgtccttgaggaacttcatcagtaactctggtaaagcatcctgtggagggagaggagagcccagtcatttgcttagatggtgtttgtgggatcacctgcagatttaaagcctactctgccacagactcgagtaagaaaatgttctcttgatgacacagtgctcctactctatccacattaagtagcacttttgtggtagaactgattcttaaggcaggcctgaaaggccattactaatagaaacacagcctttccaatcctctggaacatattctgtctgggtttttaatgtctgtggaaaaaaactaaacaagtctctgtctcagttaagagaaatctattggtctgaaggtttctgaacctctttctggttctcagcagaagtaactgaagtagatcaggaaggggctgcctcaggaaaattcctagatcctaggaattcagtgagaccctgggaaggaccagcatgctaatcagtgtcagtgaatccacagtctttacttcctgcctcataaagggccaggtctccccagtaccaagtcctttcctcaggcctctaatttaggttttttttatatagagcaccatgcctggggcagagaccttaatagaaaacctaaggc

SEQ ID NO: 420753 - DNA, 583 bp, Homo sapiens
ggccgcgcgctggcctggaggctgacctggaggctcatctggaggccgagctgacccggcaggccttgcgcgggcaacatggcggcgcccggcgagcggggccgcttccacggcgggaacctcttcttcctgccggggggcgcgcgctccgagatgatggacgacctggcgaccgacgcgcggggccggggcgcggggcggagagacgcggccgcctcggcctcgacgccagcccaggcgccgacctccgattctcctgtcgccgaggacgcctcccggaggcggccgtgccgggcctgcgtcgacttcaagacgtggatgcggacgcagcagaaggctgtgcaggaaccacccagacacccgcacccgggcatgcttcacacagtggctgtgccacctgcacaatgaagtgaaccgcaagctgggcaagcctgacttcgactgctcaaaagtggatgagcgctggcgcgacggctggaaggatggctcctgtgactagagggtggtcagccagagctcatgggacagctagccaggcatggttggataggggcagggcactcattaaagtgcatcacagcca

SEQ ID NO: 420754 - DNA, 2419 bp, Homo sapiens
ggccgcgcgctggcctggaggctgacctggaggctcatctggaggccgagctgacccggcaggccttgcgcgggcaacatggcggcgcccggcgagcggggccgcttccacggcgggaacctcttcttcctgccggggggcgcgcgctccgagatgatggacgacctggcgaccgacgcgcggggccggggcgcggggcggagagacgcggccgcctcggcctcgacgccagcccaggcgccgacctccgattctcctgtcgccgaggacgcctcccggaggcggccgtgccgggcctgcgtcgacttcaagacgtggatgcggacgcagcagaagcgggacaccaagtttagggaggactgcccgccggatcgcgaggaactgggccgccacagctgggctgtcctccacaccctggccgcctactaccccgacctgcccaccccagaacagcagcaagacatggcccagttcatacatttattttctaagttttacccctgtgaggagtgtgctgaagacctaagaaaaaggctgtgcaggaaccacccagacacccgcacccgggcatgcttcacacagtggctgtgccacctgcacaatgaagtgaaccgcaagctgggcaagcctgacttcgactgctcaaaagtggatgagcgctggcgcgacggctggaaggatggctcctgtgactagagggtggtcagccagagctcatgggacagctagccaggcatggttggataggggcagggcactcattaaagtgcatcacagccagagcctgttgtgtctcagttgggtggtccccaggacactgcctgtggggacctgccctgcccctcttaggtttggagcagaagtggaggtgcccacagcaggtacccactggccccctcctcagtggagaccccaaggagctgcagctgaactgcaggggagggaaggaggagcagcctgggctgccccttgacattcaggatgtagcttcctgcccaccgcataccctggcgcctcactcctcacacgggaagacagcgggcctggctgggcatccctgtgcctgtccctggcggccaggccattgccttcccactatgcagccagggatgcccctgccccccatggctctgtgctgctcactttagggggctcaattctccactctgctcagtccctacagggaaagctcaggtcgggtctttctgagggtccaccagccatcctaccctctccctgcctggcacatgcctgccagcgttgtgtcatgcctgtccacaggggattcgtggggctcacttcatcagagtttgaagcccaaatgaaacgctgaagtgactgagaacctggcttcagtatattttctgctggggcttaataaagcagtagacagggcttgttccatccctctgtgctcagctgcatttcctgctggggtcctggttcctcaggagagagagaccacagggtgagagtgagccaggaacagcaaggacgttgattggttggggcaggggggccagagtagctgatgtaggagtactgggaggccagacggcacgaggtctccaaggccccagcaaagccatggcttctacccctagttcccctgacaggaagttcttggcgggtttggagccaggggatggcatggagtgatgtggctttgaagggtcctctggctgctgagctgggatgaggcaggtaagggtggaacaggaggggtggggaggaagccggggcagtcaccgagtgaccaccaagaggaagacccgccccacggcggggacagatgcggggtacgttaaagggagagccagagaactcatggggtgaggatggagtccgaggagactgctgggagccgccgtgtgggtcagagatggagaaggctgagtgcagcaaggtggggggtgactgggacccagcctttgggcctccccagccagagcagcccagcaacagtgtgtcctgtggtcataaaactccagggacctctatcctccaggagtctcagcctttccctgggcgcaggcccaccttggcatggccgcctcaggcctccatggagggagctgctatgtccccaccagattggccccgtgcggctgctggcttctgtagaggctgcccagaggggccaggtggcacaaataagagaggggagatggggggcagccaggagaggaggtgtcccttcctcgcccagacacagcgcgcttctctctggcctttcccgaggcctgtgagtgcctcaggaagcagctgggccctctgggaaggctgtgttcagcttaggaacataccgcctgtatctgctgtccctcccctgcccccctgccccccccaccgccttccctttttccctgtcttccttaaagtttcactcctgaataaaacttcactttgccttagaatc

SEQ ID NO: 420755 - DNA, 2330 bp, Homo sapiens
tcaggccctcccgattcatcataatctgggttataacctccaaacacatataggttggtattatctgccacacaacgatgtccacttcgtgctggtggaggtctgtggcctggcaggtgcggccgcctcggcctcgacgccagcccaggcgccgacctccgattctcctgtcgccgaggacgcctcccggaggcggccgtgccgggcctgcgtcgacttcaagacgtggatgcggacgcagcagaagcgggacaccaagtttagggaggactgcccgccggatcgcgaggaactgggccgccacagctgggctgtcctccacaccctggccgcctactaccccgacctgcccaccccagaacagcagcaagacatggcccagttcatacatttattttctaagttttacccctgtgaggagtgtgctgaagacctaagaaaaaggctgtgcaggaaccacccagacacccgcacccgggcatgcttcacacagtggctgtgccacctgcacaatgaagtgaaccgcaagctgggcaagcctgacttcgactgctcaaaagtggatgagcgctggcgcgacggctggaaggatggctcctgtgactagagggtggtcagccagagctcatgggacagctagccaggcatggttggataggggcagggcactcattaaagtgcatcacagccagagcctgttgtgtctcagttgggtggtccccaggacactgcctgtggggacctgccctgcccctcttaggtttggagcagaagtggaggtgcccacagcaggtacccactggccccctcctcagtggagaccccaaggagctgcagctgaactgcaggggagggaaggaggagcagcctgggctgccccttgacattcaggatgtagcttcctgcccaccgcataccctggcgcctcactcctcacacgggaagacagcgggcctggctgggcatccctgtgcctgtccctggcggccaggccattgccttcccactatgcagccagggatgcccctgccccccatggctctgtgctgctcactttagggggctcaattctccactctgctcagtccctacagggaaagctcaggtcgggtctttctgagggtccaccagccatcctaccctctccctgcctggcacatgcctgccagcgttgtgtcatgcctgtccacaggggattcgtggggctcacttcatcagagtttgaagcccaaatgaaacgctgaagtgactgagaacctggcttcagtatattttctgctggggcttaataaagcagtagacagggcttgttccatccctctgtgctcagctgcatttcctgctggggtcctggttcctcaggagagagagaccacagggtgagagtgagccaggaacagcaaggacgttgattggttggggcaggggggccagagtagctgatgtaggagtactgggaggccagacggcacgaggtctccaaggccccagcaaagccatggcttctacccctagttcccctgacaggaagttcttggcgggtttggagccaggggatggcatggagtgatgtggctttgaagggtcctctggctgctgagctgggatgaggcaggtaagggtggaacaggaggggtggggaggaagccggggcagtcaccgagtgaccaccaagaggaagacccgccccacggcggggacagatgcggggtacgttaaagggagagccagagaactcatggggtgaggatggagtccgaggagactgctgggagccgccgtgtgggtcagagatggagaaggctgagtgcagcaaggtggggggtgactgggacccagcctttgggcctccccagccagagcagcccagcaacagtgtgtcctgtggtcataaaactccagggacctctatcctccaggagtctcagcctttccctgggcgcaggcccaccttggcatggccgcctcaggcctccatggagggagctgctatgtccccaccagattggccccgtgcggctgctggcttctgtagaggctgcccagaggggccaggtggcacaaataagagaggggagatggggggcagccaggagaggaggtgtcccttcctcgcccagacacagcgcgcttctctctggcctttcccgaggcctgtgagtgcctcaggaagcagctgggccctctgggaaggctgtgttcagcttaggaacataccgcctgtatctgctgtccctcccctgcccccctgccccccccaccgccttccctttttccctgtcttccttaaagtttcactcctgaataaaacttcactttgccttagaatc

SEQ ID NO: 420756 - DNA, 780 bp, Homo sapiens
ggccgcgcgctggcctggaggctgacctggaggctcatctggaggccgagctgacccggcaggccttgcgcgggcaacatggcggcgcccggcgagcggggccgcttccacggcgggaacctcttcttcctgccggggggcgcgcgctccgagatgatggacgacctggcgaccgacgcgcggggccggggcgcggggcggagagacgcggccgcctcggcctcgacgccagcccaggcgccgacctccgattctcctgtcgccgaggacgcctcccggaggcggccgtgccgggcctgcgtcgacttcaagacgtggatgcggacgcagcagaagcgggacaccaagtttagggaggactgcccgccggatcgcgaggaactgggccgccacagctgggctgtcctccacaccctggccgcctactaccccgacctgcccaccccagaacagcagcaagacatggcccagttcatacatttattttctaagttttacccctgtgaggagtgtgctgaagacctaagaaaaaggctgtgcaggaaccacccagacacccgcacccgggcatgcttcacacagtggctgtgccacctgcacaatgaagtgaaccgcaagctgggcaagcctgacttcgactgctcaaaagtggatgagcgctggcgcgacggctggaaggatggctcctgtgactagagggtggtcagccagagctcatgggacagctagccaggcatggttggataggggcagggcactcattaaagtgcatcacagcca

SEQ ID NO: 420757 - DNA, 3610 bp, Homo sapiens
ggccgcgcgctggcctggaggctgacctggaggctcatctggaggccgagctgacccggcaggccttgcgcgggcaacatggcggcgcccggcgagcggggccgcttccacggcgggaacctcttcttcctgccggggggcgcgcgctccgagatgatggacgacctggcgaccgacgcgcggggccggggcgcggggcggagagacgcggccgcctcggcctcgacgccagcccaggcgccgacctccgattctcctgtcgccgaggacgcctcccggaggcggccgtgccgggcctgcgtcgacttcaagacgtggatgcggacgcagcagaaggtgcagttccctgcccgatttctcccagccccgcgcagcccctgtccccgcccccgcccaggtaccccggcagagcttcccagggttgcctgtccctgaaccttgccccccgggtaggcccggccttacagccttcatccgcgcgtgggttggatcgtctgcaggactttggccggagtccagtgggccaccggctgggccgtacagtggggagctttgggcgcctttgttcggagaatgaactcactctcggtcggcctgcttccgcagcgggacaccaagtttagggaggactgcccgccggatcgcgaggaactgggccgccacagctgggctgtcctccacaccctggccgcctactaccccgacctgcccaccccagaacagcagcaagacatggcccagttcatacatttattttctaagttttacccctgtgaggagtgtgctgaagacctaagaaaaaggtaagatgtgtttgcacgcagcagagctttgcactggagcctgggcctggggctcctggctgacgttatagcggggaacgtagagaaacggatgcagaggtggcagaagtttgctgaggagcagggacctccaacaggtgaggactggggctatctgagcctcctcctctcgtctcagaagccaagctgtcgggatctgctgctgggtactgctcctgccacagccacagggcttccaggaagggattccctgccttgtctggcactgaaggcggtttcccgcaagttagggaagactccactttgcctgacttctagagtaggacttctggttttaaaatcttggaaatcaactgcttttgctcccaagagccatctcttcctcactgagggatccaagagccagcactggcccttgcaggtgtttctaggccagatgtatagggtagagccgccattgttgctataagcctggtcagttagaatgaagtctcttgctgaactgacgcaccagggcctgccctcagatgctaagaaacaagtccagttttcagttacaaggctgtgcccagccccacccaggccacactctgcctgaggccagggacactggatgccgcttcctgggtgttaggagcttataaaattgccaggtctgtgctgtaatgtgttgccttgaggcctcgttggagtttgccaagctgtccaggtgggtgtttgcgcagccctgggagttcatcacacccggggagctgcagggtcagccctgttctgggagtgcctgtaccttggagcataagggcactcccaggtgtagttcacagcagtgccccagctctccttccttgacagcagacagggaactggcaggggcagtggagccgctgcgtcctctcattctttacctgctctccctacacagctgtgcaggaaccacccagacacccgcacccgggcatgcttcacacagtggctgtgccacctgcacaatgaagtgaaccgcaagctgggcaagcctgacttcgactgctcaaaagtggatgagcgctggcgcgacggctggaaggatggctcctgtgactagagggtggtcagccagagctcatgggacagctagccaggcatggttggataggggcagggcactcattaaagtgcatcacagccagagcctgttgtgtctcagttgggtggtccccaggacactgcctgtggggacctgccctgcccctcttaggtttggagcagaagtggaggtgcccacagcaggtacccactggccccctcctcagtggagaccccaaggagctgcagctgaactgcaggggagggaaggaggagcagcctgggctgccccttgacattcaggatgtagcttcctgcccaccgcataccctggcgcctcactcctcacacgggaagacagcgggcctggctgggcatccctgtgcctgtccctggcggccaggccattgccttcccactatgcagccagggatgcccctgccccccatggctctgtgctgctcactttagggggctcaattctccactctgctcagtccctacagggaaagctcaggtcgggtctttctgagggtccaccagccatcctaccctctccctgcctggcacatgcctgccagcgttgtgtcatgcctgtccacaggggattcgtggggctcacttcatcagagtttgaagcccaaatgaaacgctgaagtgactgagaacctggcttcagtatattttctgctggggcttaataaagcagtagacagggcttgttccatccctctgtgctcagctgcatttcctgctggggtcctggttcctcaggagagagagaccacagggtgagagtgagccaggaacagcaaggacgttgattggttggggcaggggggccagagtagctgatgtaggagtactgggaggccagacggcacgaggtctccaaggccccagcaaagccatggcttctacccctagttcccctgacaggaagttcttggcgggtttggagccaggggatggcatggagtgatgtggctttgaagggtcctctggctgctgagctgggatgaggcaggtaagggtggaacaggaggggtggggaggaagccggggcagtcaccgagtgaccaccaagaggaagacccgccccacggcggggacagatgcggggtacgttaaagggagagccagagaactcatggggtgaggatggagtccgaggagactgctgggagccgccgtgtgggtcagagatggagaaggctgagtgcagcaaggtggggggtgactgggacccagcctttgggcctccccagccagagcagcccagcaacagtgtgtcctgtggtcataaaactccagggacctctatcctccaggagtctcagcctttccctgggcgcaggcccaccttggcatggccgcctcaggcctccatggagggagctgctatgtccccaccagattggccccgtgcggctgctggcttctgtagaggctgcccagaggggccaggtggcacaaataagagaggggagatggggggcagccaggagaggaggtgtcccttcctcgcccagacacagcgcgcttctctctggcctttcccgaggcctgtgagtgcctcaggaagcagctgggccctctgggaaggctgtgttcagcttaggaacataccgcctgtatctgctgtccctcccctgcccccctgccccccccaccgccttccctttttccctgtcttccttaaagtttcactcctgaataaaacttcactttgccttagaatc

SEQ ID NO: 420758 - DNA, 1992 bp, Homo sapiens
actgaggaacacagcatataaccgggagatcagtggttcagctgcagtacatctattatctcaggtagtacccctgttgactgagtgtgctgaatatctaagaaaagctgtgcaggaaccacccagacacccgcacccgggcatgcttcacacagtggctgtgccacctgcacaatgaagtgaaccgcaagctgggcaagcctgacttcgactgctcaaaagtggatgagcgctggcgcgacggctggaaggatggctcctgtgactagagggtggtcagccagagctcatgggacagctagccaggcatggttggataggggcagggcactcattaaagtgcatcacagccagagcctgttgtgtctcagttgggtggtccccaggacactgcctgtggggacctgccctgcccctcttaggtttggagcagaagtggaggtgcccacagcaggtacccactggccccctcctcagtggagaccccaaggagctgcagctgaactgcaggggagggaaggaggagcagcctgggctgccccttgacattcaggatgtagcttcctgcccaccgcataccctggcgcctcactcctcacacgggaagacagcgggcctggctgggcatccctgtgcctgtccctggcggccaggccattgccttcccactatgcagccagggatgcccctgccccccatggctctgtgctgctcactttagggggctcaattctccactctgctcagtccctacagggaaagctcaggtcgggtctttctgagggtccaccagccatcctaccctctccctgcctggcacatgcctgccagcgttgtgtcatgcctgtccacaggggattcgtggggctcacttcatcagagtttgaagcccaaatgaaacgctgaagtgactgagaacctggcttcagtatattttctgctggggcttaataaagcagtagacagggcttgttccatccctctgtgctcagctgcatttcctgctggggtcctggttcctcaggagagagagaccacagggtgagagtgagccaggaacagcaaggacgttgattggttggggcaggggggccagagtagctgatgtaggagtactgggaggccagacggcacgaggtctccaaggccccagcaaagccatggcttctacccctagttcccctgacaggaagttcttggcgggtttggagccaggggatggcatggagtgatgtggctttgaagggtcctctggctgctgagctgggatgaggcaggtaagggtggaacaggaggggtggggaggaagccggggcagtcaccgagtgaccaccaagaggaagacccgccccacggcggggacagatgcggggtacgttaaagggagagccagagaactcatggggtgaggatggagtccgaggagactgctgggagccgccgtgtgggtcagagatggagaaggctgagtgcagcaaggtggggggtgactgggacccagcctttgggcctccccagccagagcagcccagcaacagtgtgtcctgtggtcataaaactccagggacctctatcctccaggagtctcagcctttccctgggcgcaggcccaccttggcatggccgcctcaggcctccatggagggagctgctatgtccccaccagattggccccgtgcggctgctggcttctgtagaggctgcccagaggggccaggtggcacaaataagagaggggagatggggggcagccaggagaggaggtgtcccttcctcgcccagacacagcgcgcttctctctggcctttcccgaggcctgtgagtgcctcaggaagcagctgggccctctgggaaggctgtgttcagcttaggaacataccgcctgtatctgctgtccctcccctgcccccctgccccccccaccgccttccctttttccctgtcttccttaaagtttcactcctgaataaaacttcactttgccttagaatc

SEQ ID NO: 420759 - DNA, 667 bp, Homo sapiens
cggatgttactgagcgtcgtcctggttttatttcgtacgggggcggcgcctgtgctagtggtggcttgtcctggcgtacaacctcttcttcctgccggggggcgcgcgctccgagatgatggacgacctggcgaccgacgcgcggggccggggcgcggggcggagagacgcggccgcctcggcctcgacgccagcccaggcgccgacctccgattctcctgtcgccgaggacgcctcccggaggcggccgtgccgggcctgcgtcgacttcaagacgtggatgcggacgcagcagaagaccctggccgcctactaccccgacctgcccaccccagaacagcagcaagacatggcccagttcatacatttattttctaagttttacccctgtgaggagtgtgctgaagacctaagaaaaaggctgtgcaggaaccacccagacacccgcacccgggcatgcttcacacagtggctgtgccacctgcacaatgaagtgaaccgcaagctgggcaagcctgacttcgactgctcaaaagtggatgagcgctggcgcgacggctggaaggatggctcctgtgactagagggtggtcagccagagctcatgggacagctagccaggcatggttggataggggcagggcactcattaaagtgcatcacagcca

SEQ ID NO: 420760 - DNA, 2381 bp, Homo sapiens
cggatgttactgagcgtcgtcctggttttatttcgtacgggggcggcgcctgtgctagtggtggcttgtcctggcgtacaacctcttcttcctgccggggggcgcgcgctccgagatgatggacgacctggcgaccgacgcgcggggccggggcgcggggcggagagacgcggccgcctcggcctcgacgccagcccaggcgccgacctccgattctcctgtcgccgaggacgcctcccggaggcggccgtgccgggcctgcgtcgacttcaagacgtggatgcggacgcagcagaagcgggacaccaagtttagggaggactgcccgccggatcgcgaggaactgggccgccacagctgggctgtcctccacaccctggccgcctactaccccgacctgcccaccccagaacagcagcaagacatggcccagttcatacatttattttctaagttttacccctgtgaggagtgtgctgaagacctaagaaaaaggctgtgcaggaaccacccagacacccgcacccgggcatgcttcacacagtggctgtgccacctgcacaatgaagtgaaccgcaagctgggcaagcctgacttcgactgctcaaaagtggatgagcgctggcgcgacggctggaaggatggctcctgtgactagagggtggtcagccagagctcatgggacagctagccaggcatggttggataggggcagggcactcattaaagtgcatcacagccagagcctgttgtgtctcagttgggtggtccccaggacactgcctgtggggacctgccctgcccctcttaggtttggagcagaagtggaggtgcccacagcaggtacccactggccccctcctcagtggagaccccaaggagctgcagctgaactgcaggggagggaaggaggagcagcctgggctgccccttgacattcaggatgtagcttcctgcccaccgcataccctggcgcctcactcctcacacgggaagacagcgggcctggctgggcatccctgtgcctgtccctggcggccaggccattgccttcccactatgcagccagggatgcccctgccccccatggctctgtgctgctcactttagggggctcaattctccactctgctcagtccctacagggaaagctcaggtcgggtctttctgagggtccaccagccatcctaccctctccctgcctggcacatgcctgccagcgttgtgtcatgcctgtccacaggggattcgtggggctcacttcatcagagtttgaagcccaaatgaaacgctgaagtgactgagaacctggcttcagtatattttctgctggggcttaataaagcagtagacagggcttgttccatccctctgtgctcagctgcatttcctgctggggtcctggttcctcaggagagagagaccacagggtgagagtgagccaggaacagcaaggacgttgattggttggggcaggggggccagagtagctgatgtaggagtactgggaggccagacggcacgaggtctccaaggccccagcaaagccatggcttctacccctagttcccctgacaggaagttcttggcgggtttggagccaggggatggcatggagtgatgtggctttgaagggtcctctggctgctgagctgggatgaggcaggtaagggtggaacaggaggggtggggaggaagccggggcagtcaccgagtgaccaccaagaggaagacccgccccacggcggggacagatgcggggtacgttaaagggagagccagagaactcatggggtgaggatggagtccgaggagactgctgggagccgccgtgtgggtcagagatggagaaggctgagtgcagcaaggtggggggtgactgggacccagcctttgggcctccccagccagagcagcccagcaacagtgtgtcctgtggtcataaaactccagggacctctatcctccaggagtctcagcctttccctgggcgcaggcccaccttggcatggccgcctcaggcctccatggagggagctgctatgtccccaccagattggccccgtgcggctgctggcttctgtagaggctgcccagaggggccaggtggcacaaataagagaggggagatggggggcagccaggagaggaggtgtcccttcctcgcccagacacagcgcgcttctctctggcctttcccgaggcctgtgagtgcctcaggaagcagctgggccctctgggaaggctgtgttcagcttaggaacataccgcctgtatctgctgtccctcccctgcccccctgccccccccaccgccttccctttttccctgtcttccttaaagtttcactcctgaataaaacttcactttgccttagaatc

SEQ ID NO: 420761 - DNA, 1077 bp, Homo sapiens
ggccgcgcgctggcctggaggctgacctggaggctcatctggaggccgagctgacccggcaggccttgcgcgggcaacatggcggcgcccggcgagcggggccgcttccacggcgggaacctcttcttcctgccggggggcgcgcgctccgagatgatggacgacctggcgaccgacgcgcggggccggggcgcggggcggagagacgcggccgcctcggcctcgacgccagcccaggcgccgacctccgattctcctgtcgccgaggacgcctcccggaggcggccgtgccgggcctgcgtcgacttcaagacgtggatgcggacgcagcagaagcgggacaccaagtttagggaggactgcccgccggatcgcgaggaactgggccgccacagctgggctgtcctccacaccctggccgcctactaccccgacctgcccaccccagaacagcagcaagacatggcccagttcatacatttattttctaagttttacccctgtgaggagtgtgctgaagacctaagaaaaaggctgtgcaggaaccacccagacacccgcacccgggcatgcttcacacagtggctgtgccacctgcacaatgaagtgaaccgcaagctgggcaagcctgacttcgactgctcaaaagtggatgagcgctggcgcgacggctggaaggatggctcctgtgactagagggtggtcagccagagctcatgggacagctagccaggcatggttggataggggcagggcactcattaaagtgcatcacagccagagcctgttgtgtctcagttgggtggtccccaggacactgcctgtggggacctgccctgcccctcttaggtttggagcagaagtggaggtgcccacagcaggtacccactggccccctcctcagtggagaccccaaggagctgcagctgaactgcaggggagggaaggaggagcagcctgggctgccccttgacattcaggatgtagcttcctgcccaccgcataccctggcgcctcactcctcacgcctcactccagcctgggcaatagagcgagactctgtctaaaaaaaaaaaa

SEQ ID NO: 420762 - DNA, 2689 bp, Homo sapiens
ggccgcgcgctggcctggaggctgacctggaggctcatctggaggccgagctgacccggcaggccttgcgcgggcaacatggcggcgcccggcgagcggggccgcttccacggcgggaacctcttcttcctgccggggggcgcgcgctccgagatgatggacgacctggcgaccgacgcgcggggccggggcgcggggcggagagacgcggccgcctcggcctcgacgccagcccaggcgccgacctccgattctcctgtcgccgaggacgcctcccggaggcggccgtgccgggcctgcgtcgacttcaagacgtggatgcggacgcagcagaaggtgcagttccctgcccgatttctcccagccccgcgcagcccctgtccccgcccccgcccaggtaccccggcagagcttcccagggttgcctgtccctgaaccttgccccccgggtaggcccggccttacagccttcatccgcgcgtgggttggatcgtctgcaggactttggccggagtccagtgggccaccggctgggccgtacagtggggagctttgggcgcctttgttcggagaatgaactcactctcggtcggcctgcttccgcagcgggacaccaagtttagggaggactgcccgccggatcgcgaggaactgggccgccacagctgggctgtcctccacaccctggccgcctactaccccgacctgcccaccccagaacagcagcaagacatggcccagttcatacatttattttctaagttttacccctgtgaggagtgtgctgaagacctaagaaaaaggctgtgcaggaaccacccagacacccgcacccgggcatgcttcacacagtggctgtgccacctgcacaatgaagtgaaccgcaagctgggcaagcctgacttcgactgctcaaaagtggatgagcgctggcgcgacggctggaaggatggctcctgtgactagagggtggtcagccagagctcatgggacagctagccaggcatggttggataggggcagggcactcattaaagtgcatcacagccagagcctgttgtgtctcagttgggtggtccccaggacactgcctgtggggacctgccctgcccctcttaggtttggagcagaagtggaggtgcccacagcaggtacccactggccccctcctcagtggagaccccaaggagctgcagctgaactgcaggggagggaaggaggagcagcctgggctgccccttgacattcaggatgtagcttcctgcccaccgcataccctggcgcctcactcctcacacgggaagacagcgggcctggctgggcatccctgtgcctgtccctggcggccaggccattgccttcccactatgcagccagggatgcccctgccccccatggctctgtgctgctcactttagggggctcaattctccactctgctcagtccctacagggaaagctcaggtcgggtctttctgagggtccaccagccatcctaccctctccctgcctggcacatgcctgccagcgttgtgtcatgcctgtccacaggggattcgtggggctcacttcatcagagtttgaagcccaaatgaaacgctgaagtgactgagaacctggcttcagtatattttctgctggggcttaataaagcagtagacagggcttgttccatccctctgtgctcagctgcatttcctgctggggtcctggttcctcaggagagagagaccacagggtgagagtgagccaggaacagcaaggacgttgattggttggggcaggggggccagagtagctgatgtaggagtactgggaggccagacggcacgaggtctccaaggccccagcaaagccatggcttctacccctagttcccctgacaggaagttcttggcgggtttggagccaggggatggcatggagtgatgtggctttgaagggtcctctggctgctgagctgggatgaggcaggtaagggtggaacaggaggggtggggaggaagccggggcagtcaccgagtgaccaccaagaggaagacccgccccacggcggggacagatgcggggtacgttaaagggagagccagagaactcatggggtgaggatggagtccgaggagactgctgggagccgccgtgtgggtcagagatggagaaggctgagtgcagcaaggtggggggtgactgggacccagcctttgggcctccccagccagagcagcccagcaacagtgtgtcctgtggtcataaaactccagggacctctatcctccaggagtctcagcctttccctgggcgcaggcccaccttggcatggccgcctcaggcctccatggagggagctgctatgtccccaccagattggccccgtgcggctgctggcttctgtagaggctgcccagaggggccaggtggcacaaataagagaggggagatggggggcagccaggagaggaggtgtcccttcctcgcccagacacagcgcgcttctctctggcctttcccgaggcctgtgagtgcctcaggaagcagctgggccctctgggaaggctgtgttcagcttaggaacataccgcctgtatctgctgtccctcccctgcccccctgccccccccaccgccttccctttttccctgtcttccttaaagtttcactcctgaataaaacttcactttgccttagaatc

SEQ ID NO: 420763 - DNA, 1971 bp, Homo sapiens
ggccgcgcgctggcctggaggctgacctggaggctcatctggaggccgagctgacccggcaggccttgcgcgggcaacatggcggcgcccggcgagcggggccgcttccacggcgggaacctcttcttcctgccggggggcgcgcgctccgagatgatggacgacctggcgaccgacgcgcggggccggggcgcggggcggagagacgcggccgcctcggcctcgacgccagcccaggcgccgacctccgattctcctgtcgccgaggacgcctcccggaggcggccgtgccgggcctgcgtcgacttcaagacgtggatgcggacgcagcagaaggtgcagttccctgcccgatttctcccagccccgcgcagcccctgtccccgcccccgcccaggtaccccggcagagcttcccagggttgcctgtccctgaaccttgccccccgggtaggcccggccttacagccttcatccgcgcgtgggttggatcgtctgcaggactttggccggagtccagtgggccaccggctgggccgtacagtggggagctttgggcgcctttgttcggagaatgaactcactctcggtcggcctgcttccgcagcgggacaccaagtttagggaggactgcccgccggatcgcgaggaactgggccgccacagctgggctgtcctccacaccctggccgcctactaccccgacctgcccaccccagaacagcagcaagacatggcccagttcatacatttattttctaagttttacccctgtgaggagtgtgctgaagacctaagaaaaaggtaagatgtgtttgcacgcagcagagctttgcactggagcctgggcctggggctcctggctgacgttatagcggggaacgtagagaaacggatgcagaggtggcagaagtttgctgaggagcagggacctccaacaggtgaggactggggctatctgagcctcctcctctcgtctcagaagccaagctgtcgggatctgctgctgggtactgctcctgccacagccacagggcttccaggaagggattccctgccttgtctggcactgaaggcggtttcccgcaagttagggaagactccactttgcctgacttctagagtaggacttctggttttaaaatcttggaaatcaactgcttttgctcccaagagccatctcttcctcactgagggatccaagagccagcactggcccttgcaggtgtttctaggccagatgtatagggtagagccgccattgttgctataagcctggtcagttagaatgaagtctcttgctgaactgacgcaccagggcctgccctcagatgctaagaaacaagtccagttttcagttacaaggctgtgcccagccccacccaggccacactctgcctgaggccagggacactggatgccgcttcctgggtgttaggagcttataaaattgccaggtctgtgctgtaatgtgttgccttgaggcctcgttggagtttgccaagctgtccaggtgggtgtttgcgcagccctgggagttcatcacacccggggagctgcagggtcagccctgttctgggagtgcctgtaccttggagcataagggcactcccaggtgtagttcacagcagtgccccagctctccttccttgacagcagacagggaactggcaggggcagtggagccgctgcgtcctctcattctttacctgctctccctacacagctgtgcaggaaccacccagacacccgcacccgggcatgcttcacacagtggctgtgccacctgcacaatgaagtgaaccgcaagctgggcaagcctgacttcgactgctcaaaagtggatgagcgctggcgcgacggctggaaggatggctcctgtgactagagggtggtcagccagagctcatgggacagctagccaggcatggttggataggggcagggcactcattaaagtgcatcacagcca

SEQ ID NO: 420764 - DNA, 718 bp, Homo sapiens
caagatcttcccactgggggaaactgggtaaagggtacagaggatccctctgtattatttcttgaaattgcatattagttaacaattacctcaaaagtttagttttgaaaatcataatgtatgtccctttcattttactgaaataaatattcagagcacttaataacacattttacagtccagctcatctctatggtatggtcacccatgataatatgaaaagaacctttgaaagttgtattttcagaagcaaaaataccaacaatactaggttatttgcctagtctcacttggattttaatgagcttgaaaaatgcacctgttgtattagatgtaatttttccttctttttttttccagcctttttctcattgttctcgtcatatcagacattatggctttgcattttttcttcttggtcaaggattatggcagctggcttgatattgggacaaggtatagtatatatggtcatgcattgcttaacaacagggataagttctgagaaatatattgttaggcaatttcttcactgtgcaaacatcacaaagtatattcacacaaacctagatggtgtagcctacaacacacctaggatatggtacagcctattgctcctagactataaacctgtacagcatgttatcatactgaatactgtaggcaattgtaacccaatggtaagtatttatgtatctacacatagaaaaggtatagt

SEQ ID NO: 420765 - DNA, 4864 bp, Homo sapiens
agcagcagcggccgggcaggtattgggggcgttccggaattgaggggtggttgtagtggtggcttaggaataccctcccggctatcgcttcagtgggtagaggggaccactgcccgagagctttaatggagctgggtcctgccttcgcgctgaggagccctcgttttcgagatcaggcctgaccgggataagctccagaaacagtattatgtctcagtcctgtgcaaagtgagatgagctgtagcctttggagacctataattttgaacatagatgttccttaaaagctaaatctttttgaacagatgatgataaacctggaagagattcaccaacaatagcaaattacacactggcttggaaagtactcccatgttccgtttgatcttggcaatttaatgctgttcttgaagactaattagttacactggatatgctgctgttctttactttgggattgcttatacattttgtgttcttcgcctccatctttgacatttattttacatctcctttggttcatggaatgactcctcagtttacaccattgcctcctccagcgagaagattagtgttgtttgttgctgatggccttcgagcagatgcactttacgaattagatgaaaatggaaactctagagcaccgtttattaggaatatcataatgcatgaaggcagctggggcatatctcatacacgtgtgccaacagaatctcggccaggtcatgtagctctgatagctgggttttatgaagatgtcagtgcagttgccaaaggatggaaggaaaatcctgtagagtttgattctctttttaatgaaagtaaatacacatggagctggggaagcccagatatcctgcctatgtttgccaaaggtgctagtggagaccacgtttatacatatagttatgatgctaaaagagaggattttggtgctcaagatgcaacaaaactggatacgtgggtttttgataatgttaaggacttctttcatcatgccagaaacaaccagtctttgttttctaaaataaatgaagagaaaatagtttttttcttacatttattaggaatagatacaaacggacatgctcatcgaccatcctcgagagactacaagcacaatattaaaaaagttgatgatggagttaaagaaatcgtgtctatgtttaaccacttctatggaaatgatgggaaaacaacatttatctttacctctgaccatggaatgacagactggggttcccatggggctggtcatccttcagagactttaactcctttagtcacttggggagctggaatcaagtatccccaaagagtatcagctcagcaatttgatgatgcatttttgaaagagtggagattggagaattggaagaggctagatgtcaatcaggctgatattgcaccattgatgacttcccttattggagttccctttcctcttaactcagtgggaatccttcctgtggattatcttaacaacactgatctcttcaaagcagagagcatgtttacaaatgcagtacagattcttgaacagttcaaggtgaaaatgactcagaagaaagaagttactttaccatttttgtttacaccatttaaactgctttctgattccaaacagttcaacattttaagaaaagcaagatcttatataaaacacagaaagtttgatgaagtggtctccctttgcaaggagctaattcatcttgcattgaaaggattgtcctattatcacacatatgacagattctttttgggcgtcaatgttgttattggttttgtgggatggatatcttatgcctctttgttgatcatcaagtctcattccaaccttataaaaggtgttagtaaagaagtgaagaaaccaagccatctcctgccttgtagttttgtagctattggcattttagtagcattttttctgctgattcaagcctgtccctggacatattatgtatatggtttgttgccactgccaatatggtatgcggttctaagagaatttcaagttattcaggaccttgttgtatcagtgttgacctatcctctgagccattttgttgggtacctgttagcctttaccctgggaattgaagtattagttctcagttttttctaccgctatatgcttaccgctggacttactgcctttgcagcttggccatttctcactcggctgtggactcgagcaaagatgacctcactgagttggactttcttctctttgctcctggcagtgttcccactgatgccggttgtaggtcgaaagccagacatctctctagtgatgggtgcaggcttgctggttcttctgttatccctgtgtgttgtaacatctctcatgaaaagaaaagatagctttataaaggaagagctattggtacatctgttacaggtgctgagcacagtgctctccatgtatgttgtgtatagcactcagagtagtctactcaggaagcaaggactgcctctcatgaatcaaattattagctgggcaacattagcctcttccttggttgtgccactactgagttctccagttctctttcagcgattgttcagcatacttctttcattgatgtcaacctacctacttctaagcacagggtatgaagctctctttccactagtgttgtcttgtttgatgtttgtctggataaacatagaacaagaaactctacaacaatctggtgtttgctgtaaacaaaagctcaccagtatccagttctcttataatactgatataactcagtttcgacagctatatctggatgacatccgtagggcctttttccttgttttcttcttagtgacagcattttttggaactggaaatatagcttctattaacagctttgatcttgcctctgtctattgctttctgactgtgttcagtccttttatgatgggagccctgatgatgtggaagattttaatcccctttgttcttgttatgtgtgcttttgaagcagttcagttgactactcagttatcgtcaaaaagcctttttctcattgttctcgtcatatcagacattatggctttgcattttttcttcttggtcaaggattatggcagctggcttgatattgggacaagcatcagccactatgtgattgtcatgtccatgaccatctttttggtgttcctcaatggcctggcccagctgctcacaacgaagaaactcagactatgtggcaaacccaaaagtcacttcatgtgaggttgctgaagcaccattcagcatctggatcctgattctccttttaagctaaaatctcatcaaggcttcaataagaagatggatatggatatatagtatattctactcctgtaaggaaaatggtatttggaattccgaattgacaggttatctggaacaaaggagcttcttttttttttctaggttttgcaggcatgaaatagtgattatatctgtggaaaagcataggaaggcattctcctttttcatttttttcctttggctggcagctcttcccagtgatgttgagagcacctgcagcaatctggtccccagtcgcacaacttcccacatacccagaggagagcatatgcctgtgggggcagtgctgatggcatccagagtcattgctgtggctgagctggaaggaaatcaccaggtgccaccgtcaatatttatcagctttcagcactggttttgttagacagtcagggtgtattatttcaagagcttcaataaaaaaagtgtttgcaggtatttgtcatatttctttagtatgcaataatgctatcttatcctttttagtgctatttctcaggttttctcagtcaaccagctagatgcatgtgatgcatgtctatccttcactttttttttttcatttctggattttcctgggatttctgacaacacaaaagtagaaagtgcttggtatttctgtcttatacataggaaaacatttaaaataaatagtttttaattgtaggctcaacatctgttaccccatagctttttcgtatattgtttctttccctttgaatttctttttactgtcatctattattttaacaggagttaaaataactcctgttaaactttctgacaatatcataagaattcatattaaaggtgttattctttctggttgtgagattctagcacaaaggcctaaaatcatcaaattagatttccatttgtaaacaaattctaatgggcaaaatatcttgagagcagtttttatatggattatccataaaatgacctttacatatccctgcagagttggccttttgcccgtggtgtgctagtagctttggctgatgctaagctttcctggtatgcgccctatttttaagaagtaattgcttttgaattaagttatagcattactaattcatgttaatgactaggaaaccctctgtaatttacaagatttttcaaattggtggggagtgaataaatacaatttaaaagagtcagaaatcagtttggcaaagtgtactttcttaatttctatttatgatgaagtatagtcataatttatttgtaatactactttatggtataccagtgaaagaactgtagtataaaaaagaggtattaatgttttatgaaatctcatgcatcagttcatagcataaaatctagctggacaactaagaagctatggtagcaaacagtgatgttgatggaatgagaatcatgaactttcatattacctcaaaggatttttttatcagtttttttcacacatcagaaaaaactgactgtataaacacttatcactgacctttttctatgtgtagttttgccttttatcttttcccaaatttttataaagagaaattaataaatattttattacaacattgtaaa

SEQ ID NO: 420766 - DNA, 4787 bp, Homo sapiens
agcagcagcggccgggcaggtattgggggcgttccggaattgaggggtggttgtagtggtggcttaggaataccctcccggctatcgcttcagtgggtagaggggaccactgcccgagagctttaatggagctgggtcctgccttcgcgctgaggagccctcgttttcgagatcaggcctgaccgggataagctccagaaacagtattatgtctcagtcctgtgcaaagtgagatgagctgtagcctttggagacctataattttgaacatagatgttccttaaaagctaaatctttttgaacagatgatgataaacctggaagctgttcttgaagactaattagttacactggatatgctgctgttctttactttgggattgcttatacattttgtgttcttcgcctccatctttgacatttattttacatctcctttggttcatggaatgactcctcagtttacaccattgcctcctccagcgagaagattagtgttgtttgttgctgatggccttcgagcagatgcactttacgaattagatgaaaatggaaactctagagcaccgtttattaggaatatcataatgcatgaaggcagctggggcatatctcatacacgtgtgccaacagaatctcggccaggtcatgtagctctgatagctgggttttatgaagatgtcagtgcagttgccaaaggatggaaggaaaatcctgtagagtttgattctctttttaatgaaagtaaatacacatggagctggggaagcccagatatcctgcctatgtttgccaaaggtgctagtggagaccacgtttatacatatagttatgatgctaaaagagaggattttggtgctcaagatgcaacaaaactggatacgtgggtttttgataatgttaaggacttctttcatcatgccagaaacaaccagtctttgttttctaaaataaatgaagagaaaatagtttttttcttacatttattaggaatagatacaaacggacatgctcatcgaccatcctcgagagactacaagcacaatattaaaaaagttgatgatggagttaaagaaatcgtgtctatgtttaaccacttctatggaaatgatgggaaaacaacatttatctttacctctgaccatggaatgacagactggggttcccatggggctggtcatccttcagagactttaactcctttagtcacttggggagctggaatcaagtatccccaaagagtatcagctcagcaatttgatgatgcatttttgaaagagtggagattggagaattggaagaggctagatgtcaatcaggctgatattgcaccattgatgacttcccttattggagttccctttcctcttaactcagtgggaatccttcctgtggattatcttaacaacactgatctcttcaaagcagagagcatgtttacaaatgcagtacagattcttgaacagttcaaggtgaaaatgactcagaagaaagaagttactttaccatttttgtttacaccatttaaactgctttctgattccaaacagttcaacattttaagaaaagcaagatcttatataaaacacagaaagtttgatgaagtggtctccctttgcaaggagctaattcatcttgcattgaaaggattgtcctattatcacacatatgacagattctttttgggcgtcaatgttgttattggttttgtgggatggatatcttatgcctctttgttgatcatcaagtctcattccaaccttataaaaggtgttagtaaagaagtgaagaaaccaagccatctcctgccttgtagttttgtagctattggcattttagtagcattttttctgctgattcaagcctgtccctggacatattatgtatatggtttgttgccactgccaatatggtatgcggttctaagagaatttcaagttattcaggaccttgttgtatcagtgttgacctatcctctgagccattttgttgggtacctgttagcctttaccctgggaattgaagtattagttctcagttttttctaccgctatatgcttaccgctggacttactgcctttgcagcttggccatttctcactcggctgtggactcgagcaaagatgacctcactgagttggactttcttctctttgctcctggcagtgttcccactgatgccggttgtaggtcgaaagccagacatctctctagtgatgggtgcaggcttgctggttcttctgttatccctgtgtgttgtaacatctctcatgaaaagaaaagatagctttataaaggaagagctattggtacatctgttacaggtgctgagcacagtgctctccatgtatgttgtgtatagcactcagagtagtctactcaggaagcaaggactgcctctcatgaatcaaattattagctgggcaacattagcctcttccttggttgtgccactactgagttctccagttctctttcagcgattgttcagcatacttctttcattgatgtcaacctacctacttctaagcacagggtatgaagctctctttccactagtgttgtcttgtttgatgtttgtctggataaacatagaacaagaaactctacaacaatctggtgtttgctgtaaacaaaagctcaccagtatccagttctcttataatactgatataactcagtttcgacagctatatctggatgacatccgtagggcctttttccttgttttcttcttagtgacagcattttttggaactggaaatatagcttctattaacagctttgatcttgcctctgtctattgctttctgactgtgttcagtccttttatgatgggagccctgatgatgtggaagattttaatcccctttgttcttgttatgtgtgcttttgaagcagttcagttgactactcagttatcgtcaaaaagcctttttctcattgttctcgtcatatcagacattatggctttgcattttttcttcttggtcaaggattatggcagctggcttgatattgggacaagcatcagccactatgtgattgtcatgtccatgaccatctttttggtgttcctcaatggcctggcccagctgctcacaacgaagaaactcagactatgtggcaaacccaaaagtcacttcatgtgaggttgctgaagcaccattcagcatctggatcctgattctccttttaagctaaaatctcatcaaggcttcaataagaagatggatatggatatatagtatattctactcctgtaaggaaaatggtatttggaattccgaattgacaggttatctggaacaaaggagcttcttttttttttctaggttttgcaggcatgaaatagtgattatatctgtggaaaagcataggaaggcattctcctttttcatttttttcctttggctggcagctcttcccagtgatgttgagagcacctgcagcaatctggtccccagtcgcacaacttcccacatacccagaggagagcatatgcctgtgggggcagtgctgatggcatccagagtcattgctgtggctgagctggaaggaaatcaccaggtgccaccgtcaatatttatcagctttcagcactggttttgttagacagtcagggtgtattatttcaagagcttcaataaaaaaagtgtttgcaggtatttgtcatatttctttagtatgcaataatgctatcttatcctttttagtgctatttctcaggttttctcagtcaaccagctagatgcatgtgatgcatgtctatccttcactttttttttttcatttctggattttcctgggatttctgacaacacaaaagtagaaagtgcttggtatttctgtcttatacataggaaaacatttaaaataaatagtttttaattgtaggctcaacatctgttaccccatagctttttcgtatattgtttctttccctttgaatttctttttactgtcatctattattttaacaggagttaaaataactcctgttaaactttctgacaatatcataagaattcatattaaaggtgttattctttctggttgtgagattctagcacaaaggcctaaaatcatcaaattagatttccatttgtaaacaaattctaatgggcaaaatatcttgagagcagtttttatatggattatccataaaatgacctttacatatccctgcagagttggccttttgcccgtggtgtgctagtagctttggctgatgctaagctttcctggtatgcgccctatttttaagaagtaattgcttttgaattaagttatagcattactaattcatgttaatgactaggaaaccctctgtaatttacaagatttttcaaattggtggggagtgaataaatacaatttaaaagagtcagaaatcagtttggcaaagtgtactttcttaatttctatttatgatgaagtatagtcataatttatttgtaatactactttatggtataccagtgaaagaactgtagtataaaaaagaggtattaatgttttatgaaatctcatgcatcagttcatagcataaaatctagctggacaactaagaagctatggtagcaaacagtgatgttgatggaatgagaatcatgaactttcatattacctcaaaggatttttttatcagtttttttcacacatcagaaaaaactgactgtataaacacttatcactgacctttttctatgtgtagttttgccttttatcttttcccaaatttttataaagagaaattaataaatattttattacaacattgtaaa

SEQ ID NO: 420767 - DNA, 4139 bp, Homo sapiens
agcagcagcggccgggcaggtattgggggcgttccggaattgaggggtggttgtagtggtggcttaggaataccctcccggctatcgcttcagtgggtagaggggaccactgcccgagagctttaatggagctgggtcctgccttcgcgctgaggagccctcgttttcgagatcaggcctgaccgggataagctccagaaacagtattatgtctcagtcctgtgcaaagtgagatgagctgtagcctttggagacctataattttgaacatagatgttccttaaaagctaaatctttttgaacagatgatgataaacctggaagagattcaccaacaatagcaaattacacactggcttggaaagtactcccatgttccgtttgatcttggcaatttaatgctgttcttgaagactaattagttacactggatatgctgctgttctttactttgggattgcttatacattttgtgttcttcgcctccatctttgacatttattttacatctcctttggttcatggaatgactcctcagtttacaccattgcctcctccagcgagaagattagtgttgtttgttgctgatggccttcgagcagatgcactttacgaattagatgaaaatggaaactctagagcaccgtttattaggaatatcataatgcatgaaggcagctggggcatatctcatacacgtgtgccaacagaatctcggccaggtcatgtagctctgatagctgggttttatgaagatgtcagtgcagttgccaaaggatggaaggaaaatcctgtagagtttgattctctttttaatgaaagtaaatacacatggagctggggaagcccagatatcctgcctatgtttgccaaaggtgctagtggagaccacgtttatacatatagttatgatgctaaaagagaggattttggtgctcaagatgcaacaaaactggatacgtgggtttttgataatgttaaggacttctttcatcatgccagaaacaaccagtctttgttttctaaaataaatgaagagaaaatagtttttttcttacatttattaggaatagatacaaacggacatgctcatcgaccatcctcgagagactacaagcacaatattaaaaaagttgatgatggagttaaagaaatcgtgtctatgtttaaccacttctatggaaatgatgggaaaacaacatttatctttacctctgaccatggaatgacagactggggttcccatggggctggtcatccttcagagactttaactcctttagtcacttggggagctggaatcaagtatccccaaagagtatcagctcagcaatttgatgatgcatttttgaaagagtggagattggagaattggaagaggctagatgtcaatcaggctgatattgcaccattgatgacttcccttattggagttccctttcctcttaactcagtgggaatccttcctgtggattatcttaacaacactgatctcttcaaagcagagagcatgtttacaaatgcagtacagattcttgaacagttcaaggtgaaaatgactcagaagaaagaagttactttaccatttttgtttacaccatttaaactgctttctgattccaaacagttcaacattttaagaaaagcaagatcttatataaaacacagaaagtttgatgaagtggtctccctttgcaaggagctaattcatcttgcattgaaaggattgtcctattatcacacatatgacagattctttttgggcgtcaatgttgttattggttttgtgggatggatatcttatgcctctttgttgatcatcaagtctcattccaaccttataaaaggtgttagtaaagaagtgaagaaaccaagccatctcctgccttgtagttttgtagctattggcattttagtagcattttttctgctgattcaagcctgtccctggacatattatgtatatggtttgttgccactgccaatatggtatgcggttctaagagaatttcaagttattcaggaccttgttgtatcagtgttgacctatcctctgagccattttgttgggtacctgttagcctttaccctgggaattgaagtattagttctcagttttttctaccgctatatgcttaccgctggacttactgcctttgcagcttggccatttctcactcggctgtggactcgagcaaagatgacctcactgagttggactttcttctctttgctcctggcagtgttcccactgatgccggttgtaggtcgaaagccagacatctctctagtgatgggtgcaggcttgctggttcttctgttatccctgtgtgttgtaacatctctcatgaaaagaaaagatagctttataaaggaagagctattggtacatctgttacaggtgctgagcacagtgctctccatgtatgttgtgtatagcactcagagtagtctactcaggaagcaaggactgcctctcatgaatcaaattattagctgggcaacattagcctcttccttggttgtgccactactgagttctccagttctctttcagcgattgttcagcatacttctttcattgatgtcaacctacctacttctaagcacagggtatgaagctctctttccactagtgttgtcttgtttgatgtttgtctggataaacatagaacaagaaactctacaacaatctggtgtttgctgtaaacaaaagctcaccagtatccagttctcttataatactgatataactcagtttcgacagctatatctggatgacatccgtagggcctttttccttgttttcttcttagtgacagcattttttggaactggaaatatagcttctattaacagctttgatcttgcctctgtctattgctttctgactgtgttcagtccttttatgatgggagccctgatgatgtggaagattttaatcccctttgttcttgttatgtgtgcttttgaagcagttcagttgactactcagttatcgtcaaaaagcctttttctcattgttctcgtcatatcagacattatggctttgcattttttcttcttggtcaaggattatggcagctggcttgatattgggacaagcatcagccactatgtgattgtcatgtccatgaccatctttttggtgttcctcaatggcctggcccagctgctcacaacgaagaaactcagactatgtggcaaacccaaaagtcacttcatgtgaggttgctgaagcaccattcagcatctggatcctgattctccttttaagctaaaatctcatcaaggcttcaataagaagatggatatggatatatagtatattctactcctgtaaggaaaatggtatttggaattccgaattgacaggttatctggaacaaaggagcttcttttttttttctaggttttgcaggcatgaaatagtgattatatctgtggaaaagcataggaaggcattctcctttttcatttttttcctttggctggcagctcttcccagtgatgttgagagcacctgcagcaatctggtccccagtcgcacaacttcccacatacccagaggagagcatatgcctgtgggggcagtgctgatggcatccagagtcattgctgtggctgagctggaaggaaatcaccaggtgccaccgtcaatatttatcagctttcagcactggttttgttagacagtcagggtgtattatttcaagagcttcaataaaaaaagtgtttgcaggtatttgtcatatttctttagtatgcaataatgctatcttatcctttttagtgctatttctcaggttttctcagtcaaccagctagatgcatgtgatgcatgtctatccttcactttttttttttcatttctggattttcctgggatttctgacaacacaaaagtagaaagtgcttggtatttctgtcttatacataggaaaacatttaaaataaatagtttttaattgtaggctcaacatctgttaccccatagctttttcgtatattgtttctttccctttgaatttctttttactgtcatctattattttaacaggagttaaaataactcctgttaaactttctgacaatatcataagaattcatattaaaggtgttattctttctggttgtga

SEQ ID NO: 420768 - DNA, 3244 bp, Homo sapiens
  misc_feature (51)..(51): n is a, c, g, or t
tatgctcctcaaataatagatttttttccttgtcttaatgcagctctttgnttaatcatctagtagtataaccattgaaagaaagtaataggttttctttactttataaaatctcttttaaaacctatcaattaccattggtttggaagtgtttcaatgttttgtttgatttttcagaaaccaagccatctcctgccttgtagttttgtagctattggcattttagtagcattttttctgctgattcaagcctgtccctggacatattatgtatatggtttgttgccactgccaatatggtatgcggttctaagagacgtttcgctcttgttgtccgggctggagtgcaatggcatgatctcagctgactgcaacctccacctcccaggttcaagctattctcctgtctcagcctcctgagtagctgggattacagatttcaagttattcaggaccttgttgtatcagtgttgacctatcctctgagccattttgttgggtacctgttagcctttaccctgggaattgaagtattagttctcagttttttctaccgctatatgcttaccgctggacttactgcctttgcagcttggccatttctcactcggctgtggactcgagcaaagatgacctcactgagttggactttcttctctttgctcctggcagtgttcccactgatgccggttgtaggtcgaaagccagacatctctctagtgatgggtgcaggcttgctggttcttctgttatccctgtgtgttgtaacatctctcatgaaaagaaaagatagctttataaaggaagagctattggtacatctgttacaggtgctgagcacagtgctctccatgtatgttgtgtatagcactcagagtagtctactcaggaagcaaggactgcctctcatgaatcaaattattagctgggcaacattagcctcttccttggttgtgccactactgagttctccagttctctttcagcgattgttcagcatacttctttcattgatgtcaacctacctacttctaagcacagggtatgaagctctctttccactagtgttgtcttgtttgatgtttgtctggataaacatagaacaagaaactctacaacaatctggtgtttgctgtaaacaaaagctcaccagtatccagttctcttataatactgatataactcagtttcgacagctatatctggatgacatccgtagggcctttttccttgttttcttcttagtgacagcattttttggaactggaaatatagcttctattaacagctttgatcttgcctctgtctattgctttctgactgtgttcagtccttttatgatgggagccctgatgatgtggaagcagttcagttgactactcagttatcgtcaaaaagcctttttctcattgttctcgtcatatcagacattatggctttgcattttttcttcttggtcaaggattatggcagctggcttgatattgggacaaggacacttaccatgaatggagcttgcaggactggaagttgttctggcatcagccactatgtgattgtcatgtccatgaccatctttttggtgttcctcaatggcctggcccagctgctcacaacgaagaaactcagactatgtggcaaacccaaaagtcacttcatgtgaggttgctgaagcaccattcagcatctggatcctgattctccttttaagctaaaatctcatcaaggcttcaataagaagatggatatggatatatagtatattctactcctgtaaggaaaatggtatttggaattccgaattgacaggttatctggaacaaaggagcttcttttttttttctaggttttgcaggcatgaaatagtgattatatctgtggaaaagcataggaaggcattctcctttttcatttttttcctttggctggcagctcttcccagtgatgttgagagcacctgcagcaatctggtccccagtcgcacaacttcccacatacccagaggagagcatatgcctgtgggggcagtgctgatggcatccagagtcattgctgtggctgagctggaaggaaatcaccaggtgccaccgtcaatatttatcagctttcagcactggttttgttagacagtcagggtgtattatttcaagagcttcaataaaatcctttttagtgctatttctcaggttttctcagtcaaccagctagatgcatgtgatgcatgtctatccttcactttttttttttcatttctggattttcctgggatttctgacaacacaaaagtagaaagtgcttggtatttctgtcttatacataggaaaacatttaaaataaatagtttttaattgtaggctcaacatctgttaccccatagctttttcgtatattgtttctttccctttgaatttctttttactgtcatctattattttaacaggagttaaaataactcctgttaaactttctgacaatatcataagaattcatattaaaggtgttattctttctggttgtgagattctagcacaaaggcctaaaatcatcaaattagatttccatttgtaaacaaattctaatgggcaaaatatcttgagagcagtttttatatggattatccataaaatgacctttacatatccctgcagagttggccttttgcccgtggtgtgctagtagctttggctgatgctaagctttcctggtatgcgccctatttttaagaagtaattgcttttgaattaagttatagcattactaattcatgttaatgactaggaaaccctctgtaatttacaagatttttcaaattggtggggagtgaataaatacaatttaaaagagtcagaaatcagtttggcaaagtgtactttcttaatttctatttatgatgaagtatagtcataatttatttgtaatactactttatggtataccagtgaaagaactgtagtataaaaaagaggtattaatgttttatgaaatctcatgcatcagttcatagcataaaatctagctggacaactaagaagctatggtagcaaacagtgatgttgatggaatgagaatcatgaactttcatattacctcaaaggatttttttatcagtttttttcacacatcagaaaaaactgactgtataaacacttatcactgacctttttctatgtgtagttttgccttttatcttttcccaaatttttataaagagaaattaataaatattttattacaacattgtaaa

SEQ ID NO: 420769 - DNA, 2229 bp, Homo sapiens
  misc_feature (66)..(66): n is a, c, g, or t
  misc_feature (69)..(69): n is a, c, g, or t
  misc_feature (81)..(81): n is a, c, g, or t
taacctacccaacagccacaaaaatagacccgaaagcaaaagcggtagactgcaacgactctctanttnccaccgctacanctcaccagtatccagttctcttataatactgatataactcagtttcgacagctatatctggatgacatccgtagggcctttttccttgttttcttcttagtgacagcattttttggaactggaaatatagcttctattaacagctttgatcttgcctctgtctattgctttctgactgtgttcagtccttttatgatgggagccctgatgatgtggaagattttaatcccctttgttcttgttatgtgtgcttttgaagcagttcagttgactactcagttatcgtcaaaaagcctttttctcattgttctcgtcatatcagacattatggctttgcattttttcttcttggtcaaggattatggcagctggcttgatattgggacaagcatcagccactatgtgattgtcatgtccatgaccatctttttggtgttcctcaatggcctggcccagctgctcacaacgaagaaactcagactatgtggcaaacccaaaagtcacttcatgtgaggttgctgaagcaccattcagcatctggatcctgattctccttttaagctaaaatctcatcaaggcttcaataagaagatggatatggatatatagtatattctactcctgtaaggaaaatggtatttggaattccgaattgacaggttatctggaacaaaggagcttcttttttttttctaggttttgcaggcatgaaatagtgattatatctgtggaaaagcataggaaggcattctcctttttcatttttttcctttggctggcagctcttcccagtgatgttgagagcacctgcagcaatctggtccccagtcgcacaacttcccacatacccagaggagagcatatgcctgtgggggcagtgctgatggcatccagagtcattgctgtggctgagctggaaggaaatcaccaggtgccaccgtcaatatttatcagctttcagcactggttttgttagacagtcagggtgtattatttcaagagcttcaataaaaaaagtgtttgcaggtatttgtcatatttctttagtatgcaataatgctatcttatcctttttagtgctatttctcaggttttctcagtcaaccagctagatgcatgtgatgcatgtctatccttcactttttttttttcatttctggattttcctgggatttctgacaacacaaaagtagaaagtgcttggtatttctgtcttatacataggaaaacatttaaaataaatagtttttaattgtaggctcaacatctgttaccccatagctttttcgtatattgtttctttccctttgaatttctttttactgtcatctattattttaacaggagttaaaataactcctgttaaactttctgacaatatcataagaattcatattaaaggtgttattctttctggttgtgagattctagcacaaaggcctaaaatcatcaaattagatttccatttgtaaacaaattctaatgggcaaaatatcttgagagcagtttttatatggattatccataaaatgacctttacatatccctgcagagttggccttttgcccgtggtgtgctagtagctttggctgatgctaagctttcctggtatgcgccctatttttaagaagtaattgcttttgaattaagttatagcattactaattcatgttaatgactaggaaaccctctgtaatttacaagatttttcaaattggtggggagtgaataaatacaatttaaaagagtcagaaatcagtttggcaaagtgtactttcttaatttctatttatgatgaagtatagtcataatttatttgtaatactactttatggtataccagtgaaagaactgtagtataaaaaagaggtattaatgttttatgaaatctcatgcatcagttcatagcataaaatctagctggacaactaagaagctatggtagcaaacagtgatgttgatggaatgagaatcatgaactttcatattacctcaaaggatttttttatcagtttttttcacacatcagaaaaaactgactgtataaacacttatcactgacctttttctatgtgtagttttgccttttatcttttcccaaatttttataaagagaaattaataaatattttattacaacattgtaaa

SEQ ID NO: 420770 - DNA, 1991 bp, Homo sapiens
agcagcagcggccgggcaggtattgggggcgttccggaattgaggggtggttgtagtggtggcttaggaataccctcccggctatcgcttcagtgggtagaggggaccactgcccgagagctttaatggagctgggtcctgccttcgcgctgaggagccctcgttttcgagatcaggcctgaccgggataagctccagaaacagtattatgtctcagtcctgtgcaaagtgagatgagctgtagcctttggagacctataattttgaacatagatgttccttaaaagctaaatctttttgaacagatgatgataaacctggaagagattcaccaacaatagcaaattacacactggcttggaaagtactcccatgttccgtttgatcttggcaatttaatgctgttcttgaagactaattagttacactggatatgctgctgttctttactttgggattgcttatacattttgtgttcttcgcctccatctttgacatttattttacatctcctttggttcatggaatgactcctcagtttacaccattgcctcctccagcgagaagattagtgttgtttgttgctgatggccttcgagcagatgcactttacgaattagatgaaaatggaaactctagagcaccgtttattaggaatatcataatgcatgaaggcagctggggcatatctcatacacgtgtgccaacagaatctcggccaggtcatgtagctctgatagctgggttttatgaagatgtcagtgcagttgccaaaggatggaaggaaaatcctgtagagtttgattctctttttaatgaaagtaaatacacatggagctggggaagcccagatatcctgcctatgtttgccaaaggtgctagtggagaccacgtttatacatatagttatgatgctaaaagagaggattttggtgctcaagatgcaacaaaactggatacgtgggtttttgataatgttaaggacttctttcatcatgccagaaacaaccagtctttgttttctaaaataaatgaagagaaaatagtttttttcttacatttattaggaatagatacaaacggacatgctcatcgaccatcctcgagagactacaagcacaatattaaaaaagttgatgatggagttaaagaaatcgtgtctatgtttaaccacttctatggaaatgatgggaaaacaacatttatctttacctctgaccatggaatgacagactggggttcccatggggctggtcatccttcagagactttaactcctttagtcacttggggagctggaatcaagtatccccaaagagtatcagctcagcaatttgatgatgcatttttgaaagagtggagattggagaattggaagaggctagatgtcaatcaggctgatattgcaccattgatgacttcccttattggagttccctttcctcttaactcagtgggaatccttcctgtggattatcttaacaacactgatctcttcaaagcagagagcatgtttacaaatgcagtacagattcttgaacagttcaaggtgaaaatgactcagaagaaagaagttactttaccatttttgtttacaccatttaactgtgctggcagctgattagatgatgcccacttgagggtgggtctgcttctcccactccactgactcaaaggttaatctcctttggcaacaatgtcacagacatacccaggaacaatactttacatccttcaatcaagttgacactcaatattaaccatcacagtaggcaaagaagagagctgactttggtgagcagcagattttgctgtcccaggtccaggaagatgtgttttccttgcatcaggaaagggaagatctagatcacagacctggctctgcactactgactgcatatgtgggcttgcatctttgaggttcacattcaattagcaaggattttgctattgaccaattaaatagaaattgttttatctatgaatcttaa

SEQ ID NO: 420771 - DNA, 414 bp, Homo sapiens
ttttgtagctattggcattttagtagcattttttctgctgattcaagcctgtccctggacatattatgtatatggtttgttgccactgccaatatggtatgcggttctaagagagtaagtaatgcatcttgctgccttgttttttcacttcattgacagttaaatctgtatttaaaatgcagtagatttctgtaccataagtcatcaaatatatttataatactgtactttcaaacctccagtccctctcacttcatttataactgcataaatgttgagtaggatataaacattctttctgttgtacttttcccttttgacttcatctttatttttctgaagtggcagtgttcacttctttgtgtatcttttatagaaaaaaaatggaataaaagtaacgattaatattgatca

SEQ ID NO: 420772 - DNA, 4715 bp, Homo sapiens
gaattcggcacgagagccgggtgggtagaggggaccactgcccgagagctttaatggagctgggtcctgccttcgcgctgaggagccctcgttttcgagatcaggcctgaccgggataagctccagaaacagtattatgtctcagtcctgtgcaaagtgagatgagctgtagcctttggagacctataattttgaacatagatgttccttaaaagctaaatctttttgaacagatgatgataaacctggaagctgttcttgaagactaattagttacactggatatgctgctgttctttactttgggattgcttatacattttgtgttcttcgcctccatctttgacatttattttacatctcctttggttcatggaatgactcctcagtttacaccattgcctcctccagcgagaagattagtgttgtttgttgctgatggccttcgagcagatgcactttacgaattagatgaaaatggaaactctagagcaccgtttattaggaatatcataatgcatgaaggcagctggggcatatctcatacacgtgtgccaacagaatctcggccaggtcatgtagctctgatagctgggttttatgaagatgtcagtgcagttgccaaaggatggaaggaaaatcctgtagagtttgattctctttttaatgaaagtaaatacacatggagctggggaagcccagatatcctgcctatgtttgccaaaggtgctagtggagaccacgtttatacatatagttatgatgctaaaagagaggattttggtgctcaagatgcaacaaaactggatacgtgggtttttgataatgttaaggacttctttcatcatgccagaaacaaccagtctttgttttctaaaataaatgaagagaaaatagtttttttcttacatttattaggaatagatacaaacggacatgctcatcgaccatcctcgagagactacaagcacaatattaaaaaagttgatgatggagttaaagaaatcgtgtctatgtttaaccacttctatggaaatgatgggaaaacaacatttatctttacctctgaccatggaatgacagactggggttcccatggggctggtcatccttcagagactttaactcctttagtcacttggggagctggaatcaagtatccccaaagagtatcagctcagcaatttgatgatgcatttttgaaagagtggagattggagaattggaagaggctagatgtcaatcaggctgatattgcaccattgatgacttcccttattggagttccctttcctcttaactcagtgggaatccttcctgtggattatcttaacaacactgatctcttcaaagcagagagcatgtttacaaatgcagtacagattcttgaacagttcaaggtgaaaatgactcagaagaaagaagttactttaccatttttgtttacaccatttaaactgctttctgattccaaacagttcaacattttaagaaaagcaagatcttatataaaacacagaaagtttgatgaagtggtctccctttgcaaggagctaattcatcttgcattgaaaggattgtcctattatcacacatatgacagattctttttgggcgtcaatgttgttattggttttgtgggatggatatcttatgcctctttgttgatcatcaagtctcattccaaccttataaaaggtgttagtaaagaagtgaagaaaccaagccatctcctgccttgtagttttgtagctattggcattttagtagcattttttctgctgattcaagcctgtccctggacatattatgtatatggtttgttgccactgccaatatggtatgcggttctaagagaatttcaagttattcaggaccttgttgtatcagtgttgacctatcctctgagccattttgttgggtacctgttagcctttaccctgggaattgaagtattagttctcagttttttctaccgctatatgcttaccgctggacttactgcctttgcagcttggccatttctcactcggctgtggactcgagcaaagatgacctcactgagttggactttcttctctttgctcctggcagtgttcccactgatgccggttgtaggtcgaaagccagacatctctctagtgatgggtgcaggcttgctggttcttctgttatccctgtgtgttgtaacatctctcatgaaaagaaaagatagctttataaaggaagagctattggtacatctgttacaggtgctgagcacagtgctctccatgtatgttgtgtatagcactcagagtagtctactcaggaagcaaggactgcctctcatgaatcaaattattagctgggcaacattagcctcttccttggttgtgccactactgagttctccagttctctttcagcgattgttcagcatacttctttcattgatgtcaacctacctacttctaagcacagggtatgaagctctctttccactagtgttgtcttgtttgatgtttgtctggataaacatagaacaagaaactctacaacaatctggtgtttgctgtaaacaaaagctcaccagtatccagttctcttataatactgatataactcagtttcgacagctatatctggatgacatccgtagggcctttttccttgttttcttcttagtgacagcattttttggaactggaaatatagcttctattaacagctttgatcttgcctctgtctattgctttctgactgtgttcagtccttttatgatgggagccctgatgatgtggaagattttaatcccctttgttcttgttatgtgtgcttttgaagcagttcagttgactactcagttatcgtcaaaaagcctttttctcattgttctcgtcatatcagacattatggctttgcattttttcttcttggtcaaggattatggcagctggcttgatattgggacaagcatcagccactatgtgattgtcatgtccatgaccatctttttggtgttcctcaatggcctggcccagctgctcacaacgaagaaactcagactatgtggcaaacccaaaagtcacttcatgtgaggttgctgaagcaccattcagcatctggatcctgattctccttttaagctaaaatctcatcaaggcttcaataagaagatggatatggatatatagtatattctactcctgtaaggaaaatggtatttggaattccgaattgacaggttatctggaacaaaggagcttcttttttttttctaggttttgcaggcatgaaatagtgattatatctgtggaaaagcataggaaggcattctcctttttcatttttttcctttggctggcagctcttcccagtgatgttgagagcacctgcagcaatctggtccccagtcgcacaacttcccacatacccagaggagagcatatgcctgtgggggcagtgctgatggcatccagagtcattgctgtggctgagctggaaggaaatcaccaggtgccaccgtcaatatttatcagctttcagcactggttttgttagacagtcagggtgtattatttcaagagcttcaataaaaaaagtgtttgcaggtatttgtcatatttctttagtatgcaataatgctatcttatcctttttagtgctatttctcaggttttctcagtcaaccagctagatgcatgtgatgcatgtctatccttcactttttttttttcatttctggattttcctgggatttctgacaacacaaaagtagaaagtgcttggtatttctgtcttatacataggaaaacatttaaaataaatagtttttaattgtaggctcaacatctgttaccccatagctttttcgtatattgtttctttccctttgaatttctttttactgtcatctattattttaacaggagttaaaataactcctgttaaactttctgacaatatcataagaattcatattaaaggtgttattctttctggttgtgagattctagcacaaaggcctaaaatcatcaaattagatttccatttgtaaacaaattctaatgggcaaaatatcttgagagcagtttttatatggattatccataaaatgacctttacatatccctgcagagttggccttttgcccgtggtgtgctagtagctttggctgatgctaagctttcctggtatgcgccctatttttaagaagtaattgcttttgaattaagttatagcattactaattcatgttaatgactaggaaaccctctgtaatttacaagatttttcaaattggtggggagtgaataaatacaatttaaaagagtcagaaatcagtttggcaaagtgtactttcttaatttctatttatgatgaagtatagtcataatttatttgtaatactactttatggtataccagtgaaagaactgtagtataaaaaagaggtattaatgttttatgaaatctcatgcatcagttcatagcataaaatctagctggacaactaagaagctatggtagcaaacagtgatgttgatggaatgagaatcatgaactttcatattacctcaaaggatttttttatcagtttttttcacacatcagaaaaaactgactgtataaacacttatcactgacctttttctatgtgtagttttgccttttatcttttcccaaatttttataaagagaaattaataaatattttattacaacattgtaaa

SEQ ID NO: 420773 - DNA, 5006 bp, Homo sapiens
agcagcagcggccgggcaggtattgggggcgttccggaattgaggggtggttgtagtggtggcttaggaataccctcccggctatcgcttcagtgggtagaggggaccactgcccgagagctttaatggagctgggtcctgccttcgcgctgaggagccctcgttttcgagatcaggcctgaccgggataagctccagaaacagtattatgtctcagtcctgtgcaaagtgagatgagctgtagcctttggagacctataattttgaacatagatgttccttaaaagctaaatctttttgaacagatgatgataaacctggaaggttattttgccatcctttccttccatgatgtgattcttcaggccaagaagaaaaagatgtgtctgtagctaaaattacctcatccttggtgtttttcagcctaggatcactatatgtagctaatgccgttacattacaactaagacaagttccaatacttttttttttctcctcgatctgcagagattcaccaacaatagcaaattacacactggcttgctgttcttgaagactaattagttacactggatatgctgctgttctttactttgggattgcttatacattttgtgttcttcgcctccatctttgacatttattttacatctcctttggttcatggaatgactcctcagtttacaccattgcctcctccagcgagaagattagtgttgtttgttgctgatggccttcgagcagatgcactttacgaattagatgaaaatggaaactctagagcaccgtttattaggaatatcataatgcatgaaggcagctggggcatatctcatacacgtgtgccaacagaatctcggccaggtcatgtagctctgatagctgggttttatgaagatgtcagtgcagttgccaaaggatggaaggaaaatcctgtagagtttgattctctttttaatgaaagtaaatacacatggagctggggaagcccagatatcctgcctatgtttgccaaaggtgctagtggagaccacgtttatacatatagttatgatgctaaaagagaggattttggtgctcaagatgcaacaaaactggatacgtgggtttttgataatgttaaggacttctttcatcatgccagaaacaaccagtctttgttttctaaaataaatgaagagaaaatagtttttttcttacatttattaggaatagatacaaacggacatgctcatcgaccatcctcgagagactacaagcacaatattaaaaaagttgatgatggagttaaagaaatcgtgtctatgtttaaccacttctatggaaatgatgggaaaacaacatttatctttacctctgaccatggaatgacagactggggttcccatggggctggtcatccttcagagactttaactcctttagtcacttggggagctggaatcaagtatccccaaagagtatcagctcagcaatttgatgatgcatttttgaaagagtggagattggagaattggaagaggctagatgtcaatcaggctgatattgcaccattgatgacttcccttattggagttccctttcctcttaactcagtgggaatccttcctgtggattatcttaacaacactgatctcttcaaagcagagagcatgtttacaaatgcagtacagattcttgaacagttcaaggtgaaaatgactcagaagaaagaagttactttaccatttttgtttacaccatttaaactgctttctgattccaaacagttcaacattttaagaaaagcaagatcttatataaaacacagaaagtttgatgaagtggtctccctttgcaaggagctaattcatcttgcattgaaaggattgtcctattatcacacatatgacagattctttttgggcgtcaatgttgttattggttttgtgggatggatatcttatgcctctttgttgatcatcaagtctcattccaaccttataaaaggtgttagtaaagaagtgaagaaaccaagccatctcctgccttgtagttttgtagctattggcattttagtagcattttttctgctgattcaagcctgtccctggacatattatgtatatggtttgttgccactgccaatatggtatgcggttctaagagaatttcaagttattcaggaccttgttgtatcagtgttgacctatcctctgagccattttgttgggtacctgttagcctttaccctgggaattgaagtattagttctcagttttttctaccgctatatgcttaccgctggacttactgcctttgcagcttggccatttctcactcggctgtggactcgagcaaagatgacctcactgagttggactttcttctctttgctcctggcagtgttcccactgatgccggttgtaggtcgaaagccagacatctctctagtgatgggtgcaggcttgctggttcttctgttatccctgtgtgttgtaacatctctcatgaaaagaaaagatagctttataaaggaagagctattggtacatctgttacaggtgctgagcacagtgctctccatgtatgttgtgtatagcactcagagtagtctactcaggaagcaaggactgcctctcatgaatcaaattattagctgggcaacattagcctcttccttggttgtgccactactgagttctccagttctctttcagcgattgttcagcatacttctttcattgatgtcaacctacctacttctaagcacagggtatgaagctctctttccactagtgttgtcttgtttgatgtttgtctggataaacatagaacaagaaactctacaacaatctggtgtttgctgtaaacaaaagctcaccagtatccagttctcttataatactgatataactcagtttcgacagctatatctggatgacatccgtagggcctttttccttgttttcttcttagtgacagcattttttggaactggaaatatagcttctattaacagctttgatcttgcctctgtctattgctttctgactgtgttcagtccttttatgatgggagccctgatgatgtggaagattttaatcccctttgttcttgttatgtgtgcttttgaagcagttcagttgactactcagttatcgtcaaaaagcctttttctcattgttctcgtcatatcagacattatggctttgcattttttcttcttggtcaaggattatggcagctggcttgatattgggacaagcatcagccactatgtgattgtcatgtccatgaccatctttttggtgttcctcaatggcctggcccagctgctcacaacgaagaaactcagactatgtggcaaacccaaaagtcacttcatgtgaggttgctgaagcaccattcagcatctggatcctgattctccttttaagctaaaatctcatcaaggcttcaataagaagatggatatggatatatagtatattctactcctgtaaggaaaatggtatttggaattccgaattgacaggttatctggaacaaaggagcttcttttttttttctaggttttgcaggcatgaaatagtgattatatctgtggaaaagcataggaaggcattctcctttttcatttttttcctttggctggcagctcttcccagtgatgttgagagcacctgcagcaatctggtccccagtcgcacaacttcccacatacccagaggagagcatatgcctgtgggggcagtgctgatggcatccagagtcattgctgtggctgagctggaaggaaatcaccaggtgccaccgtcaatatttatcagctttcagcactggttttgttagacagtcagggtgtattatttcaagagcttcaataaaaaaagtgtttgcaggtatttgtcatatttctttagtatgcaataatgctatcttatcctttttagtgctatttctcaggttttctcagtcaaccagctagatgcatgtgatgcatgtctatccttcactttttttttttcatttctggattttcctgggatttctgacaacacaaaagtagaaagtgcttggtatttctgtcttatacataggaaaacatttaaaataaatagtttttaattgtaggctcaacatctgttaccccatagctttttcgtatattgtttctttccctttgaatttctttttactgtcatctattattttaacaggagttaaaataactcctgttaaactttctgacaatatcataagaattcatattaaaggtgttattctttctggttgtgagattctagcacaaaggcctaaaatcatcaaattagatttccatttgtaaacaaattctaatgggcaaaatatcttgagagcagtttttatatggattatccataaaatgacctttacatatccctgcagagttggccttttgcccgtggtgtgctagtagctttggctgatgctaagctttcctggtatgcgccctatttttaagaagtaattgcttttgaattaagttatagcattactaattcatgttaatgactaggaaaccctctgtaatttacaagatttttcaaattggtggggagtgaataaatacaatttaaaagagtcagaaatcagtttggcaaagtgtactttcttaatttctatttatgatgaagtatagtcataatttatttgtaatactactttatggtataccagtgaaagaactgtagtataaaaaagaggtattaatgttttatgaaatctcatgcatcagttcatagcataaaatctagctggacaactaagaagctatggtagcaaacagtgatgttgatggaatgagaatcatgaactttcatattacctcaaaggatttttttatcagtttttttcacacatcagaaaaaactgactgtataaacacttatcactgacctttttctatgtgtagttttgccttttatcttttcccaaatttttataaagagaaattaataaatattttattacaacattgtaaa

SEQ ID NO: 420774 - DNA, 4738 bp, Homo sapiens
agcagcagcggccgggcaggtattgggggcgttccggaattgaggggtggttgtagtggtggcttaggaataccctcccggctatcgcttcagtgggtagaggggaccactgcccgagagctttaatggagctgggtcctgccttcgcgctgaggagccctcgttttcgagatcaggcctgaccgggataagctccagagattcaccaacaatagcaaattacacactggcttggaaagtactcccatgttccgtttgatcttggcaatttaatgctgttcttgaagactaattagttacactggatatgctgctgttctttactttgggattgcttatacattttgtgttcttcgcctccatctttgacatttattttacatctcctttggttcatggaatgactcctcagtttacaccattgcctcctccagcgagaagattagtgttgtttgttgctgatggccttcgagcagatgcactttacgaattagatgaaaatggaaactctagagcaccgtttattaggaatatcataatgcatgaaggcagctggggcatatctcatacacgtgtgccaacagaatctcggccaggtcatgtagctctgatagctgggttttatgaagatgtcagtgcagttgccaaaggatggaaggaaaatcctgtagagtttgattctctttttaatgaaagtaaatacacatggagctggggaagcccagatatcctgcctatgtttgccaaaggtgctagtggagaccacgtttatacatatagttatgatgctaaaagagaggattttggtgctcaagatgcaacaaaactggatacgtgggtttttgataatgttaaggacttctttcatcatgccagaaacaaccagtctttgttttctaaaataaatgaagagaaaatagtttttttcttacatttattaggaatagatacaaacggacatgctcatcgaccatcctcgagagactacaagcacaatattaaaaaagttgatgatggagttaaagaaatcgtgtctatgtttaaccacttctatggaaatgatgggaaaacaacatttatctttacctctgaccatggaatgacagactggggttcccatggggctggtcatccttcagagactttaactcctttagtcacttggggagctggaatcaagtatccccaaagagtatcagctcagcaatttgatgatgcatttttgaaagagtggagattggagaattggaagaggctagatgtcaatcaggctgatattgcaccattgatgacttcccttattggagttccctttcctcttaactcagtgggaatccttcctgtggattatcttaacaacactgatctcttcaaagcagagagcatgtttacaaatgcagtacagattcttgaacagttcaaggtgaaaatgactcagaagaaagaagttactttaccatttttgtttacaccatttaaactgctttctgattccaaacagttcaacattttaagaaaagcaagatcttatataaaacacagaaagtttgatgaagtggtctccctttgcaaggagctaattcatcttgcattgaaaggattgtcctattatcacacatatgacagattctttttgggcgtcaatgttgttattggttttgtgggatggatatcttatgcctctttgttgatcatcaagtctcattccaaccttataaaaggtgttagtaaagaagtgaagaaaccaagccatctcctgccttgtagttttgtagctattggcattttagtagcattttttctgctgattcaagcctgtccctggacatattatgtatatggtttgttgccactgccaatatggtatgcggttctaagagaatttcaagttattcaggaccttgttgtatcagtgttgacctatcctctgagccattttgttgggtacctgttagcctttaccctgggaattgaagtattagttctcagttttttctaccgctatatgcttaccgctggacttactgcctttgcagcttggccatttctcactcggctgtggactcgagcaaagatgacctcactgagttggactttcttctctttgctcctggcagtgttcccactgatgccggttgtaggtcgaaagccagacatctctctagtgatgggtgcaggcttgctggttcttctgttatccctgtgtgttgtaacatctctcatgaaaagaaaagatagctttataaaggaagagctattggtacatctgttacaggtgctgagcacagtgctctccatgtatgttgtgtatagcactcagagtagtctactcaggaagcaaggactgcctctcatgaatcaaattattagctgggcaacattagcctcttccttggttgtgccactactgagttctccagttctctttcagcgattgttcagcatacttctttcattgatgtcaacctacctacttctaagcacagggtatgaagctctctttccactagtgttgtcttgtttgatgtttgtctggataaacatagaacaagaaactctacaacaatctggtgtttgctgtaaacaaaagctcaccagtatccagttctcttataatactgatataactcagtttcgacagctatatctggatgacatccgtagggcctttttccttgttttcttcttagtgacagcattttttggaactggaaatatagcttctattaacagctttgatcttgcctctgtctattgctttctgactgtgttcagtccttttatgatgggagccctgatgatgtggaagattttaatcccctttgttcttgttatgtgtgcttttgaagcagttcagttgactactcagttatcgtcaaaaagcctttttctcattgttctcgtcatatcagacattatggctttgcattttttcttcttggtcaaggattatggcagctggcttgatattgggacaagcatcagccactatgtgattgtcatgtccatgaccatctttttggtgttcctcaatggcctggcccagctgctcacaacgaagaaactcagactatgtggcaaacccaaaagtcacttcatgtgaggttgctgaagcaccattcagcatctggatcctgattctccttttaagctaaaatctcatcaaggcttcaataagaagatggatatggatatatagtatattctactcctgtaaggaaaatggtatttggaattccgaattgacaggttatctggaacaaaggagcttcttttttttttctaggttttgcaggcatgaaatagtgattatatctgtggaaaagcataggaaggcattctcctttttcatttttttcctttggctggcagctcttcccagtgatgttgagagcacctgcagcaatctggtccccagtcgcacaacttcccacatacccagaggagagcatatgcctgtgggggcagtgctgatggcatccagagtcattgctgtggctgagctggaaggaaatcaccaggtgccaccgtcaatatttatcagctttcagcactggttttgttagacagtcagggtgtattatttcaagagcttcaataaaaaaagtgtttgcaggtatttgtcatatttctttagtatgcaataatgctatcttatcctttttagtgctatttctcaggttttctcagtcaaccagctagatgcatgtgatgcatgtctatccttcactttttttttttcatttctggattttcctgggatttctgacaacacaaaagtagaaagtgcttggtatttctgtcttatacataggaaaacatttaaaataaatagtttttaattgtaggctcaacatctgttaccccatagctttttcgtatattgtttctttccctttgaatttctttttactgtcatctattattttaacaggagttaaaataactcctgttaaactttctgacaatatcataagaattcatattaaaggtgttattctttctggttgtgagattctagcacaaaggcctaaaatcatcaaattagatttccatttgtaaacaaattctaatgggcaaaatatcttgagagcagtttttatatggattatccataaaatgacctttacatatccctgcagagttggccttttgcccgtggtgtgctagtagctttggctgatgctaagctttcctggtatgcgccctatttttaagaagtaattgcttttgaattaagttatagcattactaattcatgttaatgactaggaaaccctctgtaatttacaagatttttcaaattggtggggagtgaataaatacaatttaaaagagtcagaaatcagtttggcaaagtgtactttcttaatttctatttatgatgaagtatagtcataatttatttgtaatactactttatggtataccagtgaaagaactgtagtataaaaaagaggtattaatgttttatgaaatctcatgcatcagttcatagcataaaatctagctggacaactaagaagctatggtagcaaacagtgatgttgatggaatgagaatcatgaactttcatattacctcaaaggatttttttatcagtttttttcacacatcagaaaaaactgactgtataaacacttatcactgacctttttctatgtgtagttttgccttttatcttttcccaaatttttataaagagaaattaataaatattttattacaacattgtaaa

SEQ ID NO: 420775 - DNA, 4779 bp, Homo sapiens
agcagcagcggccgggcaggtattgggggcgttccggaattgaggggtggttgtagtggtggcttaggaataccctcccggctatcgcttcagtgggtagaggggaccactgcccgagagctttaatggagctgggtcctgccttcgcgctgaggagccctcgttttcgagatcaggcctgaccgggataagctccagaaacagtattatgtctcagtcctgtgcaaagtgagatgagctgtagcctttggagacctataattttgaacatagatgttccttaaaagctaaatctttttgaacagatgatgataaacctggaagagattcaccaacaatagcaaattacacactggcttggaaagtactcccatgttccgtttgatcttggcaatttaatgctgttcttgaagactaattagttacactggatatgctgctgttctttactttgggattgcttatacattttgtgttcttcgcctccatctttgacatttattttacatctcctttggttcatggaatgactcctcagtttacaccattgcctcctccagcgagaagattagtgttgtttgttgctgatggccttcgagcagatgcactttacgaattagatgaaaatggaaactctagagcaccgtttattaggaatatcataatgcatgaaggcagctggggcatatctcatacacgtgtgccaacagaatctcggccaggtcatgtagctctgatagctgggttttatgaagatgtcagtgcagttgccaaaggatggaaggaaaatcctgtagagtttgattctctttttaatgaaagtaaatacacatggagctggggaagcccagatatcctgcctatgtttgccaaaggtgctagtggagaccacgtttatacatatagttatgatgctaaaagagaggattttggtgctcaagatgcaacaaaactggatacgtgggtttttgataatgttaaggaatagatacaaacggacatgctcatcgaccatcctcgagagactacaagcacaatattaaaaaagttgatgatggagttaaagaaatcgtgtctatgtttaaccacttctatggaaatgatgggaaaacaacatttatctttacctctgaccatggaatgacagactggggttcccatggggctggtcatccttcagagactttaactcctttagtcacttggggagctggaatcaagtatccccaaagagtatcagctcagcaatttgatgatgcatttttgaaagagtggagattggagaattggaagaggctagatgtcaatcaggctgatattgcaccattgatgacttcccttattggagttccctttcctcttaactcagtgggaatccttcctgtggattatcttaacaacactgatctcttcaaagcagagagcatgtttacaaatgcagtacagattcttgaacagttcaaggtgaaaatgactcagaagaaagaagttactttaccatttttgtttacaccatttaaactgctttctgattccaaacagttcaacattttaagaaaagcaagatcttatataaaacacagaaagtttgatgaagtggtctccctttgcaaggagctaattcatcttgcattgaaaggattgtcctattatcacacatatgacagattctttttgggcgtcaatgttgttattggttttgtgggatggatatcttatgcctctttgttgatcatcaagtctcattccaaccttataaaaggtgttagtaaagaagtgaagaaaccaagccatctcctgccttgtagttttgtagctattggcattttagtagcattttttctgctgattcaagcctgtccctggacatattatgtatatggtttgttgccactgccaatatggtatgcggttctaagagaatttcaagttattcaggaccttgttgtatcagtgttgacctatcctctgagccattttgttgggtacctgttagcctttaccctgggaattgaagtattagttctcagttttttctaccgctatatgcttaccgctggacttactgcctttgcagcttggccatttctcactcggctgtggactcgagcaaagatgacctcactgagttggactttcttctctttgctcctggcagtgttcccactgatgccggttgtaggtcgaaagccagacatctctctagtgatgggtgcaggcttgctggttcttctgttatccctgtgtgttgtaacatctctcatgaaaagaaaagatagctttataaaggaagagctattggtacatctgttacaggtgctgagcacagtgctctccatgtatgttgtgtatagcactcagagtagtctactcaggaagcaaggactgcctctcatgaatcaaattattagctgggcaacattagcctcttccttggttgtgccactactgagttctccagttctctttcagcgattgttcagcatacttctttcattgatgtcaacctacctacttctaagcacagggtatgaagctctctttccactagtgttgtcttgtttgatgtttgtctggataaacatagaacaagaaactctacaacaatctggtgtttgctgtaaacaaaagctcaccagtatccagttctcttataatactgatataactcagtttcgacagctatatctggatgacatccgtagggcctttttccttgttttcttcttagtgacagcattttttggaactggaaatatagcttctattaacagctttgatcttgcctctgtctattgctttctgactgtgttcagtccttttatgatgggagccctgatgatgtggaagattttaatcccctttgttcttgttatgtgtgcttttgaagcagttcagttgactactcagttatcgtcaaaaagcctttttctcattgttctcgtcatatcagacattatggctttgcattttttcttcttggtcaaggattatggcagctggcttgatattgggacaagcatcagccactatgtgattgtcatgtccatgaccatctttttggtgttcctcaatggcctggcccagctgctcacaacgaagaaactcagactatgtggcaaacccaaaagtcacttcatgtgaggttgctgaagcaccattcagcatctggatcctgattctccttttaagctaaaatctcatcaaggcttcaataagaagatggatatggatatatagtatattctactcctgtaaggaaaatggtatttggaattccgaattgacaggttatctggaacaaaggagcttcttttttttttctaggttttgcaggcatgaaatagtgattatatctgtggaaaagcataggaaggcattctcctttttcatttttttcctttggctggcagctcttcccagtgatgttgagagcacctgcagcaatctggtccccagtcgcacaacttcccacatacccagaggagagcatatgcctgtgggggcagtgctgatggcatccagagtcattgctgtggctgagctggaaggaaatcaccaggtgccaccgtcaatatttatcagctttcagcactggttttgttagacagtcagggtgtattatttcaagagcttcaataaaaaaagtgtttgcaggtatttgtcatatttctttagtatgcaataatgctatcttatcctttttagtgctatttctcaggttttctcagtcaaccagctagatgcatgtgatgcatgtctatccttcactttttttttttcatttctggattttcctgggatttctgacaacacaaaagtagaaagtgcttggtatttctgtcttatacataggaaaacatttaaaataaatagtttttaattgtaggctcaacatctgttaccccatagctttttcgtatattgtttctttccctttgaatttctttttactgtcatctattattttaacaggagttaaaataactcctgttaaactttctgacaatatcataagaattcatattaaaggtgttattctttctggttgtgagattctagcacaaaggcctaaaatcatcaaattagatttccatttgtaaacaaattctaatgggcaaaatatcttgagagcagtttttatatggattatccataaaatgacctttacatatccctgcagagttggccttttgcccgtggtgtgctagtagctttggctgatgctaagctttcctggtatgcgccctatttttaagaagtaattgcttttgaattaagttatagcattactaattcatgttaatgactaggaaaccctctgtaatttacaagatttttcaaattggtggggagtgaataaatacaatttaaaagagtcagaaatcagtttggcaaagtgtactttcttaatttctatttatgatgaagtatagtcataatttatttgtaatactactttatggtataccagtgaaagaactgtagtataaaaaagaggtattaatgttttatgaaatctcatgcatcagttcatagcataaaatctagctggacaactaagaagctatggtagcaaacagtgatgttgatggaatgagaatcatgaactttcatattacctcaaaggatttttttatcagtttttttcacacatcagaaaaaactgactgtataaacacttatcactgacctttttctatgtgtagttttgccttttatcttttcccaaatttttataaagagaaattaataaatattttattacaacattgtaaa

SEQ ID NO: 420776 - DNA, 2435 bp, Homo sapiens
agcagcagcggccgggcaggtattgggggcgttccggaattgaggggtggttgtagtggtggcttaggaataccctcccggctatcgcttcagtgggtagaggggaccactgcccgagagctttaatggagctgggtcctgccttcgcgctgaggagccctcgttttcgagatcaggcctgaccgggataagctccagaaacagtattatgtctcagtcctgtgcaaagtgagatgagctgtagcctttggagacctataattttgaacatagatgttccttaaaagctaaatctttttgaacagatgatgataaacctggaagagattcaccaacaatagcaaattacacactggcttggaaagtactcccatgttccgtttgatcttggcaatttaatgctgttcttgaagactaattagttacactggatatgctgctgttctttactttgggattgcttatacattttgtgttcttcgcctccatctttgacatttattttacatctcctttggttcatggaatgactcctcagtttacaccattgcctcctccagcgagaagattagtgttgtttgttgctgatggccttcgagcagatgcactttacgaattagatgaaaatggaaactctagagcaccgtttattaggaatatcataatgcatgaaggcagctggggcatatctcatacacgtgtgccaacagaatctcggccaggtcatgtagctctgatagctgggttttatgaagatgtcagtgcagttgccaaaggatggaaggaaaatcctgtagagtttgattctctttttaatgaaagtaaatacacatggagctggggaagcccagatatcctgcctatgtttgccaaaggtgctagtggagaccacgtttatacatatagttatgatgctaaaagagaggattttggtgctcaagatgcaacaaaactggatacgtgggtttttgataatgttaaggacttctttcatcatgccagaaacaaccagtctttgttttctaaaataaatgaagagaaaatagtttttttcttacatttattaggaatagatacaaacggacatgctcatcgaccatcctcgagagactacaagcacaatattaaaaaagttgatgatggagttaaagaaatcgtgtctatgtttaaccacttctatggaaatgatgggaaaacaacatttatctttacctctgaccatggaatgacagactggggttcccatggggctggtcatccttcagagactttaactcctttagtcacttggggagctggaatcaagtatccccaaagagtatcagctcagcaatttgatgatgcatttttgaaagagtggagattggagaattggaagaggctagatgtcaatcaggctgatattgcaccattgatgacttcccttattggagttccctttcctcttaactcagtgggaatccttcctgtggattatcttaacaacactgatctcttcaaagcagagagcatgtttacaaatgcagtacagattcttgaacagttcaaggtgaaaatgactcagaagaaagaagttactttaccatttttgtttacaccatttaaactgctttctgattccaaacagttcaacattttaagaaaagcaagatcttatataaaacacagaaagtttgatgaagtggtctccctttgcaaggagctaattcatcttgcattgaaaggattgtcctattatcacacatatgacagattctttttgggcgtcaatgttgttattggttttgtgggatggatatcttatgcctctttgttgatcatcaagtctcattccaaccttataaaaggtgttagtaaagaagtgaaggtacgtttagaaaatgtgaggattcagatgatggtataaaatcactagtactgaatccagtgtaatgagtttataggatgtgcaagtcattgttctaagctaactcttgtttatctttcatttgcttttattgtattggatttttcctcagttatctctgtttcttcagttgagaaaaagatatattgataataatgatcctataacttaagaaagctataaagatagaggtgtaagtaatttaagtgctcctatgttatcaatggtgtcgaccttctgttttattttataactagcattttataagtattccatatctttctagtacaactggtcagaaaactacttcaaaacaatatgtttaattttatttgatattaaaagtttgggagctagagaacaataaaattatttgctcataatgtttcttcttaaatgatgtatacattttttaattacttaccttcttttaactttttgaagtttctcaaaatgcagatttctagacctctccaagtattcttattttaagaatttgttcctactttactatgctttcagtgaaaaa

SEQ ID NO: 420777 - DNA, 1163 bp, Homo sapiens
agcagcagcggccgggcaggtattgggggcgttccggaattgaggggtggttgtagtggtggcttaggaataccctcccggctatcgcttcagtgggtagaggggaccactgcccgagagctttaatggagctgggtcctgccttcgcgctgaggagccctcgttttcgagatcaggcctgaccgggataagctccagaaacagtattatgtctcagtcctgtgcaaagtgagatgagctgtagcctttggagacctataattttgaacatagatgttccttaaaagctaaatctttttgaacagatgatgataaacctggaagagattcaccaacaatagcaaattacacactggcttggaaagtactcccatgttccgtttgatcttggcaatttaatgctgttcttgaagactaattagttacactggatatgctgctgttctttactttgggattgcttatacattttgtgttcttcgcctccatctttgacatttattttacatctcctttggttcatggaatgactcctcagtttacaccattgcctcctccagcgagaagattagtgttgtttgttgctgatggccttcgagcagatgcactttacgaattagatgaaaatggaaactctagagcaccgtttattaggaatatcataatgcatgaaggcagctggggcatatctcatacacgtgtgccaacagaatctcggccaggtcatgtagctctgatagctgggttttatgaagatgtcagtgcagttgccaaaggatggaaggaaaatcctgtagagtttgattctctttttaatgaaagtaaatacacatggagctggggaagcccagatatcctgcctatgtttgccaaaggtgctagtggagaccacgtttatacatatagttatgatgctaaaagagaggattttggtgctcaagatgcaacaaaactggatacgtgggtttttgataatgttaaggtttgtgctattgagtggttaatatacaaaaagcatatttttacctgaagtattggagactgtatcccacgttttttctgttttcatgagctttgaaagttctatgttgtagcacactgttctgaattctaagatttaattctaaaaaattacacattctaaataaataagagaagtttta

SEQ ID NO: 420778 - DNA, 1037 bp, Homo sapiens
aaataggctaggtcgaggcctggtgttactcggccgaggccgcttcctgcgcggcctcttaacgctgctgctgccgccgccacccctgtatacccggcaccgcatgctcggtccagagtccgtcccgcccccaaaacgatcccgcagcaaactcatggcaccgccccgaatcgggacgcacaatggcaccttccactgcgacgaggcactggcatgcgcactgcttcgcctcctgccggagtaccgggatgcagagattgtgcggacccgggatcccgaaaaactcgcttcctgtgacatcgtggtggacgtggggggcgagtacgaccctcggagacaccgatatgaccatcaccagaggtctttcacagagaccatgagctccctgtcccctgggaagccgtggcagaccaagctgagcagtgcgggactcatctatctgcacttcgggcacaagctgctggcccagttgctgggcactagtgaagaggacagcatggtgggcaccctctatgacaaggcagggttcaagcgtgcaatggatctggttcaagaggagtttctgcagagattagatttctaccaacacagctggctgccagcccgggccttggtggaagaggcccttgcccagcgattccaggtggacccaagtggagagattgtggaactggcgaaaggtgcatgtccctggaaggagcatctctaccacctggaatctgggctgtcccctccagtggccatcttctttgttatctacactgaccaggctggacagtggcgaatacagtgtgtgcccaaggagccccactcattccaaagccggctgcccctgccagagccatggcggggtcttcgggacgaggccctggaccaggtcagtgggatccctggctgcatcttcgtccatgcaagcggcttcattggcggtcaccgcacccgagagggtgccttgagcatggcccgtgccaccttggcccagcgctcatacctcccacaaatctcctagtctaataaaaccttccatctcatactga

SEQ ID NO: 420779 - DNA, 990 bp, Homo sapiens
tttgtgctttggtggagctcctatttaatgacgatggaatgggggaatgagatgaacacacaggaaggaatcatgatccaaacgaactaaataccagcaattataaccccgactgcacatgagaatcactcaggaagtttaaaaagaaagcttgggcccattccagattgactaaatcaacttggaagtcaaaggaggggaagttgtaccaaggtctgtttttttttaaaaaagctcccctctgttataatcaggattcagaaccagtgttccaaaggtaaaaatctttccccatcatagttttctgattatgtcagactcatttaataccatattgtgttcgtttttatatctttggttagcaggttttttttttttccgagaagagtctcattctcaccacacccagctgtgttagcatattgaccgatgcattgtagaccctaaatttgtgttagtgaccccacagtggatcactgagttaaagttttattaacaatgccaggcgcagtggctgacgcctgtaatcccagcactttgggaggccaaggcaggtggatcacctgaggttaggagttcaagaccagcctggccaccatggtgaaaccccatctctactaaaaatacaaagttagcccgggcatggtggtgcatgcctgtaatcccagctgttcgggaggatgaggcaggagaatcgcttgaacccgggagacggaggttgctgtgagccaagatcgtgccactgcactccagcctcggtgacaagagcaggattgatgcagagattgtgcggacccgggatcccgaaaaactcgcttcctgtgacatcgtggtggacgtggggggcgagtacgaccctcggagacaccgatatgaccatcaccagaggtaggttctcagataccatttatttaacttccttgacctcagctttcctctgtgctccaattcagccatccactgccgtagtccgcgtcagcgaaaagaact

SEQ ID NO: 420780 - DNA, 2163 bp, Homo sapiens
cgggtcggcgctcctgcctccctgcagggagctgcttatgggacaccgcttcctgcgcggcctcttaacgctgctgctgccgccgccacccctgtatacccggcaccgcatgctcggtccagagtccgtcccgcccccaaaacgatcccgcagcaaactcatggcaccgccccgaatcgggacgcacaatggcaccttccactgcgacgaggcactggcatgcgcactgcttcgcctcctgccggagtaccgggatgcagagattgtgcggacccgggatcccgaaaaactcgcttcctgtgacatcgtggtggacgtggggggcgagtacgaccctcggagacaccgatatgaccatcaccagaggtctttcacagagaccatgagctccctgtcccctgggaagccgtggcagaccaagctgagcagtgcgggactcatctatctgcacttcgggcacaagctgctggcccagttgctgggcactagtgaagaggacagcatggtgggcaccctctatgacaagatgtatgagaactttgtggaggaggtggatgctgtggacaatgggatctcccagtgggcagagggggagcctcgatatgcactgaccactaccctgagtgcacgagttgctcgacttaatcctacctggaaccaccccgaccaagacactgaggcagggttcaagcgtgcaatggatctggttcaagaggagtttctgcagagattagatttctaccaacacagctggctgccagcccgggccttggtggaagaggcccttgcccagcgattccaggtggacccaagtggagagattgtggaactggcgaaaggtgcatgtccctggaaggagcatctctaccacctggaatctgggctgtcccctccagtggccatcttctttgttatctacactgaccaggctggacagtggcgaatacagtgtgtgcccaaggagccccactcattccaaagccggctgcccctgccagagccatggcggggtcttcgggacgaggccctggaccaggtcagtgggatccctggctgcatcttcgtccatgcaagcggcttcattggcggtcaccgcacccgagagggtgccttgagcatggcccgtgccaccttggcccagcgctcatacctcccacaaatctcctagtctaataaaaccttccatctcatactgaaaaaaaaaaaaaaaaaaaaaaaaaaaatctttgttggggcgggcttgggcccgggaaaggtttttaaaacccattcggtggggaggcgcgggccccaggtggcgtaacgcggaacccacggggccaaaagcgcgtgtcccccgagagacaactcgggggcacagacataaggggcgcgggctctctctcccaaaattaaaaaaagggccggggggccacacggaagggggctgtagaaacaaattcccaacaagggagggacccaagagaggggccaacacggggggcctcaacacaacagcgggggccccaagaggggaggggccagaatattacaatattcaccgccgcgccgcgcggggagtgagcggaaggcaacagacacggacacacgacaccaccacataaaacgagcgaatagacacacagacaggccgaacaacaagcccagatacacacgaccgagaccactacacagtgaccagaccacaccaccaagatagcatgtgagccacacagccacagcaacacgaagaccacacggacgacgaccgcagcaacgcacgccacggaagacaacaagacaacccaccaacaccacaaacaacaacaggccaagataagcacgactacaaagacacggataataagcgtgggtatcactactcagcagattcacaccgaaggcatgtaacccaataacgcagacgcagagcgctgtgcgtcaggataatgaccacgactcaacgcaagagcaagacgaagcagggacgaccgtgccccagcagaagcaacgacgagacaagcaccagcctcaaagaaaagacacaaaacaccgcacacaagaacacaagaatcacaccgccaccaaacaacacagcatccaggagccacacgaatactagcatccgaccgcagcagtgtacccaacgcacgcgcccctcccggccgtcgtaagcgcaggacg

SEQ ID NO: 420781 - DNA, 1718 bp, Homo sapiens
tttgtgctttggtggagctcctatttaatgacgatggaatgggggaatgagatgaacacacaggaaggaatcatgatccaaacgaactaaataccagcaattataaccccgactgcacatgagaatcactcaggaagtttaaaaagaaagcttgggcccattccagattgactaaatcaacttggaagtcaaaggaggggaagttgtaccaaggtctgtttttttttaaaaaagctcccctctgttataatcaggattcagaaccagtgttccaaaggtaaaaatctttccccatcatagttttctgattatgtcagactcatttaataccatattgtgttcgtttttatatctttggttagcaggttttttttttttccgagaagagtctcattctcaccacacccagctgtgttagcatattgaccgatgcattgtagaccctaaatttgtgttagtgaccccacagtggatcactgagttaaagttttattaacaatgccaggcgcagtggctgacgcctgtaatcccagcactttgggaggccaaggcaggtggatcacctgaggttaggagttcaagaccagcctggccaccatggtgaaaccccatctctactaaaaatacaaagttagcccgggcatggtggtgcatgcctgtaatcccagctgttcgggaggatgaggcaggagaatcgcttgaacccgggagacggaggttgctgtgagccaagatcgtgccactgcactccagcctcggtgacaagagcaggattgatgcagagattgtgcggacccgggatcccgaaaaactcgcttcctgtgacatcgtggtggacgtggggggcgagtacgaccctcggagacaccgatatgaccatcaccagaggtctttcacagagaccatgagctccctgtcccctgggaagccgtggcagaccaagctgagcagtgcgggactcatctatctgcacttcgggcacaagctgctggcccagttgctgggcactagtgaagaggacagcatggtgggcaccctctatgacaagatgtatgagaactttgtggaggaggtggatgctgtggacaatgggatctcccagtgggcagagggggagcctcgatatgcactgaccactaccctgagtgcacgagttgctcgacttaatcctacctggaaccaccccgaccaagacactgaggcagggttcaagcgtgcaatggatctggttcaagaggagtttctgcagagattagatttctaccaacacagctggctgccagcccgggccttggtggaagaggcccttgcccagcgattccaggtggacccaagtggagagattgtggaactggcgaaaggtgcatgtccctggaaggagcatctctaccacctggaatctgggctgtcccctccagtggccatcttctttgttatctacactgaccaggctggacagtggcgaatacagtgtgtgcccaaggagccccactcattccaaagccggctgcccctgccagagccatggcggggtcttcgggacgaggccctggaccaggtcagtgggatccctggctgcatcttcgtccatgcaagcggcttcattggcggtcaccgcacccgagagggtgccttgagcatggcccgtgccaccttggcccagcgctcatacctcccacaaatctcctagtctaataaaaccttccatctcatactga

SEQ ID NO: 420782 - DNA, 1275 bp, Homo sapiens
cgggtcggcgctcctgcctccctgcagggagctgcttatgggacaccgcttcctgcgcggcctcttaacgctgctgctgccgccgccacccctgtatacccggcaccgcatgctcggtccagagtccgtcccgcccccaaaacgatcccgcagcaaactcatggcaccgccccgaatcgggacgcacaatggcaccttccactgcgacgaggcactggcatgcgcactgcttcgcctcctgccggagtaccgggatgcagagattgtgcggacccgggatcccgaaaaactcgcttcctgtgacatcgtggtggacgtggggggcgagtacgaccctcggagacaccgatatgaccatcaccagaggtctttcacagagaccatgagctccctgtcccctgggaagccgtggcagaccaagctgagcagtgcgggactcatctatctgcacttcgggcacaagctgctggcccagttgctgggcactagtgaagaggacagcatggtgggcaccctctatgacaagatgtatgagaactttgtggaggaggtggatgctgtggacaatgggatctcccagtgggcagagggggagcctcgatatgcactgaccactaccctgagtgcacgagttgctcgacttaatcctacctggaaccaccccgaccaagacactgaggcagggttcaagcgtgcaatggatctggttcaagaggagtttctgcagagattagatttctaccaacacagctggctgccagcccgggccttggtggaagaggcccttgcccagcgattccaggtggacccaagtggagagattgtggaactggcgaaaggtgcatgtccctggaaggagcatctctaccacctggaatctgggctgtcccctccagtggccatcttctttgttatctacactgaccaggctggacagtggcgaatacagtgtgtgcccaaggagccccactcattccaaagccggctgcccctgccagagccatggcggggtcttcgggacgaggccctggaccaggtcagtgggatccctggctgcatcttcgtccatgcaagcggcttcattggcggtcaccgcacccgagagggtgccttgagcatggcccagttgctgggcactagtgaagaggacagcatggtgggcaccctctatgacaagatgtatgagaactttgtggaggaggtggatgctgtggacaatgggatctcccagtgggcagagggggagcctcgatatgcactgaccactaccccgag

SEQ ID NO: 420783 - DNA, 1299 bp, Homo sapiens
cgggtcggcgctcctgcctccctgcagggagctgcttatgggacaccgcttcctgcgcggcctcttaacgctgctgctgccgccgccacccctgtatacccggcaccgcatgctcggtccagagtccgtcccgcccccaaaacgatcccgcagcaaactcatggcaccgccccgaatcgggacgcacaatggcaccttccactgcgacgaggcactggcatgcgcactgcttcgcctcctgccggagtaccgggatgcagagattgtgcggacccgggatcccgaaaaactcgcttcctgtgacatcgtggtggacgtggggggcgagtacgaccctcggagacaccgatatgaccatcaccagaggtctttcacagagaccatgagctccctgtcccctgggaagccgtggcagaccaagctgagcagtgcgggactcatctatctgcacttcgggcacaagctgctggcccagttgctgggcactagtgaagaggacagcatggtgggcaccctctatgacaagatgtatgagaactttgtggaggaggtggatgctgtggacaatgggatctcccagtgggcagagggggagcctcgatatgcactgaccactaccctgagtgcacgagttgctcgacttaatcctacctggaaccaccccgaccaagacactgaggcagggttcaagcgtgcaatggatctggttcaagaggagtttctgcagagattagatttctaccaacacagctggctgccagcccgggccttggtggaagaggcccttgcccagcgattccaggtggacccaagtggagagattgtggaactggcgaaaggtgcatgtccctggaaggagcatctctaccacctggaatctgggctgtcccctccagtggccatcttctttgttatctacactgaccaggctggacagtggcgaatacagtgtgtgcccaaggagccccactcattccaaagccggtgaggccctagggaaccactctgcagaccttcaggcttgtctcagccttgttaagagaaggctgccaactctgacccctgctgtactccctctttctgcccagctgcccctgccagagccatggcggggtcttcgggacgaggccctggaccaggtcagtgggatccctggctgcatcttcgtccatgcaagcggcttcattggcggtcaccgcacccgagagggtgccttgagcatggcccgtgccaccttggcccagcgctcatacctcccacaaatctcctagtctaataaaaccttccatctcatactga

SEQ ID NO: 420784 - DNA, 1050 bp, Homo sapiens
cgggtcggcgctcctgcctccctgcagggagctgcttatgggacaccgcttcctgcgcggcctcttaacgctgctgctgccgccgccacccctgtatacccggcaccgcatgctcggtccagagtccgtcccgcccccaaaacgatcccgcagcaaactcatggcaccgccccgaatcgggacgcacaatggcaccttccactgcgacgaggcactggcatgcgcactgcttcgcctcctgccggagtaccgggatgcagagattgtgcggacccgggatcccgaaaaactcgcttcctgtgacatcgtggtggacgtggggggcgagtacgaccctcggagacaccgatatgaccatcaccagaggtctttcacagagaccatgagctccctgtcccctgggaagccgtggcagaccaagctgagcagtgcgggactcatctatctgcacttcgggcacaagctgctggcccagttgctgggcactagtgaagaggacagcatggtgggcaccctctatgacaagatgtatgagaactttgtggaggaggtggatgctgtggacaatgggatctcccagtgggcagagggggagcctcgatatgcactgaccactaccctgagtgcacgagttgctcgacttaatcctacctggaaccaccccgaccaagacactgaggcagggttcaagcgtgcaatggatctggttcaagaggagtttctgcagagattagatttctaccaacacagctggctgccagcccgggccttggtggaagaggcccttgcccagcgattccaggtggacccaagtggagagattgtggaactggcgaaaggtgcatgtccctggaaggagcatctctaccacctggaatctgggctgtcccctccagtggccatctggctgcatcttcgtccatgcaagcggcttcattggcggtcaccgcacccgagagggtgccttgagcatggcccgtgccaccttggcccagcgctcatacctcccacaaatctcctagtctaataaaaccttccatctcatactga

SEQ ID NO: 420785 - DNA, 976 bp, Homo sapiens
cgggtcggcgctcctgcctccctgcagggagctgcttatgggacaccgcttcctgcgcggcctcttaacgctgctgctgccgccgccacccctgtatacccggcaccgcatgctcggtccagagtccgtcccgcccccaaaacgatcccgcagcaaactcatggcaccgccccgaatcgggacgcacaatggcaccttccactgcgacgaggcactggcatgcgcactgcttcgcctcctgccggagtaccgggatgcagagattgtgcggacccgggatcccgaaaaactcgcttcctgtgacatcgtggtggacgtggggggcgagtacgaccctcggagacaccgatatgaccatcaccagaggtctttcacagagaccatgagctccctgtcccctgggaagccgtggcagaccaagctgagcagtgcgggactcatctatctgcacttcgggcacaagctgctggcccagttgctgggcactagtgaagaggacagcatggtgggcaccctctatgacaagatgtatgagaactttgtggaggaggtggatgctgtggacaatgggatctcccagtgggcagagggggagcctcgatatgcactgaccactaccctgagtgcacgagttgctcgacttaatcctacctggaaccaccccgaccaagacactgaggcagggttcaagcgtgcaatggatctggttcaagaggagtttctgcagagattagatttctaccaacacagctggctgccagcccgggccttggtggaagaggcccttgcccagcgattccaggtggacccaagtggagagattgtggaactggctgcatcttcgtccatgcaagcggcttcattggcggtcaccgcacccgagagggtgccttgagcatggcccgtgccaccttggcccagcgctcatacctcccacaaatctcctagtctaataaaaccttccatctcatactga

SEQ ID NO: 420786 - DNA, 579 bp, Homo sapiens
cgggtcggcgctcctgcctccctgcagggagctgcttatgggacaccgcttcctgcgcggcctcttaacgctgctgctgccgccgccacccctgtatacccggcaccgcatgctcggtccagagtccgtcccgcccccaaaacgatcccgcagcaaactcatggcaccgccccgaatcgggacgcacaatggcaccttccactgcgacgaggcactggcatgcgcactgcttcgcctcctgccggagtaccgggatgcagagattgtgcggacccgggatcccgaaaaactcgcttcctgtgacatcgtggtggacgtggggggcgagtacgaccctcggagacaccgatatgaccatcaccagaggtctttcacagagaccatgagctccctgtcccctgggaagccgtggcagaccaagctgagcagtgcgggactcatctatctgcacttcgggcacaagctgctggcccagttgctgggcactagtgaagaggacagcatggtgggcaccctctatgacaagatgtatgagaactttgtgaagagggagcagaccaggatccttagagtcaccca

SEQ ID NO: 420787 - DNA, 1196 bp, Homo sapiens
cgggtcggcgctcctgcctccctgcagggagctgcttatgggacaccgcttcctgcgcggcctcttaacgctgctgctgccgccgccacccctgtatacccggcaccgcatgctcggtccagagtccgtcccgcccccaaaacgatcccgcagcaaactcatggcaccgccccgaatcgggacgcacaatggcaccttccactgcgacgaggcactggcatgcgcactgcttcgcctcctgccggagtaccgggatgcagagattgtgcggacccgggatcccgaaaaactcgcttcctgtgacatcgtggtggacgtggggggcgagtacgaccctcggagacaccgatatgaccatcaccagaggtctttcacagagaccatgagctccctgtcccctgggaagccgtggcagaccaagctgagcagtgcgggactcatctatctgcacttcgggcacaagctgctggcccagttgctgggcactagtgaagaggacagcatggtgggcaccctctatgacaagatgtatgagaactttgtggaggaggtggatgctgtggacaatgggatctcccagtgggcagagggggagcctcgatatgcactgaccactaccctgagtgcacgagttgctcgacttaatcctacctggaaccaccccgaccaagacactgaggcagggttcaagcgtgcaatggatctggttcaagaggagtttctgcagagattagatttctaccaacacagctggctgccagcccgggccttggtggaagaggcccttgcccagcgattccaggtggacccaagtggagagattgtggaactggcgaaaggtgcatgtccctggaaggagcatctctaccacctggaatctgggctgtcccctccagtggccatcttctttgttatctacactgaccaggctggacagtggcgaatacagtgtgtgcccaaggagccccactcattccaaagccggctgcccctgccagagccatggcggggtcttcgggacgaggccctggaccaggtcagtgggatccctggctgcatcttcgtccatgcaagcggcttcattggcggtcaccgcacccgagagggtgccttgagcatggcccgtgccaccttggcccagcgctcatacctcccacaaatctcctagtctaataaaaccttccatctcatactga

SEQ ID NO: 420788 - DNA, 517 bp, Homo sapiens
tagtctcaaattcctgggctcaactgatcctcccacctcagcctcccaaaatgttgtgactacaaacatgatcaccatgcccagcctaccttaaaccttctagctatgctctccctctttcaggtggacccaagtggagagattgtggaactggcgaaaggtgcatgtccctggaaggagcatctctaccacctggaatctgggctgtcccctccagtggccatcttctttgttatctacactgaccaggctggacagtggcgaatacagtgtgtgcccaaggagccccactcattccaaagccggctgcccctgccagagccatggcggggtcttcgggacgaggccctggaccaggtcagtgggatccctggctgcatcttcgtccatgcaagcggcttcattggcggtcaccgcacccgagagggtgccttgagcatggcccgtgccaccttggcccagcgctcatacctcccacaaatctcctagtctaataaaaccttccatctcatactga

SEQ ID NO: 420789 - DNA, 1122 bp, Homo sapiens
gtgaccctgggactgcgtgcatgcatgcctccggggtggatggcattccgccaacagggtcactccgatagcgcccggcagcccaagcacccttcctacccttcctgcctccctgaagtccagcattaatcccctacccggcgacacccggcagccccttcacccctgtgtacctcgcagatgcagagattgtgcggacccgggatcccgaaaaactcgcttcctgtgacatcgtggtggacgtggggggcgagtacgaccctcggagacaccgatatgaccatcaccagaggtctttcacagagaccatgagctccctgtcccctgggaagccgtggcagaccaagctgagcagtgcgggactcatctatctgcacttcgggcacaagctgctggcccagttgctgggcactagtgaagaggacagcatggtgggcaccctctatgacaagatgtatgagaactttgtggaggaggtggatgctgtggacaatgggatctcccagtgggcagagggggagcctcgatatgcactgaccactaccctgagtgcacgagttgctcgacttaatcctacctggaaccaccccgaccaagacactgaggcagggttcaagcgtgcaatggatctggttcaagaggagtttctgcagagattagatttctaccaacacagctggctgccagcccgggccttggtggaagaggcccttgcccagcgattccaggtggacccaagtggagagattgtggaactggcgaaaggtgcatgtccctggaaggagcatctctaccacctggaatctgggctgtcccctccagtggccatcttctttgttatctacactgaccaggctggacagtggcgaatacagtgtgtgcccaaggagccccactcattccaaagccggctgcccctgccagagccatggcggggtcttcgggacgaggccctggaccaggtcagtgggatccctggctgcatcttcgtccatgcaagcggcttcattggcggtcaccgcacccgagagggtgccttgagcatggcccgtgccaccttggcccagcgctcatacctcccacaaatctcctagtctaataaaaccttccatctcatactga

SEQ ID NO: 420790 - DNA, 965 bp, Homo sapiens
cccgccttgctccctcttcacggctctgggcagaggccggggccttgctgccagctgcgagccggttgataggcagcttctccgcatctacgaccagtgggactgttgccaagatggttccgccactcaccaggggtctttcacagagaccatgagctccctgtcccctgggaagccgtggcagaccaagctgagcagtgcgggactcatctatctgcacttcgggcacaagctgctggcccagttgctgggcactagtgaagaggacagcatggtgggcaccctctatgacaagatgtatgagaactttgtggaggaggtggatgctgtggacaatgggatctcccagtgggcagagggggagcctcgatatgcactgaccactaccctgagtgcacgagttgctcgacttaatcctacctggaaccaccccgaccaagacactgaggcagggttcaagcgtgcaatggatctggttcaagaggagtttctgcagagattagatttctaccaacacagctggctgccagcccgggccttggtggaagaggcccttgcccagcgattccaggtggacccaagtggagagattgtggaactggcgaaaggtgcatgtccctggaaggagcatctctaccacctggaatctgggctgtcccctccagtggccatcttctttgttatctacactgaccaggctggacagtggcgaatacagtgtgtgcccaaggagccccactcattccaaagccggctgcccctgccagagccatggcggggtcttcgggacgaggccctggaccaggtcagtgggatccctggctgcatcttcgtccatgcaagcggcttcattggcggtcaccgcacccgagagggtgccttgagcatggcccgtgccaccttggcccagcgctcatacctcccacaaatctcctagtctaataaaaccttccatctcatactga

SEQ ID NO: 420791 - DNA, 1162 bp, Homo sapiens
cgggtcggcgctcctgcctccctgcagggagctgcttatgggacaccgcttcctgcgcggcctcttaacgctgctgctgccgccgccacccctgtatacccggcaccgcatgctcggtccagagtccgtcccgcccccaaaacgatcccgcagcaaactcatggcaccgccccgaatcgggacgcacaatggcaccttccactgcgacgaggcactggcatgcgcactgcttcgcctcctgccggagtaccgggatgcagagattgtgcggacccgggatcccgaaaaactcgcttcctgtgacatcgtggtggacgtggggggcgagtacgaccctcggagacaccgatatgaccatcaccagaggtctttcacagagaccatgagctccctgtcccctgggaagccgtggcagaccaagctgagcagtgcgggactcatctatctgcacttcgggcacaagctgctggcccagttgctgggcactagtgaagaggacagcatggtgggcaccctctatgacaagatgtatgagaactttgtggaggaggtggatgctgtggacaatgggatctcccagtgggcagagggggagcctcgatatgcactgaccactaccctgagtgcacgagttgctcgacttaatcctacctggaaccaccccgaccaagacactgaggcagggttcaagcgtgcaatggatctggttcaagaggagtttctgcagagattagatttctaccaacacagctggctgccagcccgggccttggtggaagaggcccttgcccagcgattccaggtggacccaagtggagagattgtggaactggcgaaaggtgcatgtccctggaaggagcatctctaccacctggaatctgggctgtcccctccagtggccatcttctttgttatctacactgaccaggctggacagtggcgaatacagtgctgcccctgccagagccatggcggggtcttcgggacgaggccctggaccaggtcagtgggatccctggctgcatcttcgtccatgcaagcggcttcattggcggtcaccgcacccgagagggtgccttgagcatggcccgtgccaccttggcccagcgctcatacctcccacaaatctcctagtctaataaaaccttccatctcatactga

SEQ ID NO: 420792 - DNA, 714 bp, Homo sapiens
cgggtcggcgctcctgcctccctgcagggagctgcttatgggacaccgcttcctgcgcggcctcttaacgctgctgctgccgccgccacccctgtatacccggcaccgcatgctcggtccagagtccgtcccgcccccaaaacgatcccgcagcaaactcatggcaccgccccgaatcgggacgcacaatggcaccttccactgcgacgaggcactggcatgcgcactgcttcgcctcctgccggagtaccgggatgcagagattgtgcggacccgggatcccgaaaaactcgcttcctgtgacatcgtggtggacgtggggggcgagtacgaccctcggagacaccgatatgaccatcaccagaggtctttcacagagaccatgagctccctgtcccctgggaagccgtggcagaccaagctgagcagtgcgggactcatctatctgcacttcgggcacaagctgctggcccagttgctgggcactagtgaagaggacagcatggtgggcaccctctatgacaagatgtatgagaactttgtggaggaggtggatgctgtggacaactggctgcatcttcgtccatgcaagcggcttcattggcggtcaccgcacccgagagggtgccttgagcatggcccgtgccaccttggcccagcgctcatacctcccacaaatctcctagtctaataaaaccttccatctcatactga

SEQ ID NO: 420793 - DNA, 650 bp, Homo sapiens
cgggtcggcgctcctgcctccctgcagggagctgcttatgggacaccgcttcctgcgcggcctcttaacgctgctgctgccgccgccacccctgtatacccggcaccgcatgctcggtccagagtccgtcccgcccccaaaacgatcccgcagcaaactcatggcaccgccccgaatcgggacgcacaatggcaccttccactgcgacgaggcactggcatgcgcactgcttcgcctcctgccggagtaccgggatgcagagattgtgcggacccgggatcccgaaaaactcgcttcctgtgacatcgtggtggacgtggggggcgagtacgaccctcggagacaccgatatgaccatcaccagaggtctttcagcagagaccatgaagctccctgtcccctaggggaagcccgtggcacgaaccaaaggctgacgcagttggccgggaactccattcttaatccttggccaccttttccggggagccaccaaaggcttggcttgggggccccaaggtggcctggggggccaccttaagttgcaaccacacgggacaaggacattggttggaggcaaccccttccttagtggaacccgaaggcatggctactcgccagaaaacctctgcgtaggacacggaacgtatgga

SEQ ID NO: 420794 - DNA, 1765 bp, Homo sapiens
tcctctgtcgagctgatcacacccacagttgagctgcgctggccagagatgcctgcccacagcctggtgatgagcagcccggccctcccggccttcctgctctgcagcacgctgctggtcatcaagatgtacgtggtggccatcatcacgggccaagtgaggctgcggaagaaggcctttgccaaccccgaggatgccctgagacacggaggcccccagtattgcaggagcgaccccgacgtggaacgctgcctcagggcccaccggaacgacatggagaccatctaccccttccttttcctgggcttcgtctactcctttctgggtcctaacccttttgtcgcctggatgcacttcctggtcttcctcgtgggccgtgtggcacacaccgtggcctacctggggaagctgcgggcacccatccgctccgtgacctacaccctggcccagctcccctgcgcctccatggctctgcagatcctctgggaagcggcccgccacctgtgaccagcagctgatgcctccttggccaccagaccatgggccaagagccgccgtggctatacctggggacttgatgttccttccagattgtggtgggccctgagtcctggtttcctggcagcctgctgcgcgtgtgggtctctgggcacagtgggcctgtgtgtgtgcccgtgtgtgtgtatgtgtgtgtgtatgtttcttagccccttggattcctgcacgaagtggctgatgggaaccatttcaagacagattgtgaagattgatagaaaatccttcagctaaagtaacagagcatcaaaaacatcactccctctccctccctaacagtgaaaagagagaagggagactctatttaagattcccaaacctaatgatcatctgaatcccgggctaagaatgcagacttttcagactgaccccagaaattctggcccagccaatctagaggcaagcctggccatctgtatttttttttttccaagacagagtcttgctctgttgcccaagctggagtgaagtggtacaatctggctcactgcagcctccgcctcccgggttcaagcgattctcccgcctcagcctcctgagtagctgggattacaggcgcgtatcaccatacccagctaatttttgtatttttagtagagacgggttcaccatgttgcccaggagggtctcgaactcctggcctcaagtgatccaccggcctcggcctcccaaagtgctgggatgacaggcatgaatcactgtgctcagccaccatctggagttttaaaaggctcccatgtgagtccctgtgatggccaggccaggggacccctgccagttctctgtggaagcaaggctggggtcttgggttcctgtatggtggaagctgggtgagccaaggacagggctggctcctctgcccccgctgacgcttcccttgccgttggctttggatgtctttgctgcagtcttctctctggctcaggtgtgggtgggaggggcccacaggaagctcagccttctcctcccaaggtttgagtccctccaaagggcagtgggtggaggaccgggagctttgggtgaccagccactcaaaggaactttctggtcccttcagtatcttcaaggtttggaaactgcaaatgtccccttgatggggaatccgtgtgtgtgtgtgtgtgtgtgtgtgtgtgtgtgtgtgtgtgtgttttctcctagacccgtgacctgagatgtgtgatttttagtcattaaatggaagtgtctgcca

SEQ ID NO: 420795 - DNA, 772 bp, Homo sapiens
tcctctgtcgagctgatcacacccacagttgagctgcgctggccagagatgcctgcccacagcctggtgatgagcagcccggccctcccggccttcctgctctgcagcacgctgctggtcatcaagatgtacgtggtggccatcatcacgggccaagtgaggctgcggaagaaggcctttgccaaccccgaggatgccctgagacacggaggcccccagtattgcaggagcgaccccgacgtggaacgctgcctcagggcccaccggaacgacatggagaccatctaccccttccttttcctgggcttcgtctactcctttctgggtcctaacccttttgtcgcctggatgcacttcctggtcttcctcgtgggccgtgtggcacacaccgtggcctacctggggaagctgcgggcacccatccgctccgtgacctacaccctggcccagctcccctgcgcctccatggctctgcagatcctctgggaagcggcccgccacctgtgaccagcagctgatgcctccttggccaccagaccatgggccaagagccgccgtggctatacctggggacttgatgttccttccagattgtggtgggccctgagtcctggtttcctggcagcctgctgcgcgtgtgggtctctgggcacagtgggcctgtgtgtgtgcccgtgtgtgtgtatgtgtgtgtgtgtgtgtgtgtgtgttttctcctagacccgtgacctgagatgtgtgatttttagtcattaaatggaagtgtctgcca

SEQ ID NO: 420796 - DNA, 1908 bp, Homo sapiens
tcctctgtcgagctgatcacacccacagttgagctgcgctggccagagatgcctgcccacagcctggtgatgagcagcccggccctcccggccttcctgctctgcagcacgctgctggtcatcaagatgtacgtggtggccatcatcacgggccaagtgaggctgcggaagaaggcctttgccaaccccgaggatgccctgagacacggaggcccccagtattgcaggagcgaccccgacgtggaacgctgcctcagggcccaccggaacgacatggagaccatctaccccttccttttcctgggcttcgtctactcctttctgggtcctaacccttttgtcgcctggatgcacttcctggtcttcctcgtgggccgtgtggcacacaccgtggcctacctggggaagctgcgggcacccatccgctccgtgacctacaccctggcccagctcccctgcgcctccatggctctgcagatcctctgggaagcggcccgccacctgtgaccagcagctgatgcctccttggccaccagaccatgggccaagagccgccgtggctatacctggggacttgatgttccttccagattgtggtgggccctgagtcctggtttcctggcagcctgctgcgcgtgtgggtctctgggcacagtgggcctgtgtgtgtgcccgtgtgtgtgtatgtgtgtgtgtatgtttcttagccccttggattcctgcacgaagtggctgatgggaaccatttcaagacagattgtgaagattgatagaaaatccttcagctaaagtaacagagcatcaaaaacatcactccctctccctccctaacagtgaaaagagagaagggagactctatttaagattcccaaacctaatgatcatctgaatcccgggctaagaatgcagacttttcagactgaccccagaaattctggcccagccaatctagaggcaagcctggccatctgtatttttttttttccaagacagagtcttgctctgttgcccaagctggagtgaagtggtacaatctggctcactgcagcctccgcctcccgggttcaagcgattctcccgcctcagcctcctgagtagctgggattacaggcgcgtatcaccatacccagctaatttttgtatttttagtagagacgggttcaccatgttgcccaggagggtctcgaactcctggcctcaagtgatccaccggcctcggcctcccaaagtgctgggatgacaggcatgaatcactgtgctcagccaccatctggagttttaaaaggctcccatgtgagtccctgtgatggccaggccaggggacccctgccagttctctgtggaagcaaggctggggtcttgggttcctgtatggtggaagctgggtgagccaaggacagggctggctcctctgcccccgctgacgcttcccttgccgttggctttggatgtctttgctgcagtcttctctctggctcaggtgtgggtgggaggggcccacaggaagctcagccttctcctcccaaggtttgagtccctccaaagggcagtgggtggaggaccgggagctttgggtgaccagccactcaaaggaactttctggtcccttcagtatcttcaaggtttggaaactgcaaatgtccccttgatggggaatccgtgtgtgtgtgtgtgtgtgtgtgtgtgtgtgtgtgtgtgtgtgttttctcctagacccgtgacctgagatgtgtgatttttagtcattaaatggaagtgtctgccaaaaaaaaaaaaaaaaaaaaaaaacgggggtttttttggggggggaaaaaaggggtaaaaagggatgggcacaagggtttaccggcccattttttgaaagggggaatgggggccccaatgggggttaaatgagagcgggacgta

SEQ ID NO: 420797 - DNA, 1110 bp, Homo sapiens
tcctctgtcgagctgatcacacccacagttgagctgcgctggccagagatgcctgcccacagcctggtgatgagcagcccggccctcccggccttcctgctctgcagcacgctgctggtcatcaagatgtacgtggtggccatcatcacgggccaagtgaggctgcggaagaaggcctttgccaaccccgaggatgccctgagacacggaggcccccagtattgcaggagcgaccccgacgtggaacgctgcctcagggcccaccggaacgacatggagaccatctaccccttccttttcctgggcttcgtctactcctttctgggtcctaacccttttgtcgcctggatgcacttcctggtcttcctcgtgggccgtgtggcacacaccgtggcctacctggggaagctgcgggcacccatccgctccgtgacctacaccctggcccagctcccctgcgcctccatggctctgcagatcctctgggaagcggcccgccacctgtgaccagcagctgatgcctccttggccaccagaccatgggccaagagccgccgtggctatacctggggacttgatgttccttccagattgtggtgggccctgagtcctggtttcctggcagcctgctgcgcgtgtgggtctctgggcacagtgggcctgtgtgtgtgcccgtgtgtgtgtatgtgtgtgtgtatgtttcttagccccttggattcctgcacgaagtggctgatgggaaccatttcaagacagattgtgaagattgatagaaaatccttcagctaaagtaacagagcatcaaaaacatcactccctctccctccctaacagtgaaaagagagaagggagactctatttaagattcccaaacctaatgatcatctgaatcccgggctaagaatgcagacttttcagactgaccagccactcaaaggaactttctggtcccttcagtatcttcaaggtttggaaactgcaaatgtccccttgatggggaatccgtgtgtgtgtgtgtgtgtgtgtgtgtgtgtgtgtgtgtgtgtgttttctcctagacccgtgacctgagatgtgtgatttttagtcattaaatggaagtgtctgcca

SEQ ID NO: 420798 - DNA, 1074 bp, Homo sapiens
gactagttctagatcgcgatctagaactagtcacgaagtggctgatgggaaccatttcaagacagattgtgaagattgatagaaaatccttcagctaaagtaacagagcatcaaaaacatcactccctctccctccctaacagtgaaaagagagaagggagactctatttaagattcccaaacctaatgatcatctgaatcccgggctaagaatgcagacttttcagactgaccccagaaattctggcccagccaatctagaggcaagcctggccatctgtatttttttttttccaagacagagtcttgctctgttgcccaagctggagtgaagtggtacaatctggctcactgcagcctccgcctcccgggttcaagcgattctcccgcctcagcctcctgagtagctgggattacaggcgcgtatcaccatacccagctaatttttgtatttttagtagagacgggttcaccatgttgcccaggagggtctcgaactcctggcctcaagtgatccaccggcctcggcctcccaaagtgctgggatgacaggcatgaatcactgtgctcagccaccatctggagttttaaaaggctcccatgtgagtccctgtgatggccaggccaggggacccctgccagttctctgtggaagcaaggctggggtcttgggttcctgtatggtggaagctgggtgagccaaggacagggctggctcctctgcccccgctgacgcttcccttgccgttggctttggatgtctttgctgcagtcttctctctggctcaggtgtgggtgggaggggcccacaggaagctcagccttctcctcccaaggtttgagtccctccaaagggcagtgggtggaggaccgggagctttgggtgaccagccactcaaaggaactttctggtcccttcagtatcttcaaggtttggaaactgcaaatgtccccttgatggggaatccgtgtgtgtgtgtgtgtgtgtgtgtgtgtgtgtgtgtgtgtgtgttttctcctagacccgtgacctgagatgtgtgatttttagtcattaaatggaagtgtctgcca

SEQ ID NO: 420799 - DNA, 1195 bp, Homo sapiens
attgtacatgatgtgattgttcatgtgtgctgtgtgtgcgtgtgttctgtgcgtttgtgtgtgctgtgcgtttgcgtgtgtgctgtgtgtgcatgtgtgtgcccgtgtgtgtgtatgtgtgtgtgtatgtttcttagccccttggattcctgcacgaagtggctgatgggaaccatttcaagacagattgtgaagattgatagaaaatccttcagctaaagtaacagagcatcaaaaacatcactccctctccctccctaacagtgaaaagagagaagggagactctatttaagattcccaaacctaatgatcatctgaatcccgggctaagaatgcagacttttcagactgaccccagaaattctggcccagccaatctagaggcaagcctggccatctgtatttttttttttccaagacagagtcttgctctgttgcccaagctggagtgaagtggtacaatctggctcactgcagcctccgcctcccgggttcaagcgattctcccgcctcagcctcctgagtagctgggattacaggcgcgtatcaccatacccagctaatttttgtatttttagtagagacgggttcaccatgttgcccaggagggtctcgaactcctggcctcaagtgatccaccggcctcggcctcccaaagtgctgggatgacaggcatgaatcactgtgctcagccaccatctggagttttaaaaggctcccatgtgagtccctgtgatggccaggccaggggacccctgccagttctctgtggaagcaaggctggggtcttgggttcctgtatggtggaagctgggtgagccaaggacagggctggctcctctgcccccgctgacgcttcccttgccgttggctttggatgtctttgctgcagtcttctctctggctcaggtgtgggtgggaggggcccacaggaagctcagccttctcctcccaaggtttgagtccctccaaagggcagtgggtggaggaccgggagctttgggtgaccagccactcaaaggaactttctggtcccttcagtatcttcaaggtttggaaactgcaaatgtccccttgatggggaatccgtgtgtgtgtgtgtgtgtgtgtgtgtgtgtgtgtgtgtgtgtgttttctcctagacccgtgacctgagatgtgtgatttttagtcattaaatggaagtgtctgcca

SEQ ID NO: 420800 - DNA, 1887 bp, Homo sapiens
tcctctgtcgagctgatcacacccacagttgagctgcgctggccagagatgcctgcccacagcctggtgatgagcagcccggccctcccggccttcctgctctgcagcacgctgctggtcatcaagatgtacgtggtggccatcatcacgggccaagtgaggctgcggaagaagagtctggctctgttgcccaggctggagtgcagtggcaagatcacggctcattgtagcctcgacctcccaggctcaagcaatcctcctgcctcagccctcctgccaagtagctgggaccacaggcctttgccaaccccgaggatgccctgagacacggaggcccccagtattgcaggagcgaccccgacgtggaacgctgcctcagggcccaccggaacgacatggagaccatctaccccttccttttcctgggcttcgtctactcctttctgggtcctaacccttttgtcgcctggatgcacttcctggtcttcctcgtgggccgtgtggcacacaccgtggcctacctggggaagctgcgggcacccatccgctccgtgacctacaccctggcccagctcccctgcgcctccatggctctgcagatcctctgggaagcggcccgccacctgtgaccagcagctgatgcctccttggccaccagaccatgggccaagagccgccgtggctatacctggggacttgatgttccttccagattgtggtgggccctgagtcctggtttcctggcagcctgctgcgcgtgtgggtctctgggcacagtgggcctgtgtgtgtgcccgtgtgtgtgtatgtgtgtgtgtatgtttcttagccccttggattcctgcacgaagtggctgatgggaaccatttcaagacagattgtgaagattgatagaaaatccttcagctaaagtaacagagcatcaaaaacatcactccctctccctccctaacagtgaaaagagagaagggagactctatttaagattcccaaacctaatgatcatctgaatcccgggctaagaatgcagacttttcagactgaccccagaaattctggcccagccaatctagaggcaagcctggccatctgtatttttttttttccaagacagagtcttgctctgttgcccaagctggagtgaagtggtacaatctggctcactgcagcctccgcctcccgggttcaagcgattctcccgcctcagcctcctgagtagctgggattacaggcgcgtatcaccatacccagctaatttttgtatttttagtagagacgggttcaccatgttgcccaggagggtctcgaactcctggcctcaagtgatccaccggcctcggcctcccaaagtgctgggatgacaggcatgaatcactgtgctcagccaccatctggagttttaaaaggctcccatgtgagtccctgtgatggccaggccaggggacccctgccagttctctgtggaagcaaggctggggtcttgggttcctgtatggtggaagctgggtgagccaaggacagggctggctcctctgcccccgctgacgcttcccttgccgttggctttggatgtctttgctgcagtcttctctctggctcaggtgtgggtgggaggggcccacaggaagctcagccttctcctcccaaggtttgagtccctccaaagggcagtgggtggaggaccgggagctttgggtgaccagccactcaaaggaactttctggtcccttcagtatcttcaaggtttggaaactgcaaatgtccccttgatggggaatccgtgtgtgtgtgtgtgtgtgtgtgtgtgtgtgtgtgtgtgtgtgttttctcctagacccgtgacctgagatgtgtgatttttagtcattaaatggaagtgtctgcca

SEQ ID NO: 420801 - DNA, 1083 bp, Homo sapiens
tcctctgtcgagctgatcacacccacagttgagctgcgctggccagagatgcctgcccacagcctggtgatgagcagcccggccctcccggccttcctgctctgcagcacgctgctggtcatcaagatgtacgtggtggccatcatcacgggccaagtgaggctgcggaagaaggcctttgccaaccccgaggatgccctgagacacggaggcccccagtattgcaggagcgaccccgacgtggaacgctgcctcagggcccaccggaacgacatggagaccatctaccccttccttttcctgggcttcgtctactcctttctgggtcctaacccttttgtcgcctggatgcacttcctggtcttcctcgtgggccgtgtggcacacaccgtggcctacctggggaagctgcgggcacccatccgctccgtgacctacaccctggcccagctcccctgcgcctccatggctctgcagatcctctgggaagcggcccgccacctgtgaccagcagctgatgcctccttggccaccagaccatgggccaagagccgccgtggctatacctggggacttgatgttccttccagattgtggtgggccctgagtcctggtttcctggcagcctgctgcgcgtgtgggtctctgggcacagtgggcctgtgtgtgtgcccgtgtgtgtgtatgtgtgtgtgtatgtttcttagccccttggattcctgcacgaagtggctgatgggaaccatttcaagacagattgtgaagattgatagaaaatccttcagctaaagtaacagagcatcaaaaacatcactccctctccctccctaacagtgaaaagagagaagggagactctatttaagattcccaaacctaatgatcatctgaatcccgggctaagaatgcagacttttcagactgaccccagaaattctggcccagccaatctagaggcaagcctggccatctgtatttttttttttccaagacagagtcttgctctgttgcccaagctggagtgaagtgggccgagatcacaccactgcattcgagcctggacaacagagcgataccccatttaa

SEQ ID NO: 420802 - DNA, 656 bp, Homo sapiens
taagctagtagaggcggtgtgaatcggccgaggattttagtagagacgggttcaccatgttgcccaggagggtctcgaactcctggcctcaagtgatccaccggcctcggcctcccaaagtgctgggatgacaggcatgaatcactgtgctcagccaccatctggagttttaaaaggctcccatgtgagtccctgtgatggccaggccaggggacccctgccagttctctgtggaagcaaggctggggtcttgggttcctgtatggtggaagctgggtgagccaaggacagggctggctcctctgcccccgctgacgcttcccttgccgttggctttggatgtctttgctgcagtcttctctctggctcaggtgtgggtgggaggggcccacaggaagctcagccttctcctcccaaggtttgagtccctccaaagggcagtgggtggaggaccgggagctttgggtgaccagccactcaaaggaactttctggtcccttcagtatcttcaaggtttggaaactgcaaatgtccccttgatggggaatccgtgtgtgtgtgtgtgtgtgtgtgtgtgtgtgtgtgtgtgtgtgttttctcctagacccgtgacctgagatgtgtgatttttagtcattaaatggaagtgtctgcca

SEQ ID NO: 420803 - DNA, 2114 bp, Homo sapiens
  misc_feature (272)..(272): n is a, c, g, or t
  misc_feature (285)..(285): n is a, c, g, or t
  misc_feature (492)..(492): n is a, c, g, or t
  misc_feature (869)..(869): n is a, c, g, or t
  misc_feature (1307)..(1307): n is a, c, g, or t
  misc_feature (1924)..(1924): n is a, c, g, or t
tattaaaatccatgagcaagaggaaaattcaaaacaagaggaaaaaaaattgctagcttagaaattaatattaggttcttgggatagaagctgagccttctctgtgatatactaccatgttatgcgtggaatagagaccatccctttcttgaaagttaagctaactcttagaaagccagccctccatataaaacgttttgagatttctgtatttctgaaaatggtttgaataagggacttcaaggctaagaaatttttctatatggaaaatncagggaatgatgntattaaagccatcaaatgtcacaattggggtttggtttttccaggtgaattattggaattctaacatgaatgaagtccagggggtggtgatagatcaggaggggaaggcggtgtaccggctgtttggaaagtggcatgaaggactctactgtggtgtggccccctctgcaaagtgcatttggagaccaggtgagagtggcctgagtnttctgccaacaggagggcactatggacaacagaagggaagagaacatcaggtcatcttatgcaactcacattatgtttcctttaagagtgagattaaaagcgtagatgcttatggcaattatagttacattcatacttaacatagaagttatacataagccccaatatttgatatttcataataaagaatgtaggccaaatctctgacaggcagtcagagattgggcttcatgaaaaattgctcaaagtgtaatgcctacatttgaaaagctaggtatatttattaaagactttagataattgaagtatacaaacttaaaaccttactcatgttatttattctctgctttaataaaacaaagactacaaacatttgnaatccacaaattcaataactcaccagaataagtaatcttttcacttgagcctcaagagacagcaatatgttgacatttaataaaagacatcaaaagagttctgataacacattagcttatgattgaatatcaagtataaatggaacaagtatccacatgacatttattgtcactggaattttgtcagttaatccctaactaaaattagttgttagtttcctaagagacatcaatgagtatttaaatttcccgctagtagagtggctagcttattcattccgcaactatttattgagtgctggctgtacatcaggctttattccaggagctcgggatacgtcaatgagcaagacatacaaagatcctgccttcaagtttagttaaaaagtggcaaaaaatattaatttaggtctgcatatttttcttttctaaaaggangcaaacaagtgtttctggtgtactcttaatgttcatagttaattgccatagtatttagttaaccaattgaatattcaagagaaatattatggagtagtttagctaatgaagactactatatgtgcagttttgtttgaaagacaggattgtattaaatatatgaatctgtcaattctgatcatcaacacaaagtttcctacctaggaataccaccaatttaattcacttgaaaaaatctataatcttgtgtttatgactacaaatttggtgttagtgtaggtactaagtactagggtaagtcagcttcttccagttccataaaccttctgcctctcacagtggttcattggcctctttccaggttccatgccaacaaactatgagctgtactatggcttcacaaggtttgctattgagctcaatgagttagatccagtactaaaagatctccttccaccaacagacgcccggttccggccagatcaaaggtgaggatggcagtggtatttaatatgcagactatggctgggtgcagtagctcatgcctataatcccagcactttagaaggctgaggagggaagatcacttgaggtcaggaattcaagaccagcctggncaatatagtgagactctatatctctaaaaaaaagaattaaaaattagctgggtgtggtggggcatgcctaaagtcccagctactagggaggctgacgtgggaggatcgctcgagcctaggatgttgaggccacagtgagctatgattgtaccattgtactccagccagggcaacagagagagaccctggc

SEQ ID NO: 420804 - DNA, 5977 bp, Homo sapiens
gcccatgcctcctctcctccactagcccgcgcgccagtccgcctgccggggccggctctccgcctcctgcctcccgtcgcagccgcgcagccgccgcagagtccgcggcgccaccgctcgccctccaggttctgccacttgctgggaaaacagcaacagaaggatattaaggagccacccctataatttacccagatagccccagcaaggtcaaagacatatcatgtcccaaggagaaaagctgcaggcatctgaggataaatcactgtgaaacagctttgaccataaagctgacttggaagactttgactccaaggtgcaaggtggtttggacaccctcaatattgcctgctcttttctagtcaaacctgattcatgaaatggaatgaagctgaaaaatcatctacttctttgtttgtggatttgagagaagattgggatggtcttaagtgcataaaacgagactctaactgcagcgatgagttcagatgagaagggcatttcccctgcccataaaacatccactccaacccatagaagtgcctcctcttcaacatcctcccaaagggacagtaggcagagtattcacatactggagaggactgcttcctctagcaccgagccctctgtaagtcggcaattgctagaaccggagccagtccccctctccaaggaagctgacagctgggaaattatagaagggctgaaaataggccaaaccaatgtccagaaaccagacaaacatgagggctttatgctgaagaaaagaaaatggcctttaaaaggctggcacaagcgtttttttgtcctggataatggaatgttaaagtattcaaaggcaccactcgatattcagaaaggaaaggtccatgggagcatagatgtgggactctcagtcatgtcaattaaaaagaaagctcgaagaatagaccttgacaccgaagagcacatctatcatttgaaggtgaaatcccaggactggtttgatgcatgggtctccaaactgcgacatcatcggttgtatcgtcagaatgaaattgtgagatcaccaagagatgctagttttcacatatttccttcaacgtccacagctgaatcctcaccagctgctaatgtttctgtaatggatggaaagatgcaaccaaacagctttccgtggcagtcccctttaccatgcagcaatagcctccctgcaacgtgcacaactggccagagtaaagtggcagcctggttacaggactcggaagagatggacaggtgtgcagaagatcttgcacattgccagtcaaaccttgtggaacttagcaaactcctgcaaaatttggaaatacttcagagaactcagtcagcacctaactttactgacatgcaggctaactgtgtagatatttcaaagaaagacaagcgggtcacaagacgatggagaacaaaaagtgtcagcaaagatacaaaaatacaactgcaggttcctttcagtgctaccatgtcaccagttcgcttgcattcctccaaccccaacctttgtgcagatattgaatttcagactccccctagccacctcactgaccctctggaaagttcaacagattatacaaagctgcaagaagaattttgtctaatcgcacagaaagtgcattctcttttgaagtctgcatttaatagcatagctatagagaaggagaagctgaagcagatggtttccgagcaggatcacagtaaaggccacagcacgcagatggcacggctccgacagtcactgtctcaggcactcaaccagaatgctgaactaaggagtcggttgaacagaatacattcagagtctattatttgtgatcaggttgtcagtgtaaatattattcctagccctgatgaggctggtgagcaaatccatgtcagtctccccttatcacagcaagtagccaatgagagccgcctctccatgtcagagtctgtttctgagttctttgatgcccaagaggtgctcctctctgcaagttcgtcagagaatgaggcttcagatgatgagtcttacatcagtgatgtgagtgataatatatctgaagacaacaccagtgttgcagacaatatttctcggcaaatcctgaatggggagcttacaggaggggccttccgaaatgggcgtcgagcatgcctgccagctccttgtcctgacaccagtaacattaacctgtggaatatcttgaggaacaacattggtaaagacctgtctaaagtctctatgcctgtggagctaaacgagccgctcaacaccctgcagcacctctgtgaggaaatggaatacagcgagctcctggacaaggcttcggaaactgatgatccatatgagcgcatggttctcgttgccgcatttgcagtttcaggatactgctccacctatttcagagcaggaagtaagccattcaacccagtccttggggagacttatgaatgcattagagaagacaagggattccgctttttctcagaacaggttagccatcatccacccatttctgcctgtcactgtgaatcaaagaattttgtgttttggcaagatatcagatggaaaaacaagttctgggggaagtcgatggaaatcctgcctgttggaacactgaatgtcatgcttccaaagtatggagattactatgtgtggaataaagtcaccacttgcatacacaacatcctcagtgggagaagatggatagaacattatggagaagtaaccatcagaaataccaaaagcagtgtttgcatttgcaaactcacatttgtcaaggtgaattattggaattctaacatgaatgaagtccagggggtggtgatagatcaggaggggaaggcggtgtaccggctgtttggaaagtggcatgaaggactctactgtggtgtggccccctctgcaaagtgcatttggagaccaggttccatgccaacaaactatgagctgtactatggcttcacaaggtttgctattgagctcaatgagttagatccagtactaaaagatctccttccaccaacagacgcccggttccggccagatcaaagatttttggaagaaggaaatttagaagctgcagcatcagagaagcaaagagtagaggaactccagagatctcggagacgatatatggaagaaaacaatcttgaacatataccaaaattttttaaaaaagttattgatgccaatcaaagagaagcctgggtttctaacgacacctactgggagcttcgaaaggaccctgggtttagcaaagtagacagccctgttctttggtagactgggaatgtagagctagccaacatatcacattctgaatgaataaataactatgcacaattatgtttcttatagctatgtgtggtttctgggtcaactgaaaacctaccatttgcttttctattcatctttataatggactttcagaagtgcattagacaaggcccctaaccactttgggatcctttctgttttgctgcaaccatattccttaaaaaaaaaaaaaaaaaaaaaaaaaaaatccacaccgtccttggaaagcagaataaaaggagcagaatataaaatccaaagtctgaccagtttgtaaagaaaaacaaatggtaactggtgcttaaagctgatcaagaaagttaacaacaacatagaaaccacacgattgttccactgtctggaagcaccatcccctatcgcaggactcctgggccacaagcagtcggtcagtgcagacttcaagtgtgtctgtttgatgtggtgtgattgtgctggccttgtcgaaaaagatgtgatgcttctcagaacctgttccatctgtatgccattgttcatgccttaagaaatgcaaagatgtacaataaatcatttttaaaatgtgtgctcataggtttatgtgaagaacagattttttgaatcatggcatgattcactttctcaatcaggacaattatgagactaacttaaatgggttttttaaaagtgaacaacacgtgctttactctgataagtcagttaccatatggtatgtctgaagggaaagaaggaaaagacgtgctaagtagatctctgtatttacgtggctcgttaatttcctgtcctgcgtccagataataaaccatccctcttccacctaacctcacagtgtgccctattatttggaaaaatctgtctttgatttggacatttggtcatcagtgttaaaaccttaaaaggaaataacaaaaagcatatggaattcctgtgtgggcttagtagtactataaatgtaattgtttttgagtgaagcaccatgtaatccatgtctcaatcccatgcccgctccactgacactagtcgaattccactgagaacagaagcaagaataatagtagtttatttgcattgtttaaatgaattctatgcaaaatcatatttcaaattttcatcaagtgattccatatggtacatggctacatattaagcatttaccttgctattggcagagatatgaaacttaagctaaggaatgtatccatcccaaagcaggaaagcagaagtgtgttttgcatacttcaggatttgtttttcctccactaatatacagaggcttttgcagaaaacttgcatcagtattcctgtttctgcacgtaggtgactatataaatgcctgtatgttttttttaaaatatctcctcagagattttcctagggaattataaaattacatatattttattgttagttagatgtttattcttggattcttaccattagaatttaagtgttatttaaaactctgatacagttacagacactttacattttattatgaggtgttgattttagtggtatttctcctcagcaaagcattcctaataatggctaatacaccatcaaatgaaaaactgctgatgagagtgtaagagaaagcgctaacgtttccactagatggcgcaatattttatttatccaaaactcctcccttgcatctgagtttttatgttatgtgtacagtctgcattagcttagaatggaatttcattctcaggtaaattttcgaatccatcaccagatctaagcattctgcttcaacaataccctctctattcctctcattcccattttaaatccataggtggcttgccctgcggcagtaaaatcttccccttgatattgattctttttctgctcattcatcttgatgttctttttctgcatcctgagatacatgtcgttaattttaataagaatcctattgacttcctcacgggagtctgttctcctatggttgataaagctttaaatactatttaaagtggttctggtctgtacttactagcacttccctgaacagtctcaaaatagcctaaacataagaaaacaatcctgcaaagtaaaggtttttacaagcagagatgaaggaaagggagcagcagctgaccatcagatgtggtatcaggtagctggaagaggatccaggacccatcagggaagcaacgactgtacttagcaatttgggttataattacaaaaaagaaaaaatagtagaaaggatctttaccagacagtaaggtcatggtacaaatcaggtgagtgaatgttggtcagaggtagcctgacactctgatgaggacttcaagatgagaatgagaaaaatgtctattaaaatcactacatttgataatatctcagatttagaatctcttttgggattcagatagtctgattattccaattcaagtgttcagttaagttttagttactattcctataatacccaattcactaatatcatatctcctgtggaatattcattggtgcgatggcctcatccccttttttactttttattgacatggtggttataaaatgaagagacttactctattggaattttcatctacgtagtatttgggctgtcaagactaaatagcaaaagggtagaatattagatcattctcttaataagacctgatttattccttaggatgttataca

SEQ ID NO: 420805 - DNA, 5869 bp, Homo sapiens
gcccatgcctcctctcctccactagcccgcgcgccagtccgcctgccggggccggctctccgcctcctgcctcccgtcgcagccgcgcagccgccgcagagtccgcggcgccaccgctcgccctccaggttctgccacttgctgggaaaacagcaacagaaggatattaaggagccacccctataatttacccagatagccccagcaaggtcaaagacatatcatgtcccaaggagaaaagctgcaggcatctgaggataaatcactgtgaaacagctttgaccataaagctgacttggaagactttgactccaaggtgcaaggtggtttggacaccctcaatattgcctgctcttttctagtcaaacctgattcatgaaatggaatgaagctgaaaaatcatctacttctttgtttgtggatttgagagaagattgggatggtcttaagtgcataaaacgagactctaactgcagcgatgagttcagatgagaagggcatttcccctgcccataaaacatccactccaacccatagaagtgcctcctcttcaacatcctcccaaagggacagtaggcagagtattcacatactggagaggactgcttcctctagcaccgagccctctgtaagtcggcaattgctagaaccggagccagtccccctctccaaggaagctgacagctgggaaattatagaagggctgaaaataggccaaaccaatgtccagaaaccagacaaacatgagggctttatgctgaagaaaagaaaatggcctttaaaaggctggcacaagcgtttttttgtcctggataatggaatgttaaagtattcaaaggcaccactcgatattcagaaaggaaaggtccatgggagcatagatgtgggactctcagtcatgtcaattaaaaagaaagctcgaagaatagaccttgacaccgaagagcacatctatcatttgaaggtgaaatcccaggactggtttgatgcatgggtctccaaactgcgacatcatcggttgtatcgtcagaatgaaattgtgagatcaccaagagatgctagttttcacatatttccttcaacgtccacagctgaatcctcaccagctgctaatgtttctgtaatggatggaaagatgcaaccaaacagctttccgtggcagtcccctttaccatgcagcaatagcctccctgcaacgtgcacaactggccagagtaaagtggcagcctggttacaggactcggaagagatggacaggtgtgcagaagatcttgcacattgccagtcaaaccttgtggaacttagcaaactcctgcaaaatttggaaatacttcagagaactcagtcagcacctaactttactgacatgcaggctaactgtgtagatatttcaaagaaagacaagcgggtcacaagacgatggagaacaaaaagtgtcagcaaagatacaaaaatacaactgcaggttcctttcagtgctaccatgtcaccagttcgcttgcattcctccaaccccaacctttgtgcagatattgaatttcagactccccctagccacctcactgaccctctggaaagttcaacagattatacaaagctgcaagaagaattttgtctaatcgcacagaaagtgcattctcttttgaagtctgcatttaatagcatagctatagagaaggagaagctgaagcagatggtttccgagcaggatcacagtaaaggccacagcacgcagatggcacggctccgacagtcactgtctcaggctggtgagcaaatccatgtcagtctccccttatcacagcaagtagccaatgagagccgcctctccatgtcagagtctgtttctgagttctttgatgcccaagaggtgctcctctctgcaagttcgtcagagaatgaggcttcagatgatgagtcttacatcagtgatgtgagtgataatatatctgaagacaacaccagtgttgcagacaatatttctcggcaaatcctgaatggggagcttacaggaggggccttccgaaatgggcgtcgagcatgcctgccagctccttgtcctgacaccagtaacattaacctgtggaatatcttgaggaacaacattggtaaagacctgtctaaagtctctatgcctgtggagctaaacgagccgctcaacaccctgcagcacctctgtgaggaaatggaatacagcgagctcctggacaaggcttcggaaactgatgatccatatgagcgcatggttctcgttgccgcatttgcagtttcaggatactgctccacctatttcagagcaggaagtaagccattcaacccagtccttggggagacttatgaatgcattagagaagacaagggattccgctttttctcagaacaggttagccatcatccacccatttctgcctgtcactgtgaatcaaagaattttgtgttttggcaagatatcagatggaaaaacaagttctgggggaagtcgatggaaatcctgcctgttggaacactgaatgtcatgcttccaaagtatggagattactatgtgtggaataaagtcaccacttgcatacacaacatcctcagtgggagaagatggatagaacattatggagaagtaaccatcagaaataccaaaagcagtgtttgcatttgcaaactcacatttgtcaaggtgaattattggaattctaacatgaatgaagtccagggggtggtgatagatcaggaggggaaggcggtgtaccggctgtttggaaagtggcatgaaggactctactgtggtgtggccccctctgcaaagtgcatttggagaccaggttccatgccaacaaactatgagctgtactatggcttcacaaggtttgctattgagctcaatgagttagatccagtactaaaagatctccttccaccaacagacgcccggttccggccagatcaaagatttttggaagaaggaaatttagaagctgcagcatcagagaagcaaagagtagaggaactccagagatctcggagacgatatatggaagaaaacaatcttgaacatataccaaaattttttaaaaaagttattgatgccaatcaaagagaagcctgggtttctaacgacacctactgggagcttcgaaaggaccctgggtttagcaaagtagacagccctgttctttggtagactgggaatgtagagctagccaacatatcacattctgaatgaataaataactatgcacaattatgtttcttatagctatgtgtggtttctgggtcaactgaaaacctaccatttgcttttctattcatctttataatggactttcagaagtgcattagacaaggcccctaaccactttgggatcctttctgttttgctgcaaccatattccttaaaaaaaaaaaaaaaaaaaaaaaaaaaatccacaccgtccttggaaagcagaataaaaggagcagaatataaaatccaaagtctgaccagtttgtaaagaaaaacaaatggtaactggtgcttaaagctgatcaagaaagttaacaacaacatagaaaccacacgattgttccactgtctggaagcaccatcccctatcgcaggactcctgggccacaagcagtcggtcagtgcagacttcaagtgtgtctgtttgatgtggtgtgattgtgctggccttgtcgaaaaagatgtgatgcttctcagaacctgttccatctgtatgccattgttcatgccttaagaaatgcaaagatgtacaataaatcatttttaaaatgtgtgctcataggtttatgtgaagaacagattttttgaatcatggcatgattcactttctcaatcaggacaattatgagactaacttaaatgggttttttaaaagtgaacaacacgtgctttactctgataagtcagttaccatatggtatgtctgaagggaaagaaggaaaagacgtgctaagtagatctctgtatttacgtggctcgttaatttcctgtcctgcgtccagataataaaccatccctcttccacctaacctcacagtgtgccctattatttggaaaaatctgtctttgatttggacatttggtcatcagtgttaaaaccttaaaaggaaataacaaaaagcatatggaattcctgtgtgggcttagtagtactataaatgtaattgtttttgagtgaagcaccatgtaatccatgtctcaatcccatgcccgctccactgacactagtcgaattccactgagaacagaagcaagaataatagtagtttatttgcattgtttaaatgaattctatgcaaaatcatatttcaaattttcatcaagtgattccatatggtacatggctacatattaagcatttaccttgctattggcagagatatgaaacttaagctaaggaatgtatccatcccaaagcaggaaagcagaagtgtgttttgcatacttcaggatttgtttttcctccactaatatacagaggcttttgcagaaaacttgcatcagtattcctgtttctgcacgtaggtgactatataaatgcctgtatgttttttttaaaatatctcctcagagattttcctagggaattataaaattacatatattttattgttagttagatgtttattcttggattcttaccattagaatttaagtgttatttaaaactctgatacagttacagacactttacattttattatgaggtgttgattttagtggtatttctcctcagcaaagcattcctaataatggctaatacaccatcaaatgaaaaactgctgatgagagtgtaagagaaagcgctaacgtttccactagatggcgcaatattttatttatccaaaactcctcccttgcatctgagtttttatgttatgtgtacagtctgcattagcttagaatggaatttcattctcaggtaaattttcgaatccatcaccagatctaagcattctgcttcaacaataccctctctattcctctcattcccattttaaatccataggtggcttgccctgcggcagtaaaatcttccccttgatattgattctttttctgctcattcatcttgatgttctttttctgcatcctgagatacatgtcgttaattttaataagaatcctattgacttcctcacgggagtctgttctcctatggttgataaagctttaaatactatttaaagtggttctggtctgtacttactagcacttccctgaacagtctcaaaatagcctaaacataagaaaacaatcctgcaaagtaaaggtttttacaagcagagatgaaggaaagggagcagcagctgaccatcagatgtggtatcaggtagctggaagaggatccaggacccatcagggaagcaacgactgtacttagcaatttgggttataattacaaaaaagaaaaaatagtagaaaggatctttaccagacagtaaggtcatggtacaaatcaggtgagtgaatgttggtcagaggtagcctgacactctgatgaggacttcaagatgagaatgagaaaaatgtctattaaaatcactacatttgataatatctcagatttagaatctcttttgggattcagatagtctgattattccaattcaagtgttcagttaagttttagttactattcctataatacccaattcactaatatcatatctcctgtggaatattcattggtgcgatggcctcatccccttttttactttttattgacatggtggttataaaatgaagagacttactctattggaattttcatctacgtagtatttgggctgtcaagactaaatagcaaaagggtagaatattagatcattctcttaataagacctgatttattccttaggatgttataca

SEQ ID NO: 420806 - DNA, 2120 bp, Homo sapiens
gcggggtcccgagaaggcggggcgggcggaggctggaggagccgcggagcggagacccgggagcaggagctgggcctaggtctgcgccctggcagccgtgtctgtgtttttgtctcgcagaattagagcccattgggaacgatgccaccaccgtcagacattgtcaaagtggccattgagtggccaggtgctaacgcccagctccttgaaatcgaccagaaacggcccctggcatccattatcaaggaagtttgtgatgggtggtcgttgccaaacccagagtattataccctccgttatgcagatggtcctcagctgtacatcaccgaacagactcgcagtgacattaagaatgggacaatcttacaactggctatctccccgtcccgggctgcacgccagctgatggagaggacccagtcatccaacatggagacccggctggatgccatgaaggagctggccaagctctctgccgacgtgactttcgctactgagttcatcaacatggatggcatcattgtgctgacaaggctcgtggaaagtggaaccaagctcttgtcccactacagtgagatgctggcattcaccctgactgccttcctagagctcatggaccatggcattgtctcctgggacatggtttcaatcacctttattaagcagattgcagggtatgtgagccagcccatggtggacgtgtcaatccttcagaggtccctggccatcctggagagcatggtcttgaacagccagagtctgtaccagaagatagccgaggaaatcaccgtgggacagctcatctcacacctccaggtctccaaccaggagattcagacctacgccattgcactgattaatgcactttttctgaaggctcctgaggacaaacgacaggatatggcaaatgcatttgcacagaagcatctccggtctataatcctgaatcatgtgatccgagggaaccgccccatcaaaactgagatggcccatcagctatatgtccttcaagtcctaacctttaaccttctggaagaaaggatgatgaccaagatggaccccaatgaccaggctcaaagggacatcatatttgaactgaggaggattgcatttgacgcagagtctgatcctagcaatgcccctgggagtgggaccgaaaaacgcaaagccatgtacacaaaggactacaaaatgctgggatttaccaaccacatcaatccagccatggactttacccagactcctcctggaatgctggccttggacaacatgctgtacttggctaaagtccaccaggacacctacatccggattgtcttggagaacagtagccgggaagacaaacatgaatgcccctttggccgcagtgccattgagctcaccaaaatgctctgtgaaatcctgcaggttggggaactaccaaatgaaggacgcaatgactaccacccgatgttctttacccatgaccgagcctttgaagagctctttggaatctgcatccagctgttgaacaagacctggaaggagatgagggcaacagcagaggacttcaacaaggtcagtgtctccgggctgctctgaggcccacgggaggagaccatcacacgacagcctttgacagctggctggcacctggagaatccctgagctggaaaagcagcttggtctgcagaactgagtcacaagactgaggcactggggagcctcagccccatctggttgttgctccctctgtgaccttgagcttgtcttccacttggtgccgtaggccctcatttgtccattgaagttagcacctgtccctcccgtcctccagagaggtcaggaggataagcattagaagactcactgtggtttattgagtgcttactgtgcaggtactgctgtagttttgtgaactgggaaggttaggagagaagagtggactggcatgatgtgcacaccctgggtacttaatcgatagttatccctcggtgctttcagtcctcactctatgcagagcactgttgtgccaggccctcaaaagctgatcatctaggggtcgagtgttttgaagttgatcatctcatcataaaaaatttggaaagtataaagaataaaaagttacctgtatttacacc

SEQ ID NO: 420807 - DNA, 2166 bp, Homo sapiens
gcggggtcccgagaaggcggggcgggcggaggctggaggagccgcggagcggagacccgggagcaggagctgggcctaggtctgcgccctggagggaggtgtagaaagaggtacatggagaacaagtttgtcaatccgtctgaacttcagttgccttacctgtaagaattagagcccattgggaacgatgccaccaccgtcagacattgtcaaagtggccattgagtggccaggtgctaacgcccagctccttgaaatcgaccagaaacggcccctggcatccattatcaaggaagtttgtgatgggtggtcgttgccaaacccagagtattataccctccgttatgcagatggtcctcagctgtacatcaccgaacagactcgcagtgacattaagaatgggacaatcttacaactggctatctccccgtcccgggctgcacgccagctgatggagaggacccagtcatccaacatggagacccggctggatgccatgaaggagctggccaagctctctgccgacgtgactttcgctactgagttcatcaacatggatggcatcattgtgctgacaaggctcgtggaaagtggaaccaagctcttgtcccactacagtgagatgctggcattcaccctgactgccttcctagagctcatggaccatggcattgtctcctgggacatggtttcaatcacctttattaagcagattgcagggtatgtgagccagcccatggtggacgtgtcaatccttcagaggtccctggccatcctggagagcatggtcttgaacagccagagtctgtaccagaagatagccgaggaaatcaccgtgggacagctcatctcacacctccaggtctccaaccaggagattcagacctacgccattgcactgattaatgcactttttctgaaggctcctgaggacaaacgacaggatatggcaaatgcatttgcacagaagcatctccggtctataatcctgaatcatgtgatccgagggaaccgccccatcaaaactgagatggcccatcagctatatgtccttcaagtcctaacctttaaccttctggaagaaaggatgatgaccaagatggaccccaatgaccaggctcaaagggacatcatatttgaactgaggaggattgcatttgacgcagagtctgatcctagcaatgcccctgggagtgggaccgaaaaacgcaaagccatgtacacaaaggactacaaaatgctgggatttaccaaccacatcaatccagccatggactttacccagactcctcctggaatgctggccttggacaacatgctgtacttggctaaagtccaccaggacacctacatccggattgtcttggagaacagtagccgggaagacaaacatgaatgcccctttggccgcagtgccattgagctcaccaaaatgctctgtgaaatcctgcaggttggggaactaccaaatgaaggacgcaatgactaccacccgatgttctttacccatgaccgagcctttgaagagctctttggaatctgcatccagctgttgaacaagacctggaaggagatgagggcaacagcagaggacttcaacaaggtcagtgtctccgggctgctctgaggcccacgggaggagaccatcacacgacagcctttgacagctggctggcacctggagaatccctgagctggaaaagcagcttggtctgcagaactgagtcacaagactgaggcactggggagcctcagccccatctggttgttgctccctctgtgaccttgagcttgtcttccacttggtgccgtaggccctcatttgtccattgaagttagcacctgtccctcccgtcctccagagaggtcaggaggataagcattagaagactcactgtggtttattgagtgcttactgtgcaggtactgctgtagttttgtgaactgggaaggttaggagagaagagtggactggcatgatgtgcacaccctgggtacttaatcgatagttatccctcggtgctttcagtcctcactctatgcagagcactgttgtgccaggccctcaaaagctgatcatctaggggtcgagtgttttgaagttgatcatctcatcataaaaaatttggaaagtataaagaataaaaagttacctgtatttacacc

SEQ ID NO: 420808 - DNA, 2196 bp, Homo sapiens
acgtacatccatcatggcctcatacatgagaggcatggtgaccaagaagggctcagatcgcttaggaatgaaggttggggtcacaccatcaggagggaggtgtagaaagaggtacatggagaacaagtttgtcaatccgtctgaacttcagttgccttacctgtaaggcagccgtgtctgtgtttttgtctcgcagaattagagcccattgggaacgatgccaccaccgtcagacattgtcaaagtggccattgagtggccaggtgctaacgcccagctccttgaaatcgaccagaaacggcccctggcatccattatcaaggaagtttgtgatgggtggtcgttgccaaacccagagtattataccctccgttatgcagatggtcctcagctgtacatcaccgaacagactcgcagtgacattaagaatgggacaatcttacaactggctatctccccgtcccgggctgcacgccagctgatggagaggacccagtcatccaacatggagacccggctggatgccatgaaggagctggccaagctctctgccgacgtgactttcgctactgagttcatcaacatggatggcatcattgtgctgacaaggctcgtggaaagtggaaccaagctcttgtcccactacagtgagatgctggcattcaccctgactgccttcctagagctcatggaccatggcattgtctcctgggacatggtttcaatcacctttattaagcagattgcagggtatgtgagccagcccatggtggacgtgtcaatccttcagaggtccctggccatcctggagagcatggtcttgaacagccagagtctgtaccagaagatagccgaggaaatcaccgtgggacagctcatctcacacctccaggtctccaaccaggagattcagacctacgccattgcactgattaatgcactttttctgaaggctcctgaggacaaacgacaggatatggcaaatgcatttgcacagaagcatctccggtctataatcctgaatcatgtgatccgagggaaccgccccatcaaaactgagatggcccatcagctatatgtccttcaagtcctaacctttaaccttctggaagaaaggatgatgaccaagatggaccccaatgaccaggctcaaagggacatcatatttgaactgaggaggattgcatttgacgcagagtctgatcctagcaatgcccctgggagtgggaccgaaaaacgcaaagccatgtacacaaaggactacaaaatgctgggatttaccaaccacatcaatccagccatggactttacccagactcctcctggaatgctggccttggacaacatgctgtacttggctaaagtccaccaggacacctacatccggattgtcttggagaacagtagccgggaagacaaacatgaatgcccctttggccgcagtgccattgagctcaccaaaatgctctgtgaaatcctgcaggttggggaactaccaaatgaaggacgcaatgactaccacccgatgttctttacccatgaccgagcctttgaagagctctttggaatctgcatccagctgttgaacaagacctggaaggagatgagggcaacagcagaggacttcaacaaggtcagtgtctccgggctgctctgaggcccacgggaggagaccatcacacgacagcctttgacagctggctggcacctggagaatccctgagctggaaaagcagcttggtctgcagaactgagtcacaagactgaggcactggggagcctcagccccatctggttgttgctccctctgtgaccttgagcttgtcttccacttggtgccgtaggccctcatttgtccattgaagttagcacctgtccctcccgtcctccagagaggtcaggaggataagcattagaagactcactgtggtttattgagtgcttactgtgcaggtactgctgtagttttgtgaactgggaaggttaggagagaagagtggactggcatgatgtgcacaccctgggtacttaatcgatagttatccctcggtgctttcagtcctcactctatgcagagcactgttgtgccaggccctcaaaagctgatcatctaggggtcgagtgttttgaagttgatcatctcatcataaaaaatttggaaagtataaagaataaaaagttacctgtatttacacc

SEQ ID NO: 420809 - DNA, 2047 bp, Homo sapiens
gcggggtcccgagaaggcggggcgggcggaggctggaggagccgcggagcggagacccgggagcaggagctgggcctaggtctgcgccctggcagccgtgtctgtgtttttgtctcgcagaattagagcccattgggaacgatgccaccaccgtcagacattgtcaaagtggccattgagtggccaggtgctaacgcccagctccttgaaatcgaccagaaacggcccctggcatccattatcaaggaagtttgtgatggactcgcagtgacattaagaatgggacaatcttacaactggctatctccccgtcccgggctgcacgccagctgatggagaggacccagtcatccaacatggagacccggctggatgccatgaaggagctggccaagctctctgccgacgtgactttcgctactgagttcatcaacatggatggcatcattgtgctgacaaggctcgtggaaagtggaaccaagctcttgtcccactacagtgagatgctggcattcaccctgactgccttcctagagctcatggaccatggcattgtctcctgggacatggtttcaatcacctttattaagcagattgcagggtatgtgagccagcccatggtggacgtgtcaatccttcagaggtccctggccatcctggagagcatggtcttgaacagccagagtctgtaccagaagatagccgaggaaatcaccgtgggacagctcatctcacacctccaggtctccaaccaggagattcagacctacgccattgcactgattaatgcactttttctgaaggctcctgaggacaaacgacaggatatggcaaatgcatttgcacagaagcatctccggtctataatcctgaatcatgtgatccgagggaaccgccccatcaaaactgagatggcccatcagctatatgtccttcaagtcctaacctttaaccttctggaagaaaggatgatgaccaagatggaccccaatgaccaggctcaaagggacatcatatttgaactgaggaggattgcatttgacgcagagtctgatcctagcaatgcccctgggagtgggaccgaaaaacgcaaagccatgtacacaaaggactacaaaatgctgggatttaccaaccacatcaatccagccatggactttacccagactcctcctggaatgctggccttggacaacatgctgtacttggctaaagtccaccaggacacctacatccggattgtcttggagaacagtagccgggaagacaaacatgaatgcccctttggccgcagtgccattgagctcaccaaaatgctctgtgaaatcctgcaggttggggaactaccaaatgaaggacgcaatgactaccacccgatgttctttacccatgaccgagcctttgaagagctctttggaatctgcatccagctgttgaacaagacctggaaggagatgagggcaacagcagaggacttcaacaaggtcagtgtctccgggctgctctgaggcccacgggaggagaccatcacacgacagcctttgacagctggctggcacctggagaatccctgagctggaaaagcagcttggtctgcagaactgagtcacaagactgaggcactggggagcctcagccccatctggttgttgctccctctgtgaccttgagcttgtcttccacttggtgccgtaggccctcatttgtccattgaagttagcacctgtccctcccgtcctccagagaggtcaggaggataagcattagaagactcactgtggtttattgagtgcttactgtgcaggtactgctgtagttttgtgaactgggaaggttaggagagaagagtggactggcatgatgtgcacaccctgggtacttaatcgatagttatccctcggtgctttcagtcctcactctatgcagagcactgttgtgccaggccctcaaaagctgatcatctaggggtcgagtgttttgaagttgatcatctcatcataaaaaatttggaaagtataaagaataaaaagttacctgtatttacacc

SEQ ID NO: 420810 - DNA, 2264 bp, Homo sapiens
acgtacatccatcatggcctcatacatgagaggcatggtgaccaagaagggctcagatcgcttaggaatgaaggttggggtcacaccatcaggagggaggtgtagaaagaggtacatggagaacaagtttgtcaatccgtctgaacttcagttgccttacctgtaaggcagccgtgtctgtgtttttgtctcgcagaattagagcccattgggaacgatgccaccaccgtcagacattgtcaaagtggccattgagtggccaggtgctaacgcccagctccttgaaatcgaccagaaacggcccctggcatccattatcaaggaagtttgtgatgggtaggttgaaatggacctcgttttcaacagtggcagctccgactgaaagagcactcctacaccttgaggtggtcgttgccaaacccagagtattataccctccgttatgcagatggtcctcagctgtacatcaccgaacagactcgcagtgacattaagaatgggacaatcttacaactggctatctccccgtcccgggctgcacgccagctgatggagaggacccagtcatccaacatggagacccggctggatgccatgaaggagctggccaagctctctgccgacgtgactttcgctactgagttcatcaacatggatggcatcattgtgctgacaaggctcgtggaaagtggaaccaagctcttgtcccactacagtgagatgctggcattcaccctgactgccttcctagagctcatggaccatggcattgtctcctgggacatggtttcaatcacctttattaagcagattgcagggtatgtgagccagcccatggtggacgtgtcaatccttcagaggtccctggccatcctggagagcatggtcttgaacagccagagtctgtaccagaagatagccgaggaaatcaccgtgggacagctcatctcacacctccaggtctccaaccaggagattcagacctacgccattgcactgattaatgcactttttctgaaggctcctgaggacaaacgacaggatatggcaaatgcatttgcacagaagcatctccggtctataatcctgaatcatgtgatccgagggaaccgccccatcaaaactgagatggcccatcagctatatgtccttcaagtcctaacctttaaccttctggaagaaaggatgatgaccaagatggaccccaatgaccaggctcaaagggacatcatatttgaactgaggaggattgcatttgacgcagagtctgatcctagcaatgcccctgggagtgggaccgaaaaacgcaaagccatgtacacaaaggactacaaaatgctgggatttaccaaccacatcaatccagccatggactttacccagactcctcctggaatgctggccttggacaacatgctgtacttggctaaagtccaccaggacacctacatccggattgtcttggagaacagtagccgggaagacaaacatgaatgcccctttggccgcagtgccattgagctcaccaaaatgctctgtgaaatcctgcaggttggggaactaccaaatgaaggacgcaatgactaccacccgatgttctttacccatgaccgagcctttgaagagctctttggaatctgcatccagctgttgaacaagacctggaaggagatgagggcaacagcagaggacttcaacaaggtcagtgtctccgggctgctctgaggcccacgggaggagaccatcacacgacagcctttgacagctggctggcacctggagaatccctgagctggaaaagcagcttggtctgcagaactgagtcacaagactgaggcactggggagcctcagccccatctggttgttgctccctctgtgaccttgagcttgtcttccacttggtgccgtaggccctcatttgtccattgaagttagcacctgtccctcccgtcctccagagaggtcaggaggataagcattagaagactcactgtggtttattgagtgcttactgtgcaggtactgctgtagttttgtgaactgggaaggttaggagagaagagtggactggcatgatgtgcacaccctgggtacttaatcgatagttatccctcggtgctttcagtcctcactctatgcagagcactgttgtgccaggccctcaaaagctgatcatctaggggtcgagtgttttgaagttgatcatctcatcataaaaaatttggaaagtataaagaataaaaagttacctgtatttacacc

SEQ ID NO: 420811 - DNA, 1229 bp, Homo sapiens
  misc_feature (24)..(24): n is a, c, g, or t
tccccccccccccctcctctactnacggctaggtacgaggctgggttgtgctccggtctataatcctgaatcatgtgatccgagggaaccgccccatcaaaactgagatggcccatcagctatatgtccttcaagtcctaacctttaaccttctggaagaaaggatgatgaccaagatggaccccaatgaccaggctcaaagggacatcatatttgaactgaggaggattgcatttgacgcagagtctgatcctagcaatgcccctgggagtgggaccgaaaaacgcaaagccatgtacacaaaggactacaaaatgctgggatttaccaaccacatcaatccagccatggactttacccagactcctcctggaatgctggccttggacaacatgctgtacttggctaaagtccaccaggacacctacatccggattgtcttggagaacagtagccgggaagacaaacatgaatgcccctttggccgcagtgccattgagctcaccaaaatgctctgtgaaatcctgcaggttggggaactaccaaatgaaggacgcaatgactaccacccgatgttctttacccatgaccgagcctttgaagagctctttggaatctgcatccagctgttgaacaagacctggaaggagatgagggcaacagcagaggacttcaacaaggttatgcaagtcgtccgagagcaaatcactcgagctttgccctccaaacccaactctttggatcagttcaagagcaaattgcgtagcctgagttactctgagattctacgactgcgccagtctgagaggatgagtcaggatgacttccagtccccgccaattgtggagctgagggagaagatccagcccgagatccttgagctgatcaagcagcagcgcctgaaccggctctgtgagggcagcagcttccgaaagattgggaaccgccgaaggcaagaacggttctggtactgccggttggcactgaaccacaaggtccttcactatggtgacttggatgacaacccacaaggggaggtgacatttgaatccctgcaggagaaaattcctgttgcagacattaaggccattgtcactgggaaagattgtccccacatgaaagagaaaagtgctctgaaacagaacaaggaggtgttgggaattggccttcttccatcctgtatgaaccctgatgagacctttaacttcatcgcacctaataaatatgag

SEQ ID NO: 420812 - DNA, 2123 bp, Homo sapiens
gcggggtcccgagaaggcggggcgggcggaggctggaggagccgcggagcggagacccgggagcaggagctgggcctaggtctgcgccctggcagccgtgtctgtgtttttgtctcgcagaattagagcccattgggaacgatgccaccaccgtcagacattgtcaaagtggccattgagtggccaggtgctaacgcccagctccttgaaatcgaccagaaacggcccctggcatccattatcaaggaagtttgtgatgggtggtcgttgccaaacccagagtattataccctccgttatgcagatggtcctcagctgtacatcaccgaacagactcgcagtgacattaagaatgggacaatcttacaactggctatctccccgtcccgggctgcacgccagctgatggagaggacccagtcatccaacatggagacccggctggatgccatgaaggagctggccaagctctctgccgacgtgactttcgctactgagttcatcaacatggatggcatcattgtgctgacaaggctcgtggaaagtggaaccaagctcttgtcccactacagtgagatgctggcattcaccctgactgccttcctagagctcatggaccatggcattgtctcctgggacatggtttcaatcacctttattaagcagattgcagggtatgtgagccagcccatggtggacgtgtcaatccttcagaggtccctggccatcctggagagcatggtcttgaacagccagagtctgtaccagaagatagccgaggaaatcaccgtgggacagctcatctcacacctccaggtctccaaccaggagattcagacctacgccattgcactgattaatgcactttttctgaaggctcctgaggacaaacgacaggatatggcaaatgcatttgcacagaagcatctccggtctataatcctgaatcatgtgatccgagggaaccgccccatcaaaactgagatggcccatcagctatatgtccttcaagtcctaacctttaaccttctggaagaaaggatgatgaccaagatggaccccaatgaccaggctcaaagggacatcatatttgaactgaggaggattgcatttgacgcagagtctgatcctagcaatgcccctgggagtgggaccgaaaaacgcaaagccatgtacacaaaggactacaaaatgctgggatttaccaaccacatcaatccagccatggactttacccagactcctcctggaatgctggccttggacaacatgctgtacttggctaaagtccaccaggacacctacatccggattgtcttggagaacagtagccgggaagacaaacatgaatgcccctttggccgcagtgccattgagctcaccaaaatgctctgtgaaatcctgcaggttggggaactaccaaatgaaggacgcaatgactaccacccgatgttctttacccatgaccgagcctttgaagagctctttggaatctgcatccagctgttgaacaagacctggaaggagatgagggcaacagcagaggacttcaacaaggttatgcaagtcgtccgagagcaaatcactcgagctttgccctccaaacccaactctttggatcagttcaagagcaaattgcgtagcctgagttactctgagattctacgactgcgccagtctgagaggatgagtcaggatgacttccagtccccgccaattgtggagctgagggagaagatccagcccgagatccttgagctgatcaagcagcagcgcctgaaccggctctgtgagggcagcagcttccgaaagattgggaaccgccgaaggcaagaacggttctggtactgccggttggcactgaaccacaaggtccttcactatggtgacttggatgacaacccacaaggggaggtgacatttgaatccctgcaggagaaaattcctgttgcagacattaaggccattgtcactgggaaagattgtccccacatgaaagagaaaagtgctctgaaacagaacaaggtgagtagagaggccagtttgagtagctggcccagtgatacttggagagtgccattggtggtggttttttccaggtgcattcttggcatcttcccctc

SEQ ID NO: 420813 - DNA, 1157 bp, Homo sapiens
atttattgcagcttctaggaaattattgttcttttgttggtaatatgtctccttgatttttcatgtttcttgctgctctgttgatgtctgtgcatttggtgggggtagccatctctttcagattttatgcactggtttcagtggggaaaggctttcccctatgggagggtgctaggcccctggctgggtgaggtgcagtggttctggttccagataggacacagcagtatagtctccatggagttctgtcagctgagaaccacatcaatccagccatggactttacccagactcctcctggaatgctggccttggacaacatgctgtacttggctaaagtccaccaggacacctacatccggattgtcttggagaacagtagccgggaagacaaacatgaatgcccctttggccgcagtgccattgagctcaccaaaatgctctgtgaaatcctgcaggttggggaactaccaaatgaaggacgcaatgactaccacccgatgttctttacccatgaccgagcctttgaagagctctttggaatctgcatccagctgttgaacaagacctggaaggagatgagggcaacagcagaggacttcaacaaggttatgcaagtcgtccgagagcaaatcactcgagctttgccctccaaacccaactctttggatcagttcaagagcaaattgcgtagcctgagttactctgagattctacgactgcgccagtctgagaggatgagtcaggatgacttccagtccccgccaattgtggagctgagggagaagatccagcccgagatccttgagctgatcaagcagcagcgcctgaaccggctctgtgagggcagcagcttccgaaagattgggaaccgccgaaggcaagaacggttctggtactgccggttggcactgaaccacaaggtccttcactatggtgacttggatgacaacccacaaggggaggtgacatttgaatccctgcaggagaaaattcctgttgcagacattaaggccattgtcactgggaaagattgtccccacatgaaagagaaaagtgctctgaaacagaacaaggaggtgttgggaattggccttcttccatcctgtatgaaccctgatgagacctttaacttcatcgcacctaataaatatgag

SEQ ID NO: 420814 - DNA, 337 bp, Homo sapiens
acgacccaaggagacggcactatttatcttcactcagcatccaggtagcttccatgtgttgggtaaagagtcactctccggacagactgggaaacaccagcccttgttcttccctagtggctagaaaaaggtggcttttacttcctgagtgcccagggtgctagaggaggatcttagaaattctttgccaaggaataagcaggagaagagggcccgactgaagatcctcagttacatctactgtaaaaaagacaaaacattattgttgattcaacttgcttgtaccactttaacattttatcttagttactttttttgtttatttttcactacccag

SEQ ID NO: 420815 - DNA, 392 bp, Homo sapiens
gagctactgagtagggaaattgaaggacatagtggtggtacatgtggaaaatggaggagagcctcatttgggcaagaaagaaccaagagggacaggattcataatggtgggtgagacagagggagtgacaaatacaagggagcaagaagggaagcaggatattgtgggagtgaggacaggatggtgagagacaggaatgtaatcaagggttgatcagctaggacagaccgagggagacatagcatgcaagagaaagacagagacagaacatgagacaggaccaggggacctaaagtggggtgtgggcatcagagggacaaaggaggaggtgatgaaccgacaggggaatgtgggggcacagagacagtggggagggagagtcaggagggaga

SEQ ID NO: 420816 - DNA, 522 bp, Homo sapiens
aaccacatcaatccagccatggactttacccagactcctcctggaatgctggccttggacaacatgctgtacttggctaaagtccaccaggacacctacatccgggtaaaggcaggggagctggccttctcagtcctggtgccacatctcctgccttcctccttcatctccctaatcctccctttctcttcccccgacagattgtcttggagaacagtagccgggaagacaaacatgaatgcccctttggccgcagtgccattgagctcaccaaaatgctctgtgaaatcctgcaggttggggaactacgtaagtctctgcagctccctcttcttcagccattccttgtcatcaagagctcagtgagactcaaaattataaacagttacatgtcagtggggtcgggcgtggtggttcacacctgtaatctcagcactttgggagactgaggcaggaggatcacttgagcccaggagtccaaaaccagtctgggcaacatagtgagaccccatctctaaaaaa

SEQ ID NO: 420817 - DNA, 2195 bp, Homo sapiens
gcggggtcccgagaaggcggggcgggcggaggctggaggagccgcggagcggagacccgggagcaggagctgggcctaggtctgcgccctggagggaggtgtagaaagaggtacatggagaacaagtttgtcaatccgtctgaacttcagttgccttacctgtaaggcagccgtgtctgtgtttttgtctcgcagaattagagcccattgggaacgatgccaccaccgtcagacattgtcaaagtggccattgagtggccaggtgctaacgcccagctccttgaaatcgaccagaaacggcccctggcatccattatcaaggaagtttgtgatgggtggtcgttgccaaacccagagtattataccctccgttatgcagatggtcctcagctgtacatcaccgaacagactcgcagtgacattaagaatgggacaatcttacaactggctatctccccgtcccgggctgcacgccagctgatggagaggacccagtcatccaacatggagacccggctggatgccatgaaggagctggccaagctctctgccgacgtgactttcgctactgagttcatcaacatggatggcatcattgtgctgacaaggctcgtggaaagtggaaccaagctcttgtcccactacagtgagatgctggcattcaccctgactgccttcctagagctcatggaccatggcattgtctcctgggacatggtttcaatcacctttattaagcagattgcagggtatgtgagccagcccatggtggacgtgtcaatccttcagaggtccctggccatcctggagagcatggtcttgaacagccagagtctgtaccagaagatagccgaggaaatcaccgtgggacagctcatctcacacctccaggtctccaaccaggagattcagacctacgccattgcactgattaatgcactttttctgaaggctcctgaggacaaacgacaggatatggcaaatgcatttgcacagaagcatctccggtctataatcctgaatcatgtgatccgagggaaccgccccatcaaaactgagatggcccatcagctatatgtccttcaagtcctaacctttaaccttctggaagaaaggatgatgaccaagatggaccccaatgaccaggctcaaagggacatcatatttgaactgaggaggattgcatttgacgcagagtctgatcctagcaatgcccctgggagtgggaccgaaaaacgcaaagccatgtacacaaaggactacaaaatgctgggatttaccaaccacatcaatccagccatggactttacccagactcctcctggaatgctggccttggacaacatgctgtacttggctaaagtccaccaggacacctacatccggattgtcttggagaacagtagccgggaagacaaacatgaatgcccctttggccgcagtgccattgagctcaccaaaatgctctgtgaaatcctgcaggttggggaactaccaaatgaaggacgcaatgactaccacccgatgttctttacccatgaccgagcctttgaagagctctttggaatctgcatccagctgttgaacaagacctggaaggagatgagggcaacagcagaggacttcaacaaggtcagtgtctccgggctgctctgaggcccacgggaggagaccatcacacgacagcctttgacagctggctggcacctggagaatccctgagctggaaaagcagcttggtctgcagaactgagtcacaagactgaggcactggggagcctcagccccatctggttgttgctccctctgtgaccttgagcttgtcttccacttggtgccgtaggccctcatttgtccattgaagttagcacctgtccctcccgtcctccagagaggtcaggaggataagcattagaagactcactgtggtttattgagtgcttactgtgcaggtactgctgtagttttgtgaactgggaaggttaggagagaagagtggactggcatgatgtgcacaccctgggtacttaatcgatagttatccctcggtgctttcagtcctcactctatgcagagcactgttgtgccaggccctcaaaagctgatcatctaggggtcgagtgttttgaagttgatcatctcatcataaaaaatttggaaagtataaagaataaaaagttacctgtatttacacc

SEQ ID NO: 420818 - DNA, 2095 bp, Homo sapiens
gcggggtcccgagaaggcggggcgggcggaggctggaggagccgcggagcggagacccgggagcaggagctgggcctaggtctgcgccctggagggaggtgtagaaagaggtacatggagaacaagtttgtcaatccgtctgaacttcagttgccttacctgtaaggcagccgtgtctgtgtttttgtctcgcagaattagagcccattgggaacgatgccaccaccgtcagacattgtcaaagtggccattgagtggccaggtgctaacgcccagctccttgaaatcgaccagaaacggcccctggcatccattatcaaggaagtttgtgatgggtggtcgttgccaaacccagagtattataccctccgttatgcagatggtcctcagctgtacatcaccgaacagactcgcagtgacattaagaatgggacaatcttacaactggctatctccccgtcccgggctgcacgccagctgatggagaggacccagtcatccaacatggagacccggctggatgccatgaaggagctggccaagctctctgccgacgtgactttcgctactgagttcatcaacatggatggcatcattgtgctgacaaggctcgtggaaagtggaaccaagctcttgtcccaattgcagggtatgtgagccagcccatggtggacgtgtcaatccttcagaggtccctggccatcctggagagcatggtcttgaacagccagagtctgtaccagaagatagccgaggaaatcaccgtgggacagctcatctcacacctccaggtctccaaccaggagattcagacctacgccattgcactgattaatgcactttttctgaaggctcctgaggacaaacgacaggatatggcaaatgcatttgcacagaagcatctccggtctataatcctgaatcatgtgatccgagggaaccgccccatcaaaactgagatggcccatcagctatatgtccttcaagtcctaacctttaaccttctggaagaaaggatgatgaccaagatggaccccaatgaccaggctcaaagggacatcatatttgaactgaggaggattgcatttgacgcagagtctgatcctagcaatgcccctgggagtgggaccgaaaaacgcaaagccatgtacacaaaggactacaaaatgctgggatttaccaaccacatcaatccagccatggactttacccagactcctcctggaatgctggccttggacaacatgctgtacttggctaaagtccaccaggacacctacatccggattgtcttggagaacagtagccgggaagacaaacatgaatgcccctttggccgcagtgccattgagctcaccaaaatgctctgtgaaatcctgcaggttggggaactaccaaatgaaggacgcaatgactaccacccgatgttctttacccatgaccgagcctttgaagagctctttggaatctgcatccagctgttgaacaagacctggaaggagatgagggcaacagcagaggacttcaacaaggtcagtgtctccgggctgctctgaggcccacgggaggagaccatcacacgacagcctttgacagctggctggcacctggagaatccctgagctggaaaagcagcttggtctgcagaactgagtcacaagactgaggcactggggagcctcagccccatctggttgttgctccctctgtgaccttgagcttgtcttccacttggtgccgtaggccctcatttgtccattgaagttagcacctgtccctcccgtcctccagagaggtcaggaggataagcattagaagactcactgtggtttattgagtgcttactgtgcaggtactgctgtagttttgtgaactgggaaggttaggagagaagagtggactggcatgatgtgcacaccctgggtacttaatcgatagttatccctcggtgctttcagtcctcactctatgcagagcactgttgtgccaggccctcaaaagctgatcatctaggggtcgagtgttttgaagttgatcatctcatcataaaaaatttggaaagtataaagaataaaaagttacctgtatttacacc

SEQ ID NO: 420819 - DNA, 2122 bp, Homo sapiens
gcggggtcccgagaaggcggggcgggcggaggctggaggagccgcggagcggagacccgggagcaggagctgggcctaggtctgcgccctggagggaggtgtagaaagaggtacatggagaacaagtttgtcaatccgtctgaacttcagttgccttacctgtaaggcagccgtgtctgtgtttttgtctcgcagaattagagcccattgggaacgatgccaccaccgtcagacattgtcaaagtggccattgagtggccaggtgctaacgcccagctccttgaaatcgaccagaaacggcccctggcatccattatcaaggaagtttgtgatggactcgcagtgacattaagaatgggacaatcttacaactggctatctccccgtcccgggctgcacgccagctgatggagaggacccagtcatccaacatggagacccggctggatgccatgaaggagctggccaagctctctgccgacgtgactttcgctactgagttcatcaacatggatggcatcattgtgctgacaaggctcgtggaaagtggaaccaagctcttgtcccactacagtgagatgctggcattcaccctgactgccttcctagagctcatggaccatggcattgtctcctgggacatggtttcaatcacctttattaagcagattgcagggtatgtgagccagcccatggtggacgtgtcaatccttcagaggtccctggccatcctggagagcatggtcttgaacagccagagtctgtaccagaagatagccgaggaaatcaccgtgggacagctcatctcacacctccaggtctccaaccaggagattcagacctacgccattgcactgattaatgcactttttctgaaggctcctgaggacaaacgacaggatatggcaaatgcatttgcacagaagcatctccggtctataatcctgaatcatgtgatccgagggaaccgccccatcaaaactgagatggcccatcagctatatgtccttcaagtcctaacctttaaccttctggaagaaaggatgatgaccaagatggaccccaatgaccaggctcaaagggacatcatatttgaactgaggaggattgcatttgacgcagagtctgatcctagcaatgcccctgggagtgggaccgaaaaacgcaaagccatgtacacaaaggactacaaaatgctgggatttaccaaccacatcaatccagccatggactttacccagactcctcctggaatgctggccttggacaacatgctgtacttggctaaagtccaccaggacacctacatccggattgtcttggagaacagtagccgggaagacaaacatgaatgcccctttggccgcagtgccattgagctcaccaaaatgctctgtgaaatcctgcaggttggggaactaccaaatgaaggacgcaatgactaccacccgatgttctttacccatgaccgagcctttgaagagctctttggaatctgcatccagctgttgaacaagacctggaaggagatgagggcaacagcagaggacttcaacaaggtcagtgtctccgggctgctctgaggcccacgggaggagaccatcacacgacagcctttgacagctggctggcacctggagaatccctgagctggaaaagcagcttggtctgcagaactgagtcacaagactgaggcactggggagcctcagccccatctggttgttgctccctctgtgaccttgagcttgtcttccacttggtgccgtaggccctcatttgtccattgaagttagcacctgtccctcccgtcctccagagaggtcaggaggataagcattagaagactcactgtggtttattgagtgcttactgtgcaggtactgctgtagttttgtgaactgggaaggttaggagagaagagtggactggcatgatgtgcacaccctgggtacttaatcgatagttatccctcggtgctttcagtcctcactctatgcagagcactgttgtgccaggccctcaaaagctgatcatctaggggtcgagtgttttgaagttgatcatctcatcataaaaaatttggaaagtataaagaataaaaagttacctgtatttacacc

SEQ ID NO: 420820 - DNA, 2106 bp, Homo sapiens
gcggggtcccgagaaggcggggcgggcggaggctggaggagccgcggagcggagacccgggagcaggagctgggcctaggtctgcgccctggcagccgtgtctgtgtttttgtctcgcagaattagagcccattgggaacgatgccaccaccgtcagacattgtcaaagtggccattgagtggccaggtgctaacgcccagctccttgaaatcgaccagaaacggcccctggcatccattatcaaggaagtttgtgatgggtggtcgttgccaaacccagagtattataccctccgttatgcagatggtcctcagctgtacatcaccgaacagactcgcagtgacattaagaatgggacaatcttacaactggctatctccccgtcccgggctgcacgccagctgatggagaggacccagtcatccaacatggagacccggctggatgccatgaaggagctggccaagctctctgccgacgtgactttcgctactgagttcatcaacatggatggcatcattgtgctgacaaggctcgtggaaagtggaaccaagctcttgtcccactacagtgagatgctggcattcaccctgactgccttcctagagctcatggaccatggcattgtctcctgggacatggtttcaatcacctttattaagcagattgcagggtatgtgagccagcccatggtggacgtgtcaatccttcagaggtccctggccatcctggagagcatggtcttgaacagccagagtctgtaccagaagatagccgaggaaatcaccgtgggacagctcatctcacacctccaggtctccaaccaggagattcagacctacgccattgcactgattaatgcactttttctgaaggctcctgaggacaaacgacaggatatggcaaatgcatttgcacagaagcatctccggtctataatcctgaatcatgtgatccgagggaaccgccccatcaaaactgagatggcccatcagctatatgtccttcaagtcctaacctttaaccttctggaagaaaggatgatgaccaagatggaccccaatgaccaggctcaaagggacatcatatttgaactgaggaggattgcatttgacgcagagtctgatcctagcaatgcccctgggagtgggaccgaaaaacgcaaagccatgtacacaaaggactacaaaatgctgggatttaccaaccacatcaatccagccatggactttacccagactcctcctggaatgctggccttggacaacatgctgtacttggctaaagtccaccaggacacctacatccggattgtcttggagaacagtagccgggaagacaaacatgaatgcccctttggccgcagtgccattgagctcaccaaaatgctctgtgaaatcctgcaggttggggaactaccaaatgaaggacgcaatgactaccacccgatgttctttacccatgaccgagcctttgaagagctctttggaatctgcatccagctgttgaacaagacctggaaggagatgagggcaacagcagaggacttcaacaaggttatgcaagtcgtccgagagcaaatcactcgagctttgccctccaaacccaactctttggatcagttcaagagcaaattgcgtagcctgagttactctgagattctacgactgcgccagtctgagaggatgagtcaggatgacttccagtccccgccaattgtggagctgagggagaagatccagcccgagatccttgagctgatcaagcagcagcgcctgaaccggctctgtgagggcagcagcttccgaaagattgggaaccgccgaaggcaagaacggttctggtactgccggttggcactgaaccacaaggtccttcactatggtgacttggatgacaacccacaaggggaggtgacatttgaatccctgcaggagaaaattcctgttgcagacattaaggccattgtcactgggaaagattgtccccacatgaaagagaaaagtgctctgaaacagaacaaggaggtgttgggaattggccttcttccatcctgtatgaaccctgatgagacctttaacttcatcgcacctaataaatatgag

SEQ ID NO: 420821 - DNA, 1428 bp, Homo sapiens
tgcattgctgtagccgctagccacggtgactactaagcacttaaaatgtggctggtgcaactaaggaaccaaattttcaacttaaatttgttttaactgatttaaatgcaaatagctgcatatggctagtggctgctatactggacagcacagccctagagacagagctactgagtagggaaattgaaggacatagtggtggtacatgtggaaaatggaggagagcctcatttgggcaagaaagaaccaagagggacaggattcataatgcatgtgatccgagggaaccgccccatcaaaactgagatggcccatcagctatatgtccttcaagtcctaacctttaaccttctggaagaaaggatgatgaccaagatggaccccaatgaccaggctcaaagggacatcatatttgaactgaggaggattgcatttgacgcagagtctgatcctagcaatgcccctgggagtgggaccgaaaaacgcaaagccatgtacacaaaggactacaaaatgctgggatttaccaaccacatcaatccagccatggactttacccagactcctcctggaatgctggccttggacaacatgctgtacttggctaaagtccaccaggacacctacatccggattgtcttggagaacagtagccgggaagacaaacatgaatgcccctttggccgcagtgccattgagctcaccaaaatgctctgtgaaatcctgcaggttggggaactaccaaatgaaggacgcaatgactaccacccgatgttctttacccatgaccgagcctttgaagagctctttggaatctgcatccagctgttgaacaagacctggaaggagatgagggcaacagcagaggacttcaacaaggttatgcaagtcgtccgagagcaaatcactcgagctttgccctccaaacccaactctttggatcagttcaagagcaaattgcgtagcctgagttactctgagattctacgactgcgccagtctgagaggatgagtcaggatgacttccagtccccgccaattgtggagctgagggagaagatccagcccgagatccttgagctgatcaagcagcagcgcctgaaccggctctgtgagggcagcagcttccgaaagattgggaaccgccgaaggcaagaacggttctggtactgccggttggcactgaaccacaaggtccttcactatggtgacttggatgacaacccacaaggggaggtgacatttgaatccctgcaggagaaaattcctgttgcagacattaaggccattgtcactgggaaagattgtccccacatgaaagagaaaagtgctctgaaacagaacaaggaggtgttgggaattggccttcttccatcctgtatgaaccctgatgagacctttaacttcatcgcacctaataaatatgag

SEQ ID NO: 420822 - DNA, 773 bp, Homo sapiens
acgtacatccatcatggcctcatacatgagaggcatggtgaccaagaagggctcagatcgcttaggaatgaaggttggggtcacaccatcaggagggaggtgtagaaagaggtacatggagaacaagtttgtcaatccgtctgaacttcagttgccttacctgtaaggcagccgtgtctgtgtttttgtctcgcagaattagagcccattgggaacgatgccaccaccgtcagacattgtcaaagtggccattgagtggccaggtgctaacgcccagctccttgaaatcgaccagaaacggcccctggcatccattatcaaggaagtttgtgatgggtggtcgttgccaaacccagagtattataccctccgttatgcagatggtcctcagctgtacatcaccgaacagactcgcagtgacattaagaatgggacaatcttacaactggctatctccccgtcccgggctgcacgccagctgatggagaggacccagtcatccaacatggagacccggctggatgccatgaaggagctggccaagctctctgccgacgtgactttcgctactgagttcatcaacatggatggcatcattgtgctgacaaggctcgtggaaagtggaaccaagctcttgtcccaatacctgggctgaatctgctctacactggctaggtgtgcacacaggcacttacagttacagttgcatcgactgatttcccatggggtgttcacattaaaattcatcttttttgtggctgccctcacacctg

SEQ ID NO: 420823 - DNA, 216 bp, Homo sapiens
cagccgtgtctgtgtttttgtctcgcagaattagagcccattgggaacgatgccaccaccgtcagacattgtcaaagtggccattgagtggccaggtgctaacgcccagctccttgaaatcgaccaggtatgctcctgaagtgagaagcagtggttcaaggaaaggcacctggggagtgcatggcagaggacatcttgagggatggggaccaccgg

SEQ ID NO: 420824 - DNA, 508 bp, Homo sapiens
gatgcctccagtattcccttggtaggaattttttaaatccataggccaaagcggtacagaaaagatgcagataactacagattggttttggcatactaataactccctgattgattccacaaacatttatttagcaactcctaagctgtgtgaaaaaactagttctgcctcaggtttggatgtccacagaagggcctctgtgagctatccacagagtagtaacctgctccaaggagcagatggcacatatcttgtccctggcctcctagtcccgggctgcacgccagctgatggagaggacccagtcatccaacatggagacccggctggatgccatgaaggagctggccaagctctctgccgacgtgactttcgctactgagttcatcaacatggatggcatcattgtgctgacaaggctcgtggaaagtggaaccaagctcttgtcccagtgagtatgactaaggtctcgttccaaggacttcgacgatttactacatcccacagg

SEQ ID NO: 420825 - DNA, 1799 bp, Homo sapiens
ggagccctaggccggtgggtgagtgcaccgcgttctcgcacgcgtcatggcggtcctcggagtacagctggtggtgaccctgctcactgccaccctcatgcacaggctggcgccacactgctccttcgcgcgctggctgctctgtaacggcagtttgttccgatacaagcacccgtctgaggaggagcttcgggccctggcggggaagccgaggcccagaggcaggaaagagcggtgggccaatggccttagtgaggagaagccactgtctgtgccccgagatgccccgttccagctggagacctgccccctcacgaccgtggatgccctggtcctgcgcttcttcctggagtaccagtggtttgtggactttgctgtgtactcgggcggcgtgtacctcttcacagaggcctactactacatgctgggaccagccaaggagactaacattgctgtgttctggtgcctgctcacggtgaccttctccatcaagatgttcctgacagtgacacggctgtacttcagcgccgaggaggggggtgagcgctctgtctgcctcacctttgccttcctcttcctgctgctggccatgctggtgcaagtggtgcgggaggagaccctcgagctgggcctggagcctggtctggccagcatgacccagaacttagagccacttctgaagaagcagggctgggactgggcgcttcctgtggccaagctggctatccgcgtgggactggcagtggtgggctctgtgctgggtgccttcctcaccttcccaggcctgcggctggcccagacccaccgggacgcactgaccatgtcggaggacagacccatgctgcagttcctcctgcacaccagcttcctgtctcccctgttcatcctgtggctctggacaaagcccattgcacgggacttcctgcaccagccgccgtttggggagacgcgtttctccctgctgtccgattctgccttcgactctgggcgcctctggttgctggtggtgctgtgcctgctgcggctggcggtgacccggccccacctgcaggcctacctgtgcctggccaaggcccgggtggagcagctgcgaagggaggctggccgcatcgaagcccgtgaaatccagcagagggtggtccgagtctactgctatgtgaccgtggtgagcttgcagtacctgacgccgctcatcctcaccctcaactgcacacttctgctcaagacgctgggaggctattcctggggcctgggcccagctcctctactatcccccgacccatcctcagccagcgctgcccccatcggctctggggaggacgaagtccagcagactgcagcgcggattgccggggccctgggtggcctgcttactcccctcttcctccgtggcgtcctggcctacctcatctggtggacggctgcctgccagctgctcgccagccttttcggcctctacttccaccagcacttggcaggctcctagctgcctgcagaccctcctggggccctgaggtctgttcctggggcagcgggacactagcctgccccctctgtttgcgcccccgtgtccccagctgcaaggtggggccggactccccggcgttcccttcaccacagtgcctgacccgcggccccccttggacgccgagtttctgcctcagaactgtctctcctgggcccagcagcatgagggtcccgaggccattgtctccgaagcgtatgtgccaggtttgagtggcgagggtgatgctggctgctcttctgaacaaataaaggagcatgccgatttttacaaa

SEQ ID NO: 420826 - DNA, 1590 bp, Homo sapiens
ggagccctaggccggtgggtgagtgcaccgcgttctcgcacgcgtcatggcggtcctcggagtacagctggtggtgaccctgctcactgccaccctcatgcacaggctggcgccacactgctccttcgcgcgctggctgctctgtaacggcagtttgttccgatacaagcacccgtctgaggaggagcttcgggccctggcggggaagccgaggcccagaggcaggaaagagcggtgggccaatggccttagtgaggagaagccactgtctgtgccccgagatgccccgttccagctggagacctgccccctcacgaccgtggatgccctggtcctgcgcttcttcctggagtaccagtggtttgtggactttgctgtgtactcgggcggcgtgtacctcttcacagaggcctactactacatgctgggaccagccaaggagactaacattgctgtgttctggtgcctgctcacggtgaccttctccatcaagatgttcctgacagtgacacggctgtacttcagcgccgaggaggggggtgagcgctctgtctgcctcacctttgccttcctcttcctgctgctggccatgctggtgcaagtggtgcgggaggagaccctcgagctgggcctggagcctggtctggccagcatgacccagaacttagagccacttctgaagaagcagggctgggactgggcgcttcctgtggccaagctggctatccgcgtgggactggcagtggtgggctctgtgctgggtgccttcctcaccttcccaggcctgcggctggcccagacccaccgggacgcactgaccatgtcggaggacagacccatgctgcagttcctcctgcacaccagcttcctgtctcccctgttcatcctgtggctctggacaaagcccattgcacgggacttcctgcaccagccgccgtttggggagacgcgtttctccctgctgtccgattctgccttcgactctgggcgcctctggttgctggtggtgctgtgcctgctgcggctggcggtgacccggccccacctgcaggcctacctgtgcctggccaaggcccgggtggagcagctgcgaagggaggctggccgcatcgaagcccgtgaaatccagcagagggtggtccgagtctactgctatgtgaccgtggtgagcttgcagtacctgacgccgctcatcctcaccctcaactgcacacttctgctcaagacgctgggaggctattcctggggcctgggcccagctcctctactatcccccgacccatcctcagccagcgctgcccccatcggctctggggaggacgaagtccagcagactgcagcgcggattgccggggccctgggtggcctgcttactcccctcttcctccgtggcgtcctggcctacctcatctgtggcggtgctgcagtgtcgcagctttggcttacttcccagcactggagtcctactgctggactctgagccgaggtgctggccgggaaagttgccccttgtggccccgtccctggtggggggcccggcttaaacgcggccccgtttctgatttccgcccgcgcccccttctggcgcca

SEQ ID NO: 420827 - DNA, 1925 bp, Homo sapiens
ggagccctaggccggtgggtgagtgcaccgcgttctcgcacgcgtcatggtgctgccagtcatgtctcccacgcgtcaggcggtcctcggagtacagctggtggtgaccctgctcactgccaccctcatgcacaggctggcgccacactgctccttcgcgcgctggctgctctgtaacggcaggctaccctctaactagaatccctggatttggggttcactgcctcaacctcccaaccccacgcctgagcttccctgactgcccgtccttgctctcagtttgttccgatacaagcacccgtctgaggaggagcttcgggccctggcggggaagccgaggcccagaggcaggaaagagcggtgggccaatggccttagtgaggagaagccactgtctgtgccccgagatgccccgttccagctggagacctgccccctcacgaccgtggatgccctggtcctgcgcttcttcctggagtaccagtggtttgtggactttgctgtgtactcgggcggcgtgtacctcttcacagaggcctactactacatgctgggaccagccaaggagactaacattgctgtgttctggtgcctgctcacggtgaccttctccatcaagatgttcctgacagtgacacggctgtacttcagcgccgaggaggggggtgagcgctctgtctgcctcacctttgccttcctcttcctgctgctggccatgctggtgcaagtggtgcgggaggagaccctcgagctgggcctggagcctggtctggccagcatgacccagaacttagagccacttctgaagaagcagggctgggactgggcgcttcctgtggccaagctggctatccgcgtgggactggcagtggtgggctctgtgctgggtgccttcctcaccttcccaggcctgcggctggcccagacccaccgggacgcactgaccatgtcggaggacagacccatgctgcagttcctcctgcacaccagcttcctgtctcccctgttcatcctgtggctctggacaaagcccattgcacgggacttcctgcaccagccgccgtttggggagacgcgtttctccctgctgtccgattctgccttcgactctgggcgcctctggttgctggtggtgctgtgcctgctgcggctggcggtgacccggccccacctgcaggcctacctgtgcctggccaaggcccgggtggagcagctgcgaagggaggctggccgcatcgaagcccgtgaaatccagcagagggtggtccgagtctactgctatgtgaccgtggtgagcttgcagtacctgacgccgctcatcctcaccctcaactgcacacttctgctcaagacgctgggaggctattcctggggcctgggcccagctcctctactatcccccgacccatcctcagccagcgctgcccccatcggctctggggaggacgaagtccagcagactgcagcgcggattgccggggccctgggtggcctgcttactcccctcttcctccgtggcgtcctggcctacctcatctggtggacggctgcctgccagctgctcgccagccttttcggcctctacttccaccagcacttggcaggctcctagctgcctgcagaccctcctggggccctgaggtctgttcctggggcagcgggacactagcctgccccctctgtttgcgcccccgtgtccccagctgcaaggtggggccggactccccggcgttcccttcaccacagtgcctgacccgcggccccccttggacgccgagtttctgcctcagaactgtctctcctgggcccagcagcatgagggtcccgaggccattgtctccgaagcgtatgtgccaggtttgagtggcgagggtgatgctggctgctcttctgaacaaataaaggagcatgccgatttttacaaa

SEQ ID NO: 420828 - DNA, 1695 bp, Homo sapiens
ggagccctaggccggtgggtgagtgcaccgcgttctcgcacgcgtcatgtttgttccgatacaagcacccgtctgaggaggagcttcgggccctggcggggaagccgaggcccagaggcaggaaagagcggtgggccaatggccttagtgaggagaagccactgtctgtgccccgagatgccccgttccagctggagacctgccccctcacgaccgtggatgccctggtcctgcgcttcttcctggagtaccagtggtttgtggactttgctgtgtactcgggcggcgtgtacctcttcacagaggcctactactacatgctgggaccagccaaggagactaacattgctgtgttctggtgcctgctcacggtgaccttctccatcaagatgttcctgacagtgacacggctgtacttcagcgccgaggaggggggtgagcgctctgtctgcctcacctttgccttcctcttcctgctgctggccatgctggtgcaagtggtgcgggaggagaccctcgagctgggcctggagcctggtctggccagcatgacccagaacttagagccacttctgaagaagcagggctgggactgggcgcttcctgtggccaagctggctatccgcgtgggactggcagtggtgggctctgtgctgggtgccttcctcaccttcccaggcctgcggctggcccagacccaccgggacgcactgaccatgtcggaggacagacccatgctgcagttcctcctgcacaccagcttcctgtctcccctgttcatcctgtggctctggacaaagcccattgcacgggacttcctgcaccagccgccgtttggggagacgcgtttctccctgctgtccgattctgccttcgactctgggcgcctctggttgctggtggtgctgtgcctgctgcggctggcggtgacccggccccacctgcaggcctacctgtgcctggccaaggcccgggtggagcagctgcgaagggaggctggccgcatcgaagcccgtgaaatccagcagagggtggtccgagtctactgctatgtgaccgtggtgagcttgcagtacctgacgccgctcatcctcaccctcaactgcacacttctgctcaagacgctgggaggctattcctggggcctgggcccagctcctctactatcccccgacccatcctcagccagcgctgcccccatcggctctggggaggacgaagtccagcagactgcagcgcggattgccggggccctgggtggcctgcttactcccctcttcctccgtggcgtcctggcctacctcatctggtggacggctgcctgccagctgctcgccagccttttcggcctctacttccaccagcacttggcaggctcctagctgcctgcagaccctcctggggccctgaggtctgttcctggggcagcgggacactagcctgccccctctgtttgcgcccccgtgtccccagctgcaaggtggggccggactccccggcgttcccttcaccacagtgcctgacccgcggccccccttggacgccgagtttctgcctcagaactgtctctcctgggcccagcagcatgagggtcccgaggccattgtctccgaagcgtatgtgccaggtttgagtggcgagggtgatgctggctgctcttctgaacaaataaaggagcatgccgatttttacaaa

SEQ ID NO: 420829 - DNA, 1724 bp, Homo sapiens
ggagccctaggccggtgggtgagtgcaccgcgttctcgcacgcgtcatggcggtcctcggagtacagctggtggtgaccctgctcactgccaccctcatgcacaggctggcgccacactgctccttcgcgcgctggctgctctgtaacggcagtttgttccgatacaagcacccgtctgaggaggagcttcgggccctggcggggaagccgaggcccagaggcaggaaagagcggtgggccaatggccttagtgaggagaagccactgtctgtgccccgagatgccccgttccagctggagacctgccccctcacgaccgtggatgccctggaggcctactactacatgctgggaccagccaaggagactaacattgctgtgttctggtgcctgctcacggtgaccttctccatcaagatgttcctgacagtgacacggctgtacttcagcgccgaggaggggggtgagcgctctgtctgcctcacctttgccttcctcttcctgctgctggccatgctggtgcaagtggtgcgggaggagaccctcgagctgggcctggagcctggtctggccagcatgacccagaacttagagccacttctgaagaagcagggctgggactgggcgcttcctgtggccaagctggctatccgcgtgggactggcagtggtgggctctgtgctgggtgccttcctcaccttcccaggcctgcggctggcccagacccaccgggacgcactgaccatgtcggaggacagacccatgctgcagttcctcctgcacaccagcttcctgtctcccctgttcatcctgtggctctggacaaagcccattgcacgggacttcctgcaccagccgccgtttggggagacgcgtttctccctgctgtccgattctgccttcgactctgggcgcctctggttgctggtggtgctgtgcctgctgcggctggcggtgacccggccccacctgcaggcctacctgtgcctggccaaggcccgggtggagcagctgcgaagggaggctggccgcatcgaagcccgtgaaatccagcagagggtggtccgagtctactgctatgtgaccgtggtgagcttgcagtacctgacgccgctcatcctcaccctcaactgcacacttctgctcaagacgctgggaggctattcctggggcctgggcccagctcctctactatcccccgacccatcctcagccagcgctgcccccatcggctctggggaggacgaagtccagcagactgcagcgcggattgccggggccctgggtggcctgcttactcccctcttcctccgtggcgtcctggcctacctcatctggtggacggctgcctgccagctgctcgccagccttttcggcctctacttccaccagcacttggcaggctcctagctgcctgcagaccctcctggggccctgaggtctgttcctggggcagcgggacactagcctgccccctctgtttgcgcccccgtgtccccagctgcaaggtggggccggactccccggcgttcccttcaccacagtgcctgacccgcggccccccttggacgccgagtttctgcctcagaactgtctctcctgggcccagcagcatgagggtcccgaggccattgtctccgaagcgtatgtgccaggtttgagtggcgagggtgatgctggctgctcttctgaacaaataaaggagcatgccgatttttacaaa

SEQ ID NO: 420830 - DNA, 1878 bp, Homo sapiens
ggagccctaggccggtgggtgagtgcaccgcgttctcgcacgcgtcatggcggtcctcggagtacagctggtggtgaccctgctcactgccaccctcatgcacaggctggcgccacactgctccttcgcgcgctggctgctctgtaacggcagtttgttccgatacaagcacccgtctgaggaggagcttcgggccctggcggggaagccgaggcccagaggcaggaaagagcggtgggccaatggccttagtgaggagaagccactgtctgtgccccgagatgccccgttccagctggagacctgccccctcacgaccgtggatgccctggtcctgcgcttcttcctggagtaccagtggtttgtggactttgctgtgtactcgggcggcgtgtacctcttcacagaggcctactactacatgctgggaccagccaaggagactaacattgctgtgttctggtgcctgctcacggtgaccttctccatcaagatgttcctgacagtgacacggctgtacttcagcgccgaggaggggggtgagcgctctgtctgcctcacctttgccttcctcttcctgctgctggccatgctggtgcaagtggtgcgggaggagaccctcgagctgggcctggagcctggtctggccagcatgacccagaacttagagccacttctgaagaagcagggctgggactgggcgcttcctgtggccaagctggctatccgcgtgggactggcagtggtgggctctgtgctgggtgccttcctcaccttcccaggcctgcggctggcccagacccaccgggacgcactgaccatgtcggaggacagacccatgctgcagttaagtgggtcgcttggtgggtggggggactagggagcttaagggagagactcgaggagagggggtacccaggcctcactccctcctgccctcaccccccaggttcctcctgcacaccagcttcctgtctcccctgttcatcctgtggctctggacaaagcccattgcacgggacttcctgcaccagccgccgtttggggagacgcgtttctccctgctgtccgattctgccttcgactctgggcgcctctggttgctggtggtgctgtgcctgctgcggctggcggtgacccggccccacctgcaggcctacctgtgcctggccaaggcccgggtggagcagctgcgaagggaggctggccgcatcgaagcccgtgaaatccagcagagggtggtccgagtctactgctatgtgaccgtggtgagcttgcagtacctgacgccgctcatcctcaccctcaactgcacacttctgctcaagacgctgggaggctattcctggggcctgggcccagctcctctactatcccccgacccatcctcagccagcgctgcccccatcggctctggggaggacgaagtccagcagactgcagcgcggattgccggggccctgggtggcctgcttactcccctcttcctccgtggcgtcctggcctacctcatctggtggacggctgcctgccagctgctcgccagccttttcggcctctacttccaccagcacttggcaggctcctagctgcctgcagaccctcctggggccctgaggtctgttcctggggcagcgggacactagcctgccccctctgtttgcgcccccgtgtccccagctgcaaggtggggccggactccccggcgttcccttcaccacagtgcctgacccgcggccctggagcgatttgctcaaatgttctggccagttagtcaagctgttcgacgtatgcagtatgaaggtaacggggcttgaaaaggctcgttcaaaaaaaaaaaacgctttgggaaaaaaagagctttccttaagaaagact

SEQ ID NO: 420831 - DNA, 1617 bp, Homo sapiens
ggccatctcccactcaacgggaacccccagcccacatcctgatctgagatccagcaccccaaaaccgaactcctctaggtcatccccaaggcctatttgtgcagcagtgcttgttccctggagttctggggtcccagacggagtgtggtgaaatgggcagagtggggcagtggcacctgaggcctccttagctccagcctccagcaagatgttcctgacagtgacacggctgtacttcagcgccgaggaggggggtgagcgctctgtctgcctcacctttgccttcctcttcctgctgctggccatgctggtgcaagtggtgcgggaggagaccctcgagctgggcctggagcctggtctggccagcatgacccagaacttagagccacttctgaagaagcagggctgggactgggcgcttcctgtggccaagctggctatccgcgtgggactggcagtggtgggctctgtgctgggtgccttcctcaccttcccaggcctgcggctggcccagacccaccgggacgcactgaccatgtcggaggacagacccatgctgcagttaagtgggtcgcttggtgggtggggggactagggagcttaagggagagactcgaggagagggggtacccaggcctcactccctcctgccctcaccccccaggttcctcctgcacaccagcttcctgtctcccctgttcatcctgtggctctggacaaagcccattgcacgggacttcctgcaccagccgccgtttggggagacgcgtttctccctgctgtccgattctgccttcgactctgggcgcctctggttgctggtggtgctgtgcctgctgcggctggcggtgacccggccccacctgcaggcctacctgtgcctggccaaggcccgggtggagcagctgcgaagggaggctggccgcatcgaagcccgtgaaatccagcagagggtggtccgagtctactgctatgtgaccgtggtgagcttgcagtacctgacgccgctcatcctcaccctcaactgcacacttctgctcaagacgctgggaggctattcctggggcctgggcccagctcctctactatcccccgacccatcctcagccagcgctgcccccatcggctctggggaggacgaagtccagcagactgcagcgcggattgccggggccctgggtggcctgcttactcccctcttcctccgtggcgtcctggcctacctcatctggtggacggctgcctgccagctgctcgccagccttttcggcctctacttccaccagcacttggcaggctcctagctgcctgcagaccctcctggggccctgaggtctgttcctggggcagcgggacactagcctgccccctctgtttgcgcccccgtgtccccagctgcaaggtggggccggactccccggcgttcccttcaccacagtgcctgacccgcggccccccttggacgccgagtttctgcctcagaactgtctctcctgggcccagcagcatgagggtcccgaggccattgtctccgaagcgtatgtgccaggtttgagtggcgagggtgatgctggctgctcttctgaacaaataaaggagcatgccgatttttacaaa

SEQ ID NO: 420832 - DNA, 417 bp, Homo sapiens
tctgaaactcctgatctcagatgatccgcctgcctcagcctcccaaagtgctgggattacaggcgtgaaccaccactccaatcttgtttcttgtaaaaagtactgtgtaactagagcacaaaattgtccttgtgcctggctcagggcctggcagacccttgttcattcctacttgggaagcaaacggatgcctgagggatggggggttagggaacagagtggccttagagaccctaggaattcactctactcggtcctcttcttatcgtccccaggtctggccagcatgacccagaacttagagccacttctgaagaagcagggctgggactgggcgtgagtcctgggaatgggggagggaggcaagggcaggctgggaccctcccagggtcccccaggcaggctcgtgacctggtg

SEQ ID NO: 420833 - DNA, 2113 bp, Homo sapiens
ggagccctaggccggtgggtgagtgcaccgcgttctcgcacgcgtcatggcggtcctcggagtacagctggtggtgaccctgctcactgccaccctcatgcacaggctggcgccacactgctccttcgcgcgctggctgctctgtaacggcagtttgttccgatacaagcacccgtctgaggaggagcttcgggccctggcggggaagccgaggcccagaggcaggaaagagcggtgggccaatggccttagtgaggagaagccactgtctgtgccccgagatgccccgttccagctggagacctgccccctcacgaccgtggatgccctggtcctgcgcttcttcctggagtaccagtggtttgtggactttgctgtgtactcgggcggcgtgtacctcttcacagaggcctactactacatgctgggaccagccaaggagactaacattgctgtgttctggtgcctgctcacggtgaccttctccatcaagatgttcctgacagtgacacggctgtacttcagcgccgaggaggggggtgagcgctctgtctgcctcacctttgccttcctcttcctgctgctggccatgctggtgcaagtggtgcgggaggagaccctcgagctgggcctggagcctggtctggccagcatgacccagaacttagagccacttctgaagaagcagggctgggactgggcgcttcctgtggccaagctggctatccgcgtgggactggcagtggtgggctctgtgctgggtgccttcctcaccttcccaggcctgcggctggcccagacccaccgggacgcactgaccatgtcggaggacagacccatgctgcagttcctcctgcacaccagcttcctgtctcccctgttcatcctgtggctctggacaaagcccattgcacgggacttcctgcaccagccgccgtttggggagacgcgtttctccctgctgtccgattctgccttcgactctgggcgcctctggttgctggtggtgctgtgcctgctgcggctggcggtgacccggccccacctgcaggcctacctgtgcctggccaaggcccgggtggagcagctgcgaagggaggctggccgcatcgaagcccgtgaaatccagcagagggtggtccgagtctactgctatgtgaccgtggtgagcttgcagtacctgacgccgctcatcctcaccctcaactgcacacttctgctcaagacgctgggaggctattcctggggcctgggcccagctcctctactatcccccgacccatcctcagccagcgctgcccccatcggctctggggaggacgaagtccagcagactgcagcgcggattgccggggccctgggtggcctgcttactcccctcttcctccgtggcgtcctggcctacctcatctggtggacggctgcctgccagctgctcgccagccttttcggcctctacttccaccagcacttggcaggctcctagctgcctgcagaccctcctggggccctgaggtctgttcctggggcagcgggacactagcctgccccctctgtttgcgcccccgtgtccccagctgcaaggtggggccggactccccggcgttcccttcaccacagtgcctgacccgcggccccccttggacgccgagtttctgcctcagaactgtctctcctgggcccagcagcatgagggtcccgaggccattgtctccgaagcgtatgtgccaggtttgagtggcgagggtgatgctggctgctcttctgaacaaataaaggagcatgccgatttttacaaaaaaaaaaaacaaaaaaaacaaaaaagacaacaaaaaaagaaaggggcgactaaaacaacccccgcgggcacaccgacaaacataccagcctatctgcacaacgggacccgagagagtgattagcaaccggacggcgccgatcaacaaagcaagggcacaaccgagacggaccgcaaaacaccaatccgggtggaacaagcacacccaggcgaggcaggaccaaacggccggcaaccgcagcgaggaagcacgtcatccagcacgcagcaacagagcgaaagacgcacgacaaacaacacagcgaccgcccacaa

SEQ ID NO: 420834 - DNA, 1829 bp, Homo sapiens
ggagccctaggccggtgggtgagtgcaccgcgttctcgcacgcgtcatggtgctgccagtcatgtctcccacgcgtcaggcggtcctcggagtacagctggtggtgaccctgctcactgccaccctcatgcacaggctggcgccacactgctccttcgcgcgctggctgctctgtaacggcagtttgttccgatacaagcacccgtctgaggaggagcttcgggccctggcggggaagccgaggcccagaggcaggaaagagcggtgggccaatggccttagtgaggagaagccactgtctgtgccccgagatgccccgttccagctggagacctgccccctcacgaccgtggatgccctggtcctgcgcttcttcctggagtaccagtggtttgtggactttgctgtgtactcgggcggcgtgtacctcttcacagaggcctactactacatgctgggaccagccaaggagactaacattgctgtgttctggtgcctgctcacggtgaccttctccatcaagatgttcctgacagtgacacggctgtacttcagcgccgaggaggggggtgagcgctctgtctgcctcacctttgccttcctcttcctgctgctggccatgctggtgcaagtggtgcgggaggagaccctcgagctgggcctggagcctggtctggccagcatgacccagaacttagagccacttctgaagaagcagggctgggactgggcgcttcctgtggccaagctggctatccgcgtgggactggcagtggtgggctctgtgctgggtgccttcctcaccttcccaggcctgcggctggcccagacccaccgggacgcactgaccatgtcggaggacagacccatgctgcagttcctcctgcacaccagcttcctgtctcccctgttcatcctgtggctctggacaaagcccattgcacgggacttcctgcaccagccgccgtttggggagacgcgtttctccctgctgtccgattctgccttcgactctgggcgcctctggttgctggtggtgctgtgcctgctgcggctggcggtgacccggccccacctgcaggcctacctgtgcctggccaaggcccgggtggagcagctgcgaagggaggctggccgcatcgaagcccgtgaaatccagcagagggtggtccgagtctactgctatgtgaccgtggtgagcttgcagtacctgacgccgctcatcctcaccctcaactgcacacttctgctcaagacgctgggaggctattcctggggcctgggcccagctcctctactatcccccgacccatcctcagccagcgctgcccccatcggctctggggaggacgaagtccagcagactgcagcgcggattgccggggccctgggtggcctgcttactcccctcttcctccgtggcgtcctggcctacctcatctggtggacggctgcctgccagctgctcgccagccttttcggcctctacttccaccagcacttggcaggctcctagctgcctgcagaccctcctggggccctgaggtctgttcctggggcagcgggacactagcctgccccctctgtttgcgcccccgtgtccccagctgcaaggtggggccggactccccggcgttcccttcaccacagtgcctgacccgcggccccccttggacgccgagtttctgcctcagaactgtctctcctgggcccagcagcatgagggtcccgaggccattgtctccgaagcgtatgtgccaggtttgagtggcgagggtgatgctggctgctcttctgaacaaataaaggagcatgccgatttttacaaa

SEQ ID NO: 420835 - DNA, 2162 bp, Homo sapiens
ctgcagcagacaacagcactgtttacaatagcccagatttggaattaatctaagtgttcatcgacagatgaatgaacagagaaaatgtggcagctgggcatggtggcgcatgcctgtagtcccagctcctcgggaggctgaggcaggagaatcacttgaaccggggaagtggaggttgcagtgagccaagatcatgccactgcactccagtctgggtgacagagggagactctgtctcaaaaagaaaatgaaaaagaaaagaaaagttgcacacactggcttccccaggagagttagccagcagattcaggggtatccaagcccccggagcccactcagcctagatctgttggtctcacgatttcccagaatttccccatgctgtaccctcacctacctcccagtgttcccctggcctaggctaccctctaactagaatccctggatttggggttcactgcctcaacctcccaaccccacgcctgagcttccctgactgcccgtccttgctctcagtttgttccgatacaagcacccgtctgaggaggagcttcgggccctggcggggaagccgaggcccagaggcaggaaagagcggtgggccaatggccttagtgaggagaagccactgtctgtgccccgagatgccccgttccagctggagacctgccccctcacgaccgtggatgccctggtcctgcgcttcttcctggagtaccagtggtttgtggactttgctgtgtactcgggcggcgtgtacctcttcacagaggcctactactacatgctgggaccagccaaggagactaacattgctgtgttctggtgcctgctcacggtgaccttctccatcaagatgttcctgacagtgacacggctgtacttcagcgccgaggaggggggtgagcgctctgtctgcctcacctttgccttcctcttcctgctgctggccatgctggtgcaagtggtgcgggaggagaccctcgagctgggcctggagcctggtctggccagcatgacccagaacttagagccacttctgaagaagcagggctgggactgggcgcttcctgtggccaagctggctatccgcgtgggactggcagtggtgggctctgtgctgggtgccttcctcaccttcccaggcctgcggctggcccagacccaccgggacgcactgaccatgtcggaggacagacccatgctgcagttcctcctgcacaccagcttcctgtctcccctgttcatcctgtggctctggacaaagcccattgcacgggacttcctgcaccagccgccgtttggggagacgcgtttctccctgctgtccgattctgccttcgactctgggcgcctctggttgctggtggtgctgtgcctgctgcggctggcggtgacccggccccacctgcaggcctacctgtgcctggccaaggcccgggtggagcagctgcgaagggaggctggccgcatcgaagcccgtgaaatccagcagagggtggtccgagtctactgctatgtgaccgtggtgagcttgcagtacctgacgccgctcatcctcaccctcaactgcacacttctgctcaagacgctgggaggctattcctggggcctgggcccagctcctctactatcccccgacccatcctcagccagcgctgcccccatcggctctggggaggacgaagtccagcagactgcagcgcggattgccggggccctgggtggcctgcttactcccctcttcctccgtggcgtcctggcctacctcatctggtggacggctgcctgccagctgctcgccagccttttcggcctctacttccaccagcacttggcaggctcctagctgcctgcagaccctcctggggccctgaggtctgttcctggggcagcgggacactagcctgccccctctgtttgcgcccccgtgtccccagctgcaaggtggggccggactccccggcgttcccttcaccacagtgcctgacccgcggccccccttggacgccgagtttctgcctcagaactgtctctcctgggcccagcagcatgagggtcccgaggccattgtctccgaagcgtatgtgccaggtttgagtggcgagggtgatgctggctgctcttctgaacaaataaaggagcatgccgatttttacaaa

SEQ ID NO: 420836 - DNA, 1742 bp, Homo sapiens
ggagccctaggccggtgggtgagtgcaccgcgttctcgcacgcgtcatgtttgttccgatacaagcacccgtctgaggaggagcttcgggccctggcggggaagccgaggcccagaggcaggaaagagcggtgggccaatggccttagtgaggagaagccactgtctgtgccccgagatgccccgttccagctggagacctgccccctcacgaccgtggatgccctgggaggggagcgagctgggccccagggctgagcagagtgccccccacagtcctgcgcttcttcctggagtaccagtggtttgtggactttgctgtgtactcgggcggcgtgtacctcttcacagaggcctactactacatgctgggaccagccaaggagactaacattgctgtgttctggtgcctgctcacggtgaccttctccatcaagatgttcctgacagtgacacggctgtacttcagcgccgaggaggggggtgagcgctctgtctgcctcacctttgccttcctcttcctgctgctggccatgctggtgcaagtggtgcgggaggagaccctcgagctgggcctggagcctggtctggccagcatgacccagaacttagagccacttctgaagaagcagggctgggactgggcgcttcctgtggccaagctggctatccgcgtgggactggcagtggtgggctctgtgctgggtgccttcctcaccttcccaggcctgcggctggcccagacccaccgggacgcactgaccatgtcggaggacagacccatgctgcagttcctcctgcacaccagcttcctgtctcccctgttcatcctgtggctctggacaaagcccattgcacgggacttcctgcaccagccgccgtttggggagacgcgtttctccctgctgtccgattctgccttcgactctgggcgcctctggttgctggtggtgctgtgcctgctgcggctggcggtgacccggccccacctgcaggcctacctgtgcctggccaaggcccgggtggagcagctgcgaagggaggctggccgcatcgaagcccgtgaaatccagcagagggtggtccgagtctactgctatgtgaccgtggtgagcttgcagtacctgacgccgctcatcctcaccctcaactgcacacttctgctcaagacgctgggaggctattcctggggcctgggcccagctcctctactatcccccgacccatcctcagccagcgctgcccccatcggctctggggaggacgaagtccagcagactgcagcgcggattgccggggccctgggtggcctgcttactcccctcttcctccgtggcgtcctggcctacctcatctggtggacggctgcctgccagctgctcgccagccttttcggcctctacttccaccagcacttggcaggctcctagctgcctgcagaccctcctggggccctgaggtctgttcctggggcagcgggacactagcctgccccctctgtttgcgcccccgtgtccccagctgcaaggtggggccggactccccggcgttcccttcaccacagtgcctgacccgcggccccccttggacgccgagtttctgcctcagaactgtctctcctgggcccagcagcatgagggtcccgaggccattgtctccgaagcgtatgtgccaggtttgagtggcgagggtgatgctggctgctcttctgaacaaataaaggagcatgccgatttttacaaa

SEQ ID NO: 420837 - DNA, 1947 bp, Homo sapiens
ggagccctaggccggtgggtgagtgcaccgcgttctcgcacgcgtcatggcggtcctcggagtacagctggtggtgaccctgctcactgccaccctcatgcacaggctggcgccacactgctccttcgcgcgctggctgctctgtaacggcagtttgttccgatacaagcacccgtctgaggaggagcttcgggccctggcggggaagccgaggcccagaggcaggaaagagcggtgggccaatggccttagtgaggagaagccactgtctgtgccccgagatgccccgttccagctggagacctgccccctcacgaccgtggatgccctgggtaatagcccagtcccatccctaaactctactccctcagccctgaaggtctccacaccctcatgggggtggggaggatttgaaggaagaatgttctattaggaggggagcgagctgggccccagggctgagcagagtgccccccacagtcctgcgcttcttcctggagtaccagtggtttgtggactttgctgtgtactcgggcggcgtgtacctcttcacagaggcctactactacatgctgggaccagccaaggagactaacattgctgtgttctggtgcctgctcacggtgaccttctccatcaagatgttcctgacagtgacacggctgtacttcagcgccgaggaggggggtgagcgctctgtctgcctcacctttgccttcctcttcctgctgctggccatgctggtgcaagtggtgcgggaggagaccctcgagctgggcctggagcctggtctggccagcatgacccagaacttagagccacttctgaagaagcagggctgggactgggcgcttcctgtggccaagctggctatccgcgtgggactggcagtggtgggctctgtgctgggtgccttcctcaccttcccaggcctgcggctggcccagacccaccgggacgcactgaccatgtcggaggacagacccatgctgcagttcctcctgcacaccagcttcctgtctcccctgttcatcctgtggctctggacaaagcccattgcacgggacttcctgcaccagccgccgtttggggagacgcgtttctccctgctgtccgattctgccttcgactctgggcgcctctggttgctggtggtgctgtgcctgctgcggctggcggtgacccggccccacctgcaggcctacctgtgcctggccaaggcccgggtggagcagctgcgaagggaggctggccgcatcgaagcccgtgaaatccagcagagggtggtccgagtctactgctatgtgaccgtggtgagcttgcagtacctgacgccgctcatcctcaccctcaactgcacacttctgctcaagacgctgggaggctattcctggggcctgggcccagctcctctactatcccccgacccatcctcagccagcgctgcccccatcggctctggggaggacgaagtccagcagactgcagcgcggattgccggggccctgggtggcctgcttactcccctcttcctccgtggcgtcctggcctacctcatctggtggacggctgcctgccagctgctcgccagccttttcggcctctacttccaccagcacttggcaggctcctagctgcctgcagaccctcctggggccctgaggtctgttcctggggcagcgggacactagcctgccccctctgtttgcgcccccgtgtccccagctgcaaggtggggccggactccccggcgttcccttcaccacagtgcctgacccgcggccccccttggacgccgagtttctgcctcagaactgtctctcctgggcccagcagcatgagggtcccgaggccattgtctccgaagcgtatgtgccaggtttgagtggcgagggtgatgctggctgctcttctgaacaaataaaggagcatgccgatttttacaaa

SEQ ID NO: 420838 - DNA, 683 bp, Homo sapiens
ttgtttttgagacggagtctcactctgttgcccaggctgaagtgcagtggtgtgatcttggctcactgcaacctctgcctcctgggttcaagcgattctcctgcctcagcctcctgagtagctgggcttacaggcacccaccaccatgcccggctaatctttgtatttttagtagagacggggtttcaccatcttggccaggctggtgtgatcatggctcattgcaaccttgaattcctgggcacaagtgatcctcctgccttagcctccccagtagagctgggactacaggtatgcgccaccacacctggctaatttttttaattttaatttttgtagagatgggggggcaggtctcactatgttgcccaggctgttctcgaactcctggccacaagccatcctcccaccttagtctcccaatgcgccggaattacaggtggctcaggtgtgagccaccgtgcctggcttttctccactatcttgaaatcagatgggaggaggcttttttctgggtgggactgaggaggcacactgaagtcccccaggtcatcggggctgggccattgcctttttccccaccctgggtagtcgtggacagaagcttgggatgggatggagaggagagatcgtgctgtgtgtcatgtctgttgttcaagtaaataaaagttgccctgacttca

SEQ ID NO: 420839 - DNA, 688 bp, Homo sapiens
gatgcttggagcagagatgaggactcagaatcagacctgtgtctggaggagggatgtggtgggtggggttggctgggcccaaatgtgtgctgcaggccctgatccccaactctgcaactggggacccctgcatggccacagctcaggctgggctgtggtgccagcatggataggtgggtgagtgggtggcccttccattaaaagggaagccagctgtgtcctttccgggcctggaggcttggcccctcctctcccaagcctggcaggggcactggcccggcccgcaccttcctagcagccagttacccaagaggaagctgccttgggcctccagaccgttaaatgccaactcctggcttccggtatcaggctgggttgacctgacctggccccttcttgctgggccctgcagctttctaacttgccgggaggagcagtgacacccgccccacatgtggggcatggaacaagttccttgtggacccagaagggacacaagcaggtgtgcttagtcctgaggcgctgggaatagctgatcctccctgccttgagggggttctcagggcagggaagagttaggactctgtttttttttttttgtttttttttttttgagatggagtctcgcactgtcacccgggctggagtgcaatggctcgatctcggctcactgcaacctccacctccc

SEQ ID NO: 420840 - DNA, 373 bp, Homo sapiens
gatgcttggagcagagatgaggactcagaatcagacctgtgtctggaggagggatgtggtgggtggggttggctgggcccaaatgtgtgctgcaggccctgatccccaactctgcaactggggacccctgcatggccacagctcaggctgggctgtggtgccagcatggataggtgggtgagtgggtggcccttccattaaaagggaagccagctgtgtcctttccgggcctggaggcttggcccctcctctcccattgcctttttccccaccctgggtagtcgtggacagaagcttgggatgggatggagaggagagatcgtgctgtgtgtcatgtctgttgttcaagtaaataaaagttgccctgacttca

SEQ ID NO: 420841 - DNA, 594 bp, Homo sapiens
  misc_feature (115)..(117): n is a, c, g, or t
  misc_feature (247)..(247): n is a, c, g, or t
atagctgttggactttgcacttagttacatcagagaatcactccctgtcaccctctcacagagtcacagtcggtgtcactttatcctttttgcttcaagccattgtactgcgcannngaagcgtgtcctttccttatactcatcctgggtccatgctttatacagttagcctcattctgctggttggacaactgttaacagagttcccggattcggctggtagtgcttagagcatcctcaacattgnctcgcttgcaccagccctaacccagcgggctaggaaacaagtgcctcaatcctaggggccagcacttctctgttctcccctgcgtcgtccctccagtatggaggcgagggaggcacgttggcttcaaaggagcacagtggtggtggtggggtgaccctgagggaaacgctgagcctgaggggtgacatgtggcgataaccaggatctgagggtcttgagctagtgacatttgggggcaacttggacctacgggattactcaggcctcaggggaagatttggggtgcctggtatctgagaatgctggaggggaacttgggtttgagggatgtgacatgaaggaaaccc

SEQ ID NO: 420842 - DNA, 1153 bp, Homo sapiens
ttgtttttgagacggagtctcactctgttgcccaggctgaagtgcagtggtgtgatcttggctcactgcaacctctgcctcctgggttcaagcgattctcctgcctcagcctcctgagtagctgggcttacaggcacccaccaccatgcccggctaatctttgtatttttagtagagacggggtttcaccatcttggccaggctggtgtgatcatggctcattgcaaccttgaattcctgggcacaagtgatcctcctgccttagcctccccagtagagctgggactacaggtatgcgccaccacacctggctaatttttttaattttaatttttgtagagatgggggggcaggtctcactatgttgcccaggctgttctcgaactcctggccacaagccatcctcccaccttagtctcccaatgcgccggaattacaggtggctcaggtgtgagccaccgtgcctggcttttctccactatcttgaaatcagatgggaggaggcttttttctgggtgggactgaggaggcacactgaagtcccccaggtcatcggggctgggccattgcctttttccccaccctgggtagtcgtggacagaagcttgggatgggatggagaggagagatcgtgctgtgtgtcatgtctgttgttcaagtaaataaaagttgccctgacttcattcctgaaggtctggtctgtgattcactcctgcctcccatcgctggagtttcagcttttgattggcctgaatttaccatcctggcactccgggctcctgcctgcccatccctgccccacctgctctgtgcagcagggtatcctgtgcttggaaagggtgaccttgggggtgtcctggatcgtggggtgaccatgagggaaaccctagagtggaaagattttcacatcgctgatcaagggaggatggaagctgatctgaagtggtggtggtggggtgaccctgagggaaacgctgagcctgaggggtgacatgtggcgataaccaggatctgagggtcttgagctagtgacatttgggggcaacttggacctacgggattactcaggcctcaggggaagatttggggtgcctggtatctgagaatgctggaggggaacttgggtttgagggatgtgacatgaaggaaaccc

SEQ ID NO: 420843 - DNA, 1694 bp, Homo sapiens
agaaactctctgtcctgagaggtgattaaagaaggcatccagcaagaactgcacaagaaacggagtcagccggagaacaaggagtggtcttccactgcctcacaggaggatggaggcccacaacgcgtctgccccattcaacttcaccctgccacccaactttggcaagcgccccacagacctggcactgagcgtcatcctggtgttcatgttgttcttcatcatgctctcgctgggctgcaccatggagttcagcaagatcaaggctcacttatggaagcctaaagggctggccatcgccctggtggcacagtatggcatcatgcccctcacggcctttgtgctgggcaaggtcttccggctgaagaacattgaggcactggccatcttggtctgtggctgctcacctggagggaacctgtccaatgtcttcagtctggccatgaagggggacatgaacctcagcattgtgatgaccacctgctccaccttctgtgcccttggcatgatgcctctcctcctgtacatctactccagggggatctatgatggggacctgaaggacaaggtgccctataaaggcatcgtgatatcactggtcctggttctcattccttgcaccatagggatcgtcctcaaatccaaacggccacaatacatgcgctatgtcatcaagggagggatgatcatcattctcttgtgcagtgtggccgtcacagttctctctgccatcaatgtggggaagagcatcatgtttgccatgacaccactcttgattgccacctcctccctgatgccttttattggctttctgctgggttatgttctctctgctctcttctgcctcaatggacggtgcagacgcactgtcagcatggagactggatgccaaaatgtccaactctgttccaccatcctcaatgtggcctttccacctgaagtcattggaccacttttcttctttcccctcctctacatgattttccagcttggagaagggcttctcctcattgccatattttggtgctatgagaaattcaagactcccaaggataaaacaaaaatgatctacacagctgccacaactgaagaaacaattccaggagctctgggaaatggcacctacaaaggggaggactgctccccttgcacagcctagcccttcccctggtggcctggattctggtcccaaagcaattctgaaagccagtgtggtaaactagagagagcagcaaaaacaccagtcttgcctgagtctttctccagcatttccagtacatctatcagaatcatcaagtcttggccgggaacacagacagggtgtctacccaagaagcctcacctatccccaacttagaatttgctacttattttaaagacttgttcagtgactgtaaactctatgaaaccagaaaccgaatctgcctcttgctgggatctctaaaagtgtctgataagcatcttaaagtcactcaattcctgaactaatcaatatatatgtttaacccattactcaaatacccaaatcccattccaagttttgtgacccaaaagagaaataaatgctcacaagtgctgtagaattaaacttcagaagttctaacctaaaaagttcagatcctattccttcccttttgacattattgggatgatgctcccgaaaagtcaaatttgacatcaagtatgcaaaagtg

SEQ ID NO: 420844 - DNA, 1662 bp, Homo sapiens
cgcccgagaatgcgcttcacctcgcagaagcgggtgggctctgtggagagtcgcgggctcgcgggcagcagcgcctcctccactccggcgggcccgggttcggccggccgcccatcggactggcggactggctgactgacacgcctcgcttgcccccgcctccgcccgtgccccgcccagcttcatctctccctccgctccccgggctcgggggcagacggcagacggaggcgcctctctctccccgcccctctcctcggccctttctcttcccagcacctcggctgctgcccggcagcggcagcagctgcgtcggcggcccacacagcagcgagaggcgagaggaggctgcctcgaggatgaagtgcaaacccaaccagacacggacctacgaccccgaggggttcaagaagcgggcggcgtgcctgtgcttccggagcgagcgcgaggacgaggtcctgttagtgagtagcagccggtacccggaccgctggatcgtgccgggcgggggcatggagcccgaggaggagccgggcggtgcggcggtccgagaggtgtacgaagaggcgggagtcaaggggaagttaggccggctcctgggcgtcttcgaacagaaccaggaccccaagcacagaacgtacgtgtatgtactgactgtcacggagctgctggaggattgggaagattcggttagcattgggaggaagcgagagtggttcaaagtcgaagatgccatcaaggttctccagtgccacaagcccgtgcacgccgaatatctggagaaactaaagctgggcggttccccaaccaatggaaactccatggccccatcctcgccagatagcgatccctagtgaatggcatagatgttgttcagatttactttgaaagaatcaagtatgtgaatggatggatgaatggaattgtgaagcacagatgagctctttcacactccaaggacacagctcatcctatgcttttggacacttcttccctgtttattacaatgactattctccaggttgttgcactaccgctgtatctgtacataattctaacttggcacctgtggccttttttgtgctcttatgtgtctgtatttcccggcagagtatacgcccttgaatgccaggaacttgtttccttagtcttttttatatatctagcatataagatattgcttagaatatggtagacatcactgaagatttgtttcagtagttcatattttgtaatgatactgaatggttaaacaatccctttctaatctgtctagcatatatgtgacttttgtttatcaagtgtcacacaactgcttcaaggcagctgtgagatactagaaagcaaaaattcttactcctatgtctgtgtcatcccagatgtgtgcctccagatggcagtatactacactatctgtaaaatatatttgcaaagccaggcacagtgttacgcgtctgcctcaggaggctgaggcagaagaatagcttgagcccaggagctttagtctagcctgagcaatataatgagactccgtctcttaaaatatttgcccaaacattgaacctaaatttgaccatgcccctagaaataattcctaatctcttacgccatatggacacgacgaacattagttacgcctttgcctgatgtacggcacgccct

SEQ ID NO: 420845 - DNA, 2137 bp, Homo sapiens
cgcccgagaatgcgcttcacctcgcagaagcgggtgggctctgtggagagtcgcgggctcgcgggcagcagcgcctcctccactccggcgggcccgggttcggccggccgcccatcggactggcggactggctgactgacacgcctcgcttgcccccgcctccgcccgtgccccgcccagcttcatctctccctccgctccccgggctcgggggcagacggcagacggaggcgcctctctctccccgcccctctcctcggccctttctcttcccagcacctcggctgctgcccggcagcggcagcagctgcgtcggcggcccacacagcagcgagaggcgagaggaggctgcctcgaggatgaagtgcaaacccaaccagacacggacctacgaccccgaggggttcaagaagcgggcggcgtgcctgtgcttccggagcgagcgcgaggacgaggtcctgttagtgagtagcagccggtacccggaccgctggatcgtgccgggcgggggcatggagcccgaggaggagccgggcggtgcggcggtccgagaggtgtacgaagaggcgggagtcaaggggaagttaggccggctcctgggcgtcttcgaacagaaccaggaccccaagcacagaacgtacgtgtatgtactgactgtcacggagctgctggaggattgggaagattcggttagcattgggaggaagcgagagtggttcaaagtcgaagatgccatcaaggttctccagtgccacaagcccgtgcacgccgaatatctggagaaactaaagctgggcggttccccaaccaatggaaactccatggccccatcctcgccagatagcgatccctagtgaatggcatagatgttgttcagatttactttgaaagaatcaagtatgtgaatggatggatgaatggaattgtgaagcacagatgagctctttcacactccaaggacacagctcatcctatgcttttggacacttcttccctgtttattacaatgactattctccaggttgttgcactaccgctgtatctgtacataattctaacttggcacctgtggccttttttgtgctcttatgtgtctgtatttcccggcagagtatacgcccttgaatgccaggaacttgtttccttagtcttttttatatatctagcatataagatattgcttagaatatggtagacatcactgaagatttgtttcagtagttcatattttgtaatgatactgaatggttaaacaatccctttctaatctgtctagcatatatgtgacttttgtttatcaagtgtcacacaactgcttcaaggcagctgtgagatactagaaagcaaaaattcttactcctatgtctgtgtcatcccagatgtgtgcctccagatggcagtatactacactatctgtaaaatatatttgcaaagccaggcacagtgttacgcgtctgcctcaggaggctgaggcagaagaatagcttgagcccaggagctttagtctagcctgagcaatataatgagactccgtctcttaaaatatttgcccaaacattgaacctaaatttgaccatgcccctagaaataattcctaatctttagaaaatagggcagagaaacattattttacaccatggagatgagatcagcagaatccagactataagaaactacaggacacatgacctagtttcttctgtaaataacttgcaaggatgaaagatggaggatgaacctatagatttaaagagacttaagagacatattaaccaattgttaattggatcttatttgaattgtgatttgaccgaactgtaaaacgaatacatttatgagacaatcggggtaatttgaacattggtggggtatttggtattagaataatggttttatcattatgttagaaagaagggtcctcatctacattctcaaacatctgtggctgatatgatatgattcttggaatttgcttcaaaataataagtctggatgttaagtgcattggaaatattgatgaaacgaaattggccttgataattgttgaagctgggtgatggctaaaatgatggttcattatatatgttcatctctatttttgtatgtttggcattttccgtaataaagtttataaaaa

SEQ ID NO: 420846 - DNA, 829 bp, Homo sapiens
gccgcctactactactaaattcgcggccgcgtcgacccttagggctctctgcccagtaacaggcatcgaacggtgcagactgaagacgccctccgtcagcgacgccgtcgcaatggccatttgtcaattcttccttcaaggccggtgccgctttggagatcggtgctggaacgaacatcccggtgctaggggtgcaggaggaggacggcagcaaccgcagcagcagccttcaggtaataatagacgtggatggaatacaactagccagagatattccaatgtcatccagccatccagtttctccaaatccacaccatgggggggcagcagagatcaagaaaagccatatttcagttcttttgattctggagcttcaactaacaggaaggaaggctttggattgtctgagaacccatttgcttcacttagtcctgatgagcagaaagatgaaaagaaacttctggaaggaattgtaaaagatatggaggtttgggaatcatcagggcagtggatgttttctgtttattcaccagtgaaaaagaaacctaatatttcaggttttacagacatttcaccagaggaattgaggcttgaataccataacttcttaaccagcaataacttacagagttatctaaattctgtccaacgtttaataaatcaatggaggaacagggtaaatgaactgaaaagtctaaatatatcaactaaagtagctttgaaatgcctttggaagatatatacccacctgtctccaaagatctatggtcccgactgtggcaagttcattatctttgtaaataaagttatgatgtttctacacccatta

SEQ ID NO: 420847 - DNA, 1387 bp, Homo sapiens
tttcagggaatgggaaatgtttaatggatttttagtcataagcttttaattatataatagtggatctacttcgagtattagactgggtattctataaaggtcctttttacctaatatctagatttcttgataaatgcagatctacccttatagacactgaaaaaaatttaaaaatatttttctgattataatatctgctcattgtagaaatttagaaagtataaaaaagcataaataaaatttaaatcacctgtaatttatcagccagagataatcactgttaacttactaatgtacattttttatgcatattcatattactagttgtgattatactgtttatacagtattatgtcttatccttttcaacatcatattatgggcattttccatgttaagcatttaactttgccttttttaatgcacttttttcttctcttttctttttttgagtcagagtcttactttgtcatccaggctttcccaggctcaagtgatcctcccacctcaggctcccaaatagctgggaccactggctaattttttatagagatgggggtctcgctgtgttgctgaggctggtcccagactcataggctcaagcccttcaccctcctcagcctcccaaagtgctaggattacaggtgtgagccaccacacccagcctttaatgcacattttaaaaacttgaatttgtccataaagtgtatagaaaagatactggagcactattcatcaagcactttattatttgcacacttttttttttcagctctctgatgtaaaggatggagtaaatcaagcagcacctgcatttggatttggcagcagtcaagcagcaacatttatgtcgccaggtaagtgataaagtaatgcaggacttcactgatttagaaaaattagattttataggtttcaaattacaagcctgaatcgccattttaaattaccttcgtaaattctacaaccttccatcatagagcctcaaagcatttgactcattagacatttgtgaaagggaggccagattgggcatgttctttgaaagacacttaagctttagaagtacattttaggaatgagttttcaggagtttcgtagaagtacatagctatgatagcagcacctttgagaactttcttgtcactgtgtataacagcatagcattgtcctcaggtagcagctctggtgaggtaagtagaaaccaaagtgaaagtctattccctagtccctgtggtttctccttgggtgaaggtcgatcaaggtgaaaatgggattgttagcagaaaagacaggcagcaggctttagtgggtagttctagcctctcatttttactttcctcatctcgtccgtccagtaagcttctcaacactgaaacatgacata

SEQ ID NO: 420848 - DNA, 1656 bp, Homo sapiens
gccgcctactactactaaattcgcggccgcgtcgacccttagggctctctgcccagtaacaggcatcgaacggtgcagactgaagacgccctccgtcagcgacgccgtcgcaatggccatttgtcaattcttccttcaaggccggtgccgctttggagatcggtgctggaacgaacatcccggtgctaggggtgcaggaggaggacggcagcaaccgcagcagcagccttcaggtaataatagacgtggatggaatacaactagccagagatattccaatgtcatccagccatccagtttctccaaatccacaccatgggggggcagcagagatcaagaaaagccatatttcagttcttttgattctggagcttcaactaacaggaaggaaggctttggattgtctgagaacccatttgcttcacttagtcctgatgagcagaaagatgaaaagaaacttctggaaggaattgtaaaagatatggaggtttgggaatcatcagggcagtggatgttttctgtttattcaccagtgaaaaagaaacctaatatttcaggttttacagacatttcaccagaggaattgaggcttgaataccataacttcttaaccagcaataacttacagagttatctaaattctgtccaacgtttaataaatcaatggaggaacagggtaaatgaactgaaaagtctaaatatatcaactaaagtagctttgctctctgatgtaaaggatggagtaaatcaagcagcacctgcatttggatttggcagcagtcaagcagcaacatttatgtcgccaggctttccagtcaataacagcagcagtgataatgctcagaactttagttttaaaacaaactctggatttgctgctgcctcttctggaagccctgctggttttgggagttccccagcatttggagctgcagcctctaccagttcaggtatctctacttctgctccagcttttggatttgggaagcctgaagtcacatcggctgcatcattttcattcaaaagccctgcagcttccagttttggatcacctggattttcaggacttccagcttccttggcaacaggtcctgtcagagctccagtggccccagcctttggaggtggcagttctgtggctggttttggtagtccgggctcacattctcacactgctttttctaagccatccagtgacacttttggaaatagcagcatatccacttctctgtcagcctcaagcagcatcattgcaacagataatgtgttattcacacccagagataaactaacagtagaagaactggaacaatttcaatccaagaaatttactctgggaaaaattccattaaagcctccacctctggaacttctaaatgtttaaaagggcaattttaaatacaaaaaagaatgatgtttaaaattgctttgagtgattcatacagagatgtatatatgcatacatgtatatattcataaggaatataagcttccatcaatagtgattttaaatttgatttttttcttaactctaaatatttaagtaaaaagtaacaaaaactctgcaagcaagggaatttttttgtactgtaattttgaatggaactgaaaaattatgcacgaataaagtacttttctcatgccaaaaaaaattac

SEQ ID NO: 420849 - DNA, 1722 bp, Homo sapiens
gccgcctactactactaaattcgcggccgcgtcgacccttagggctctctgcccagtaacaggcatcgaacggtgcagactgaagacgccctccgtcagcgacgccgtcgcaatggccatttgtcaattcttccttcaaggccggtgccgctttggagatcggtgctggaacgaacatcccggtgctaggggtgcaggaggaggacggcagcaaccgcagcagcagccttcaggtaataatagacgtggatggaatacaactagccagagatattccaatgtcatccagccatccagtttctccaaatccacaccatgggggggcagcagagatcaagaaaagccatatttcagttcttttgattctggagcttcaactaacaggaaggaaggctttggattgtctgagaacccatttgcttcacttagtcctgatgagcagaaagatgaaaagaaacttctggaaggaattgtaaaagatatggaggtttgggaatcatcagggcagtggatgttttctgtttattcaccagtgaaaaagaaacctaatatttcaggttttacagacatttcaccagaggaattgaggcttgaataccataacttcttaaccagcaataacttacagagttatctaaattctgtccaacgtttaataaatcaatggaggaacagggtaaatgaactgaaaagtctaaatatatcaactaaagtagctttgaaatgcctttggaagatatatacccacctgtctccaaagatctatggtcccgactgtggcaagttcctctctgatgtaaaggatggagtaaatcaagcagcacctgcatttggatttggcagcagtcaagcagcaacatttatgtcgccaggctttccagtcaataacagcagcagtgataatgctcagaactttagttttaaaacaaactctggatttgctgctgcctcttctggaagccctgctggttttgggagttccccagcatttggagctgcagcctctaccagttcaggtatctctacttctgctccagcttttggatttgggaagcctgaagtcacatcggctgcatcattttcattcaaaagccctgcagcttccagttttggatcacctggattttcaggacttccagcttccttggcaacaggtcctgtcagagctccagtggccccagcctttggaggtggcagttctgtggctggttttggtagtccgggctcacattctcacactgctttttctaagccatccagtgacacttttggaaatagcagcatatccacttctctgtcagcctcaagcagcatcattgcaacagataatgtgttattcacacccagagataaactaacagtagaagaactggaacaatttcaatccaagaaatttactctgggaaaaattccattaaagcctccacctctggaacttctaaatgtttaaaagggcaattttaaatacaaaaaagaatgatgtttaaaattgctttgagtgattcatacagagatgtatatatgcatacatgtatatattcataaggaatataagcttccatcaatagtgattttaaatttgatttttttcttaactctaaatatttaagtaaaaagtaacaaaaactctgcaagcaagggaatttttttgtactgtaattttgaatggaactgaaaaattatgcacgaataaagtacttttctcatgccaaaaaaaattac

SEQ ID NO: 420850 - DNA, 2731 bp, Homo sapiens
agcatccctccttcccaggacacactcaaagcgtcagagcggtccgctcttctcaagtcctattggctcaagtccatgcgtctcatggcactgccgggtgagaggcggaaaaaggccttcccaggcgcgagaagatgacgtcacagtagcccggccgggcgccgaggttgccttagggctctctgcccagtaacaggcatcgaacggtgcagactgaagacgccctccgtcagcgacgccgtcgcaatggccatttgtcaattcttccttcaaggccggtgccgctttggagatcggtgctggaacgaacatcccggtgctaggggtgcaggaggaggacggcagcaaccgcagcagcagccttcaggtaataatagacgtggatggaatacaactagccagagatattccaatgtcatccagccatccagtttctccaaatccacaccatgggggggcagcagagatcaagaaaagccatatttcagttcttttgattctggagcttcaactaacaggaaggaaggctttggattgtctgagaacccatttgcttcacttagtcctgatgagcagaaagatgaaaagaaacttctggaaggaattgtaaaagatatggaggtttgggaatcatcagggcagtggatgttttctgtttattcaccagtgaaaaagaaacctaatatttcagatgtgttcggagtttattccttctggtggggtccgtggtctcgctggctcaggagtgaagctgtggaccttcgcggtgagtgttacggctcttaaggcggcccgtctggagttgtttgttcctcccagtgggttcgtggtctcgctggcttcaggagtgaggctgaagaccttcgcggttttacagacatttcaccagaggaattgaggcttgaataccataacttcttaaccagcaataacttacagagttatgtaagtttgtttcctattaatctactgcaataacagatgagctcttaattactgctttctttatcgtggcttgtgttttggcaaaaccgatgaggtctatgatcttttttcaggagtaggctatttttcttttctatattattttcattgaatttggttggttattaaaatgataatatatttttactttaataattaggaatattactatttttattataaattacccaacagtcaatcccagaaatgaaacccttttatcatttgacagatatttattgaacatctgttaggtaccaatccagtgatgaatgctagaaaaacaaagttaaataagatacagtctgtaatacagattaacatcctcatatatcaaatatcaaaaaaaattaaaaatcttgactagaataagttgagtacctgaaggaagcagtttaaatgctgtatttttctgtttctacagtcatgatcatgcatttcaactagtacatgtattcaccgcccatccaaatataactaactacgtgctgccaggtacttgtgatactaaccagatgatacaaggagttgaacgggagagggaactggagctggcatatctttgacaaataggccaagtcaatgcaaattttgcaagtcatgggccataaaactgttacataaaccttttgtgattttggcaaagaagtatgtgaagtttttattgaagaaactaacttaaacatacaatattgaactgttatttttctgtcttccgttttcagctaaattctgtccaacgtttaataaatcaatggaggaacagggtaaatgaactgaaaagtctaaatatatcaactaaagtagctttgctctctgatgtaaaggatggagtaaatcaagcagcacctgcatttggatttggcagcagtcaagcagcaacatttatgtcgccaggctttccagtcaataacagcagcagtgataatgctcagaactttagttttaaaacaaactctggatttgctgctgcctcttctggaagccctgctggttttgggagttccccagcatttggagctgcagcctctaccagttcaggtatctctacttctgctccagcttttggatttgggaagcctgaagtcacatcggctgcatcattttcattcaaaagccctgcagcttccagttttggatcacctggattttcaggacttccagcttccttggcaacaggtcctgtcagagctccagtggccccagcctttggaggtggcagttctgtggctggttttggtagtccgggctcacattctcacactgctttttctaagccatccagtgacacttttggaaatagcagcatatccacttctctgtcagcctcaagcagcatcattgcaacagataatgtgttattcacacccagagataaactaacagtagaagaactggaacaatttcaatccaagaaatttactctgggaaaaattccattaaagcctccacctctggaacttctaaatgtttaaaagggcaattttaaatacaaaaaagaatgatgtttaaaattgctttgagtgattcatacagagatgtatatatgcatacatgtatatattcataaggaatataagcttccatcaatagtgattttaaatttgatttttttcttaactctaaatatttaagtaaaaagtaacaaaaactctgcaagcaagggaatttttttgtactgtaattttgaatggaactgaaaaattatgcacgaataaagtacttttctcatgccaaaaaaaattac

SEQ ID NO: 420851 - DNA, 2837 bp, Homo sapiens
agcatccctccttcccaggacacactcaaagcgtcagagcggtccgctcttctcaagtcctattggctcaagtccatgcgtctcatggcactgccgggtgagaggcggaaaaaggccttcccaggcgcgagaagatgacgtcacagtagcccggccgggcgccgaggttgccttagggctctctgcccagtaacaggcatcgaacggtgcagactgaagacgccctccgtcagcgacgccgtcgcaatggccatttgtcaattcttccttcaaggccggtgccgctttggagatcggtgctggaacgaacatcccggtgctaggggtgcaggaggaggacggcagcaaccgcagcagcagccttcaggtgactctcctctgaatcctccgcggtaaccgagccgggaagggtccgccggcggggaccgggcgtcccgcgtgtttcccgctgctggtgaccccaacgtgcccgcgtcgcggccttgccggccctactgggccctgcacaacgtttttaaaccgagggttttatctacatattattcatgtggtccgtttttattgagcttctgaggacctgggtttgggcctggatgcttgtgcgaaactgagtttttaaatcggaagtacctatcgaaactaccttgtaggtaataatagacgtggatggaatacaactagccagagatattccaatgtcatccagccatccagtttctccaaatccacaccatgggggggcagcagagatcaagaaaagccatatttcagttcttttgattctggagcttcaactaacaggaaggaaggctttggattgtctgagaacccatttgcttcacttagtcctgatgagcagaaagatgaaaagaaacttctggaaggaattgtaaaagatatggaggtttgggaatcatcagggcagtggatgttttctgtttattcaccagtgaaaaagaaacctaatatttcaggttttacagacatttcaccagaggaattgaggcttgaataccataacttcttaaccagcaataacttacagagttatgtaagtttgtttcctattaatctactgcaataacagatgagctcttaattactgctttctttatcgtggcttgtgttttggcaaaaccgatgaggtctatgatcttttttcaggagtaggctatttttcttttctatattattttcattgaatttggttggttattaaaatgataatatatttttactttaataattaggaatattactatttttattataaattacccaacagtcaatcccagaaatgaaacccttttatcatttgacagatatttattgaacatctgttaggtaccaatccagtgatgaatgctagaaaaacaaagttaaataagatacagtctgtaatacagattaacatcctcatatatcaaatatcaaaaaaaattaaaaatcttgactagaataagttgagtacctgaaggaagcagtttaaatgctgtatttttctgtttctacagtcatgatcatgcatttcaactagtacatgtattcaccgcccatccaaatataactaactacgtgctgccaggtacttgtgatactaaccagatgatacaaggagttgaacgggagagggaactggagctggcatatctttgacaaataggccaagtcaatgcaaattttgcaagtcatgggccataaaactgttacataaaccttttgtgattttggcaaagaagtatgtgaagtttttattgaagaaactaacttaaacatacaatattgaactgttatttttctgtcttccgttttcagctaaattctgtccaacgtttaataaatcaatggaggaacagggtaaatgaactgaaaagtctaaatatatcaactaaagtagctttgctctctgatgtaaaggatggagtaaatcaagcagcacctgcatttggatttggcagcagtcaagcagcaacatttatgtcgccaggctttccagtcaataacagcagcagtgataatgctcagaactttagttttaaaacaaactctggatttgctgctgcctcttctggaagccctgctggttttgggagttccccagcatttggagctgcagcctctaccagttcaggtatctctacttctgctccagcttttggatttgggaagcctgaagtcacatcggctgcatcattttcattcaaaagccctgcagcttccagttttggatcacctggattttcaggacttccagcttccttggcaacaggtcctgtcagagctccagtggccccagcctttggaggtggcagttctgtggctggttttggtagtccgggctcacattctcacactgctttttctaagccatccagtgacacttttggaaatagcagcatatccacttctctgtcagcctcaagcagcatcattgcaacagataatgtgttattcacacccagagataaactaacagtagaagaactggaacaatttcaatccaagaaatttactctgggaaaaattccattaaagcctccacctctggaacttctaaatgtttaaaagggcaattttaaatacaaaaaagaatgatgtttaaaattgctttgagtgattcatacagagatgtatatatgcatacatgtatatattcataaggaatataagcttccatcaatagtgattttaaatttgatttttttcttaactctaaatatttaagtaaaaagtaacaaaaactctgcaagcaagggaatttttttgtactgtaattttgaatggaactgaaaaattatgcacgaataaagtacttttctcatgccaaaaaaaattac

SEQ ID NO: 420852 - DNA, 2073 bp, Homo sapiens
agcatccctccttcccaggacacactcaaagcgtcagagcggtccgctcttctcaagtcctattggctcaagtccatgcgtctcatggcactgccgggtgagaggcggaaaaaggccttcccaggcgcgagaagatgacgtcacagtagcccggccgggcgccgaggttgccttagggctctctgcccagtaacaggcatcgaacggtgcagactgaagacgccctccgtcagcgacgccgtcgcaatggccatttgtcaattcttccttcaaggccggtgccgctttggagatcggtgctggaacgaacatcccggtgctaggggtgcaggaggaggacggcagcaaccgcagcagcagccttcaggtgactctcctctgaatcctccgcggtaaccgagccgggaagggtccgccggcggggaccgggcgtcccgcgtgtttcccgctgctggtgaccccaacgtgcccgcgtcgcggccttgccggccctactgggccctgcacaacgtttttaaaccgagggttttatctacatattattcatgtggtccgtttttattgagcttctgaggacctgggtttgggcctggatgcttgtgcgaaactgagtttttaaatcggaagtacctatcgaaactaccttgtaggtaataatagacgtggatggaatacaactagccagagatattccaatgtcatccagccatccagtttctccaaatccacaccatgggggggcagcagagatcaagaaaagccatatttcagttcttttgattctggagcttcaactaacaggaaggaaggctttggattgtctgagaacccatttgcttcacttagtcctgatgagcagaaagatgaaaagaaacttctggaaggaattgtaaaagatatggaggtttgggaatcatcagggcagtggatgttttctgtttattcaccagtgaaaaagaaacctaatatttcaggttttacagacatttcaccagaggaattgaggcttgaataccataacttcttaaccagcaataacttacagagttatctaaattctgtccaacgtttaataaatcaatggaggaacagggtaaatgaactgaaaagtctaaatatatcaactaaagtagctttgctctctgatgtaaaggatggagtaaatcaagcagcacctgcatttggatttggcagcagtcaagcagcaacatttatgtcgccaggctttccagtcaataacagcagcagtgataatgctcagaactttagttttaaaacaaactctggatttgctgctgcctcttctggaagccctgctggttttgggagttccccagcatttggagctgcagcctctaccagttcaggtatctctacttctgctccagcttttggatttgggaagcctgaagtcacatcggctgcatcattttcattcaaaagccctgcagcttccagttttggatcacctggattttcaggacttccagcttccttggcaacaggtcctgtcagagctccagtggccccagcctttggaggtggcagttctgtggctggttttggtagtccgggctcacattctcacactgctttttctaagccatccagtgacacttttggaaatagcagcatatccacttctctgtcagcctcaagcagcatcattgcaacagataatgtgttattcacacccagagataaactaacagtagaagaactggaacaatttcaatccaagaaatttactctgggaaaaattccattaaagcctccacctctggaacttctaaatgtttaaaagggcaattttaaatacaaaaaagaatgatgtttaaaattgctttgagtgattcatacagagatgtatatatgcatacatgtatatattcataaggaatataagcttccatcaatagtgattttaaatttgatttttttcttaactctaaatatttaagtaaaaagtaacaaaaactctgcaagcaagggaatttttttgtactgtaattttgaatggaactgaaaaattatgcacgaataaagtacttttctcatgccaaaaaaaattac

SEQ ID NO: 420853 - DNA, 2960 bp, Homo sapiens
agaaatccaaggtgattcctagggttttttggcctgagaggtcagtaaagatggggaagacaagtcattagaaggaatccagggaaacatttagtctttcctttactctgaagcaggtgtccttggagttaataataactggattacaaggaattctttgtagaaaatatcttgaacattttttgcctttcttagtaagtttgcccaaagtgctgcaactacaggcgtgagccaccgtgcccggccctagttttatattctaatttttgctttcagtttgtctctggtactaaaaatattagaatgaacacccttatacatagcaacctttgtttacatatataactatttcccaaggttaaatcctataaattgtattataagtcacaggatatgaatgtttttcaggcttgtgatgcttattaacaattatccctcccagaaaacttgtaccattttaattcccttaacggtaatttaggaaatgatacatttcaccacatttggaacaacagtaaataccagcttttaaaatttctgccagtctgataagtaaagcattttatctctattttaagttgcatttaactttatttcatttatttactatttgattttttttgtgtgtgaattgcctgttcattatctttgcccaaattcatttacttttctcatttatttgtaagagctatttgtacattagggcattagttcttctcttgtcatatatgttaaaattgcaattttcctagtgtaccatttgccttgtaattttgcttagtatagtttctggcagaatttttaaaataaaagtttgaatataaatgtagtcaaatctttctcctgtgtttgttgttcattctacgccacttatctttagaaaatcttccccatttaaagatcagaataaccaactatattttactgtaattttacactttattaaacattaagtagagtgtaggctttaagtttcttcctcatggttatgaaaattttctaatcaacattagatattttcttgtttagcacctctagctttactatcaaaattattggcatttattttaaagattccgattgattcctcacttcaggttttacagacatttcaccagaggaattgaggcttgaataccataacttcttaaccagcaataacttacagagttatgtaagtttgtttcctattaatctactgcaataacagatgagctcttaattactgctttctttatcgtggcttgtgttttggcaaaaccgatgaggtctatgatcttttttcaggagtaggctatttttcttttctatattattttcattgaatttggttggttattaaaatgataatatatttttactttaataattaggaatattactatttttattataaattacccaacagtcaatcccagaaatgaaacccttttatcatttgacagatatttattgaacatctgttaggtaccaatccagtgatgaatgctagaaaaacaaagttaaataagatacagtctgtaatacagattaacatcctcatatatcaaatatcaaaaaaaattaaaaatcttgactagaataagttgagtacctgaaggaagcagtttaaatgctgtatttttctgtttctacagtcatgatcatgcatttcaactagtacatgtattcaccgcccatccaaatataactaactacgtgctgccaggtacttgtgatactaaccagatgatacaaggagttgaacgggagagggaactggagctggcatatctttgacaaataggccaagtcaatgcaaattttgcaagtcatgggccataaaactgttacataaaccttttgtgattttggcaaagaagtatgtgaagtttttattgaagaaactaacttaaacatacaatattgaactgttatttttctgtcttccgttttcagctaaattctgtccaacgtttaataaatcaatggaggaacagggtaaatgaactgaaaagtctaaatatatcaactaaagtagctttgctctctgatgtaaaggatggagtaaatcaagcagcacctgcatttggatttggcagcagtcaagcagcaacatttatgtcgccaggctttccagtcaataacagcagcagtgataatgctcagaactttagttttaaaacaaactctggatttgctgctgcctcttctggaagccctgctggttttgggagttccccagcatttggagctgcagcctctaccagttcaggtatctctacttctgctccagcttttggatttgggaagcctgaagtcacatcggctgcatcattttcattcaaaagccctgcagcttccagttttggatcacctggattttcaggacttccagcttccttggcaacaggtcctgtcagagctccagtggccccagcctttggaggtggcagttctgtggctggttttggtagtccgggctcacattctcacactgctttttctaagccatccagtgacacttttggaaatagcagcatatccacttctctgtcagcctcaagcagcatcattgcaacagataatgtgttattcacacccagagataaactaacagtagaagaactggaacaatttcaatccaagaaatttactctgggaaaaattccattaaagcctccacctctggaacttctaaatgtttaaaagggcaattttaaatacaaaaaagaatgatgtttaaaattgctttgagtgattcatacagagatgtatatatgcatacatgtatatattcataaggaatataagcttccatcaatagtgattttaaatttgatttttttcttaactctaaatatttaagtaaaaagtaacaaaaactctgcaagcaagggaatttttttgtactgtaattttgaatggaactgaaaaattatgcacgaataaagtacttttctcatgccaaaaaaaattac

SEQ ID NO: 420854 - DNA, 2904 bp, Homo sapiens
agaaatccaaggtgattcctagggttttttggcctgagaggtcagtaaagatggggaagacaagtcattagaaggaatccagggaaacatttagtctttcctttactctgaagcaggtgtccttggagttaataataactggattacaaggaattctttgtagaaaatatcttgaacattttttgcctttcttagtaagtttgcccaaagtgctgcaactacaggcgtgagccaccgtgcccggccctagttttatattctaatttttgctttcagtttgtctctggtactaaaaatattagaatgaacacccttatacatagcaacctttgtttacatatataactatttcccaaggttaaatcctataaattgtattataagtcacaggatatgaatgtttttcaggcttgtgatgcttattaacaattatccctcccagaaaacttgtaccattttaattcccttaacggtaatttaggaaatgatacatttcaccacatttggaacaacagtaaataccagcttttaaatttatttcatttatttactatttgattttttttgtgtgtgaattgcctgttcattatctttgcccaaattcatttacttttctcatttatttgtaagagctatttgtacattagggcattagttcttctcttgtcatatatgttaaaattgcaattttcctagtgtaccatttgccttgtaattttgcttagtatagtttctggcagaatttttaaaataaaagtttgaatataaatgtagtcaaatctttctcctgtgtttgttgttcattctacgccacttatctttagaaaatcttccccatttaaagatcagaataaccaactatattttactgtaattttacactttattaaacattaagtagagtgtaggctttaagtttcttcctcatggttatgaaaattttctaatcaacattagatattttcttgtttagcacctctagctttactatcaaaattattggcatttattttaaagattccgattgattcctcacttcaggttttacagacatttcaccagaggaattgaggcttgaataccataacttcttaaccagcaataacttacagagttatgtaagtttgtttcctattaatctactgcaataacagatgagctcttaattactgctttctttatcgtggcttgtgttttggcaaaaccgatgaggtctatgatcttttttcaggagtaggctatttttcttttctatattattttcattgaatttggttggttattaaaatgataatatatttttactttaataattaggaatattactatttttattataaattacccaacagtcaatcccagaaatgaaacccttttatcatttgacagatatttattgaacatctgttaggtaccaatccagtgatgaatgctagaaaaacaaagttaaataagatacagtctgtaatacagattaacatcctcatatatcaaatatcaaaaaaaattaaaaatcttgactagaataagttgagtacctgaaggaagcagtttaaatgctgtatttttctgtttctacagtcatgatcatgcatttcaactagtacatgtattcaccgcccatccaaatataactaactacgtgctgccaggtacttgtgatactaaccagatgatacaaggagttgaacgggagagggaactggagctggcatatctttgacaaataggccaagtcaatgcaaattttgcaagtcatgggccataaaactgttacataaaccttttgtgattttggcaaagaagtatgtgaagtttttattgaagaaactaacttaaacatacaatattgaactgttatttttctgtcttccgttttcagctaaattctgtccaacgtttaataaatcaatggaggaacagggtaaatgaactgaaaagtctaaatatatcaactaaagtagctttgctctctgatgtaaaggatggagtaaatcaagcagcacctgcatttggatttggcagcagtcaagcagcaacatttatgtcgccaggctttccagtcaataacagcagcagtgataatgctcagaactttagttttaaaacaaactctggatttgctgctgcctcttctggaagccctgctggttttgggagttccccagcatttggagctgcagcctctaccagttcaggtatctctacttctgctccagcttttggatttgggaagcctgaagtcacatcggctgcatcattttcattcaaaagccctgcagcttccagttttggatcacctggattttcaggacttccagcttccttggcaacaggtcctgtcagagctccagtggccccagcctttggaggtggcagttctgtggctggttttggtagtccgggctcacattctcacactgctttttctaagccatccagtgacacttttggaaatagcagcatatccacttctctgtcagcctcaagcagcatcattgcaacagataatgtgttattcacacccagagataaactaacagtagaagaactggaacaatttcaatccaagaaatttactctgggaaaaattccattaaagcctccacctctggaacttctaaatgtttaaaagggcaattttaaatacaaaaaagaatgatgtttaaaattgctttgagtgattcatacagagatgtatatatgcatacatgtatatattcataaggaatataagcttccatcaatagtgattttaaatttgatttttttcttaactctaaatatttaagtaaaaagtaacaaaaactctgcaagcaagggaatttttttgtactgtaattttgaatggaactgaaaaattatgcacgaataaagtacttttctcatgccaaaaaaaattac

SEQ ID NO: 420855 - DNA, 1713 bp, Homo sapiens
agcatccctccttcccaggacacactcaaagcgtcagagcggtccgctcttctcaagtcctattggctcaagtccatgcgtctcatggcactgccgggtgagaggcggaaaaaggccttcccaggcgcgagaagatgacgtcacagtagcccggccgggcgccgaggttgccttagggctctctgcccagtaacaggcatcgaacggtgcagactgaagacgccctccgtcagcgacgccgtcgcaatggccatttgtcaattcttccttcaaggccggtgccgctttggagatcggtgctggaacgaacatcccggtgctaggggtgcaggaggaggacggcagcaaccgcagcagcagccttcaggtaataatagacgtggatggaatacaactagccagagatattccaatgtcatccagccatccagtttctccaaatccacaccatgggggggcagcagagatcaagaaaagccatatttcagttcttttgattctggagcttcaactaacaggaaggaaggctttggattgtctgagaacccatttgcttcacttagtcctgatgagcagaaagatgaaaagaaacttctggaaggaattgtaaaagatatggaggtttgggaatcatcagggcagtggatgttttctgtttattcaccagtgaaaaagaaacctaatatttcagctaaattctgtccaacgtttaataaatcaatggaggaacagggtaaatgaactgaaaagtctaaatatatcaactaaagtagctttgctctctgatgtaaaggatggagtaaatcaagcagcacctgcatttggatttggcagcagtcaagcagcaacatttatgtcgccaggctttccagtcaataacagcagcagtgataatgctcagaactttagttttaaaacaaactctggatttgctgctgcctcttctggaagccctgctggttttgggagttccccagcatttggagctgcagcctctaccagttcaggtatctctacttctgctccagcttttggatttgggaagcctgaagtcacatcggctgcatcattttcattcaaaagccctgcagcttccagttttggatcacctggattttcaggacttccagcttccttggcaacaggtcctgtcagagctccagtggccccagcctttggaggtggcagttctgtggctggttttggtagtccgggctcacattctcacactgctttttctaagccatccagtgacacttttggaaatagcagcatatccacttctctgtcagcctcaagcagcatcattgcaacagataatgtgttattcacacccagagataaactaacagtagaagaactggaacaatttcaatccaagaaatttactctgggaaaaattccattaaagcctccacctctggaacttctaaatgtttaaaagggcaattttaaatacaaaaaagaatgatgtttaaaattgctttgagtgattcatacagagatgtatatatgcatacatgtatatattcataaggaatataagcttccatcaatagtgattttaaatttgatttttttcttaactctaaatatttaagtaaaaagtaacaaaaactctgcaagcaagggaatttttttgtactgtaattttgaatggaactgaaaaattatgcacgaataaagtacttttctcatgccaaaaaaaattac

SEQ ID NO: 420856 - DNA, 2140 bp, Homo sapiens
agaaatccaaggtgattcctagggttttttggcctgagaggtcagtaaagatggggaagacaagtcattagaaggaatccagggaaacatttagtctttcctttactctgaagcaggtgtccttggagttaataataactggattacaaggaattctttgtagaaaatatcttgaacattttttgcctttcttagtaagtttgcccaaagtgctgcaactacaggcgtgagccaccgtgcccggccctagttttatattctaatttttgctttcagtttgtctctggtactaaaaatattagaatgaacacccttatacatagcaacctttgtttacatatataactatttcccaaggttaaatcctataaattgtattataagtcacaggatatgaatgtttttcaggcttgtgatgcttattaacaattatccctcccagaaaacttgtaccattttaattcccttaacggtaatttaggaaatgatacatttcaccacatttggaacaacagtaaataccagcttttaaatttatttcatttatttactatttgattttttttgtgtgtgaattgcctgttcattatctttgcccaaattcatttacttttctcatttatttgtaagagctatttgtacattagggcattagttcttctcttgtcatatatgttaaaattgcaattttcctagtgtaccatttgccttgtaattttgcttagtatagtttctggcagaatttttaaaataaaagtttgaatataaatgtagtcaaatctttctcctgtgtttgttgttcattctacgccacttatctttagaaaatcttccccatttaaagatcagaataaccaactatattttactgtaattttacactttattaaacattaagtagagtgtaggctttaagtttcttcctcatggttatgaaaattttctaatcaacattagatattttcttgtttagcacctctagctttactatcaaaattattggcatttattttaaagattccgattgattcctcacttcaggttttacagacatttcaccagaggaattgaggcttgaataccataacttcttaaccagcaataacttacagagttatctaaattctgtccaacgtttaataaatcaatggaggaacagggtaaatgaactgaaaagtctaaatatatcaactaaagtagctttgctctctgatgtaaaggatggagtaaatcaagcagcacctgcatttggatttggcagcagtcaagcagcaacatttatgtcgccaggctttccagtcaataacagcagcagtgataatgctcagaactttagttttaaaacaaactctggatttgctgctgcctcttctggaagccctgctggttttgggagttccccagcatttggagctgcagcctctaccagttcaggtatctctacttctgctccagcttttggatttgggaagcctgaagtcacatcggctgcatcattttcattcaaaagccctgcagcttccagttttggatcacctggattttcaggacttccagcttccttggcaacaggtcctgtcagagctccagtggccccagcctttggaggtggcagttctgtggctggttttggtagtccgggctcacattctcacactgctttttctaagccatccagtgacacttttggaaatagcagcatatccacttctctgtcagcctcaagcagcatcattgcaacagataatgtgttattcacacccagagataaactaacagtagaagaactggaacaatttcaatccaagaaatttactctgggaaaaattccattaaagcctccacctctggaacttctaaatgtttaaaagggcaattttaaatacaaaaaagaatgatgtttaaaattgctttgagtgattcatacagagatgtatatatgcatacatgtatatattcataaggaatataagcttccatcaatagtgattttaaatttgatttttttcttaactctaaatatttaagtaaaaagtaacaaaaactctgcaagcaagggaatttttttgtactgtaattttgaatggaactgaaaaattatgcacgaataaagtacttttctcatgccaaaaaaaattac

SEQ ID NO: 420857 - DNA, 1707 bp, Homo sapiens
tttcagggaatgggaaatgtttaatggatttttagtcataagcttttaattatataatagtggatctacttcgagtattagactgggtattctataaaggtcctttttacctaatatctagatttcttgataaatgcagatctacccttatagacactgaaaaaaatttaaaaatatttttctgattataatatctgctcattgtagaaatttagaaagtataaaaaagcataaataaaatttaaatcacctgtaatttatcagccagagataatcactgttaacttactaatgtacattttttatgcatattcatattactagttgtgattatactgtttatacagtattatgtcttatccttttcaacatcatattatgggcattttccatgttaagcatttaactttgccttttttaatgcacttttttcttctcttttctttttttgagtcagagtcttactttgtcatccaggctttcccaggctcaagtgatcctcccacctcaggctcccaaatagctgggaccactggctaattttttatagagatgggggtctcgctgtgttgctgaggctggtcccagactcataggctcaagcccttcaccctcctcagcctcccaaagtgctaggattacaggtgtgagccaccacacccagcctttaatgcacattttaaaaacttgaatttgtccataaagtgtatagaaaagatactggagcactattcatcaagcactttattatttgcacacttttttttttcagctctctgatgtaaaggatggagtaaatcaagcagcacctgcatttggatttggcagcagtcaagcagcaacatttatgtcgccaggctttccagtcaataacagcagcagtgataatgctcagaactttagttttaaaacaaactctggatttgctgctgcctcttctggaagccctgctggttttgggagttccccagcatttggagctgcagcctctaccagttcaggtatctctacttctgctccagcttttggatttgggaagcctgaagtcacatcggctgcatcattttcattcaaaagccctgcagcttccagttttggatcacctggattttcaggacttccagcttccttggcaacaggtcctgtcagagctccagtggccccagcctttggaggtggcagttctgtggctggttttggtagtccgggctcacattctcacactgctttttctaagccatccagtgacacttttggaaatagcagcatatccacttctctgtcagcctcaagcagcatcattgcaacagataatgtgttattcacacccagagataaactaacagtagaagaactggaacaatttcaatccaagaaatttactctgggaaaaattccattaaagcctccacctctggaacttctaaatgtttaaaagggcaattttaaatacaaaaaagaatgatgtttaaaattgctttgagtgattcatacagagatgtatatatgcatacatgtatatattcataaggaatataagcttccatcaatagtgattttaaatttgatttttttcttaactctaaatatttaagtaaaaagtaacaaaaactctgcaagcaagggaatttttttgtactgtaattttgaatggaactgaaaaattatgcacgaataaagtacttttctcatgccaaaaaaaattac

SEQ ID NO: 420858 - DNA, 1651 bp, Homo sapiens
gccgcctactactactaaattcgcggccgcgtcgacccttagggctctctgcccagtaacaggcatcgaacggtgcagactgaagacgccctccgtcagcgacgccgtcgcaatggccatttgtcaattcttccttcaaggccggtgccgctttggagatcggtgctggaacgaacatcccggtgctaggggtgcaggaggaggacggcagcaaccgcagcagcagccttcaggtaataatagacgtggatggaatacaactagccagagatattccaatgtcatccagccatccagtttctccaaatccacaccatgggggggcagcagagatcaagaaaagccatatttcagttcttttgattctggagcttcaactaacaggaaggaaggctttggattgtctgagaacccatttgcttcacttagtcctgatgagcagaaagatgaaaagaaacttctggaaggaattgtaaaagatatggaggtttgggaatcatcagggcagtggatgttttctgtttattcaccagtgaaaaagaaacctaatatttcaggttttacagacatttcaccagaggaattgaggcttgaataccataacttcttaaccagcaataacttacagagttatctaaattctgtccaacgtttaataaatcaatggaggaacagggtaaatgaactgaaaagtctaaatatatcaactaaagtagctttgaaatgcctttggaagatatatacccacctgtctccaaagatctatggtcccgactgtggcaagttcctctctgatgtaaaggatggagtaaatcaagcagcacctgcatttggatttggcagcagtcaagcagcaacatttatgtcgccaggctttccagtcaataacagcagcagtgataatgctcagaactttagttttaaaacaaactctggatttgctgctgcctcttctggaagccctgctggttttgggagttccccagcatttggagctgcagcctctaccagttcaggtatctctacttctgctccagcttttggatttgggaagcctgaagtcacatcggctgcatcattttcattcaaaagccctgcagcttccagttttggatcacctggattttcaggacttccagcttccttggcaacaggtcctgtcagagctccagtggccccagcctttggaggtggcagttctgtggctggttttggtagtccgggctcacattctcacactgctttttctaagccatccagtgacacttttggaaatagcagcatatccacttctctgtcagcctcaagcagcatcattgcaacagataatgtgttattcacacccagagataaactaacagtagaagaactggaacaatttcaatccaagaaatttactctgggaaaaattccattaagctcactttgactctaatgttaaggattaatcgaacaagatgtgtttaatgcttgagggatcacggaagttattgctatgtatatcacaggataaggcacaggggttaatgattgtactaattagtaaggaaaatggcaggttggtggtgagagaatgcagagtttcgtaaaaaaaatgggggcgataaaggggaaagagagtgtttaagctatttcatcacaatgaaagaat

SEQ ID NO: 420859 - DNA, 1112 bp, Homo sapiens
agcatccctccttcccaggacacactcaaagcgtcagagcggtccgctcttctcaagtcctattggctcaagtccatgcgtctcatggcactgccgggtgagaggcggaaaaaggccttcccaggcgcgagaagatgacgtcacagtagcccggccgggcgccgaggttgccttagggctctctgcccagtaacaggcatcgaacggtgcagactgaagacgccctccgtcagcgacgccgtcgcaatggccatttgtcaattcttccttcaaggccggtgccgctttggagatcggtgctggaacgaacatcccggtgctaggggtgcaggaggaggacggcagcaaccgcagcagcagccttcaggtaataatagacgtggatggaatacaactagccagagatattccaatgtcatccagccatccagtttctccaaatccacaccatgggggggcagcagagatcaagaaaagccatatttcagttcttttgattctggagcttcaactaacaggaaggaaggctttggattgtctgagaacccatttgcttcacttagtcctgatgagcagaaagatgaaaagaaacttctggaaggaattgtaaaagatatggaggtttgggaatcatcagggcagtggatgttttctgtttattcaccagtgaaaaagaaacctaatatttcaggtaactgaaaaattgtgcatttttaaagtatgttctaaaactattattttctaaaaccaaaagaatgccaaataaagaaatcaactaccaacttagctacaactaggagagtttgggcattgtttaaagtattcgagtattctagccaaacttcataatttagagattaaggttggagaatatagtcttttaagacatatagttcttgggagaaaacatttaaataaagcccaggaagagactctacgttcttgattccctgtatgtacaactttggaacctcttagcttcctgttgtgaatagaagagtcatcctgcctgtcattaaggccttggctgcctggttctgttctttcttccctgtctttccttctaagaatagtatgttgagacctgttcgttccatttcgtacactctaga

SEQ ID NO: 420860 - DNA, 861 bp, Homo sapiens
agcatccctccttcccaggacacactcaaagcgtcagagcggtccgctcttctcaagtcctattggctcaagtccatgcgtctcatggcactgccgggtgagaggcggaaaaaggccttcccaggcgcgagaagatgacgtcacagtagcccggccgggcgccgaggttgccttagggctctctgcccagtaacaggcatcgaacggtgcagactgaagacgccctccgtcagcgacgccgtcgcaatggccatttgtcaattcttccttcaaggccggtgccgctttggagatcggtgctggaacgaacatcccggtgctaggggtgcaggaggaggacggcagcaaccgcagcagcagccttcaggtaataatagacgtggatggaatacaactagccagagatattccaatgtcatccagccatccagtttctccaaatccacaccatgggggggcagcagagatcaagaaaagccatatttcagttcttttgattctggagcttcaactaacaggaaggaaggctttggattgtctgagaacccatttgcttcacttagtcctgatgagcagaaagatgaaaagaaacttctggaaggaattgtaaaagatatggaggtttgggaatcatcagggcagtggatgttttctgtttattcaccagtgaaaaagaaacctaatatttcagtccctaagccctttctgggctgaaacctagaccaccgggctttcccaagcccactctgggtgttcctgggcctccgtccttttgaggaaacagtgggtaccttgcaaatgggagctcttgcaatcaatatcgcagaaccttgggatctttcctctgtctcagttctagtt

SEQ ID NO: 420861 - DNA, 745 bp, Homo sapiens
agcatccctccttcccaggacacactcaaagcgtcagagcggtccgctcttctcaagtcctattggctcaagtccatgcgtctcatggcactgccgggtgagaggcggaaaaaggccttcccaggcgcgagaagatgacgtcacagtagcccggccgggcgccgaggttgccttagggctctctgcccagtaacaggcatcgaacggtgcagactgaagacgccctccgtcagcgacgccgtcgcaatggccatttgtcaattcttccttcaaggccggtgccgctttggagatcggtgctggaacgaacatcccggtgctaggggtgcaggaggaggacggcagcaaccgcagcagcagccttcaggtgactctcctctgaatcctccgcggtaaccgagccgggaagggtccgccggcggggaccgggcgtcccgcgtgtttcccgctgctggtgaccccaacgtgcccgcgtcgcggccttgccggccctactgggccctgcacaacgtttttaaaccgagggttttatctacatattattcatgtggtccgtttttattgagcttctgaggacctgggtttgggcctggatgcttgtgcgaaactgagtttttaaatcggaagtacctatcgaaactaccttgtaggtaaatgccggaattgaatataatttttactaagttgttttttcgagggtgaggctagcagcctgggcaacagagcaagacttcatctcaaaaaa

SEQ ID NO: 420862 - DNA, 406 bp, Homo sapiens
cgtgctgccaggtacttgtgatactaaccagatgatacaaggagttgaacgggagagggaactggagctggcatatctttgacaaataggccaagtcaatgcaaattttgcaagtcatgggccataaaactgttacataaaccttttgtgattttggcaaagaagtatgtgaagtttttattgaagaaactaacttaaacatacaatattgaactgttatttttctgtcttccgttttcagctaaattctgtccaacgtttaataaatcaatggaggaacagggtaaatgaactgaaaagtctaaatatatcaactaaagtagctttggtgagtatgggagagttttcttgagggaagtgtcttacctattgcttttttgcagaggatattttactttagatttgg

SEQ ID NO: 420863 - DNA, 1790 bp, Homo sapiens
agcatccctccttcccaggacacactcaaagcgtcagagcggtccgctcttctcaagtcctattggctcaagtccatgcgtctcatggcactgccgggtgagaggcggaaaaaggccttcccaggcgcgagaagatgacgtcacagtagcccggccgggcgccgaggttgccttagggctctctgcccagtaacaggcatcgaacggtgcagactgaagacgccctccgtcagcgacgccgtcgcaatggccatttgtcaattcttccttcaaggccggtgccgctttggagatcggtgctggaacgaacatcccggtgctaggggtgcaggaggaggacggcagcaaccgcagcagcagccttcaggtaataatagacgtggatggaatacaactagccagagatattccaatgtcatccagccatccagtttctccaaatccacaccatgggggggcagcagagatcaagaaaagccatatttcagttcttttgattctggagcttcaactaacaggaaggaaggctttggattgtctgagaacccatttgcttcacttagtcctgatgagcagaaagatgaaaagaaacttctggaaggaattgtaaaagatatggaggtttgggaatcatcagggcagtggatgttttctgtttattcaccagtgaaaaagaaacctaatatttcaggttttacagacatttcaccagaggaattgaggcttgaataccataacttcttaaccagcaataacttacagagttatctaaattctgtccaacgtttaataaatcaatggaggaacagggtaaatgaactgaaaagtctaaatatatcaactaaagtagctttgctctctgatgtaaaggatggagtaaatcaagcagcacctgcatttggatttggcagcagtcaagcagcaacatttatgtcgccaggctttccagtcaataacagcagcagtgataatgctcagaactttagttttaaaacaaactctggatttgctgctgcctcttctggaagccctgctggttttgggagttccccagcatttggagctgcagcctctaccagttcaggtatctctacttctgctccagcttttggatttgggaagcctgaagtcacatcggctgcatcattttcattcaaaagccctgcagcttccagttttggatcacctggattttcaggacttccagcttccttggcaacaggtcctgtcagagctccagtggccccagcctttggaggtggcagttctgtggctggttttggtagtccgggctcacattctcacactgctttttctaagccatccagtgacacttttggaaatagcagcatatccacttctctgtcagcctcaagcagcatcattgcaacagataatgtgttattcacacccagagataaactaacagtagaagaactggaacaatttcaatccaagaaatttactctgggaaaaattccattaaagcctccacctctggaacttctaaatgtttaaaagggcaattttaaatacaaaaaagaatgatgtttaaaattgctttgagtgattcatacagagatgtatatatgcatacatgtatatattcataaggaatataagcttccatcaatagtgattttaaatttgatttttttcttaactctaaatatttaagtaaaaagtaacaaaaactctgcaagcaagggaatttttttgtactgtaattttgaatggaactgaaaaattatgcacgaataaagtacttttctcatgccaaaaaaaattac

SEQ ID NO: 420864 - DNA, 1631 bp, Homo sapiens
gccgcctactactactaaattcgcggccgcgtcgaccgcatcgaacggtgcagactgaagacgccctccgtcagcgacgccgtcgcaatggccatttgtcaattcttccttcaaggccggtgccgctttggagatcggtgctggaacgaacatcccggtgctaggggtgcaggaggaggacggcagcaaccgcagcagcagccttcaggtaataatagacgtggatggaatacaactagccagagatattccaatgtcatccagccatccagtttctccaaatccacaccatgggggggcagcagagatcaagaaaagccatatttcagttcttttgattctggagcttcaactaacaggaaggaaggctttggattgtctgagaacccatttgcttcacttagtcctgatgagcagaaagatgaaaagaaacttctggaaggaattgtaaaagatatggaggtttgggaatcatcagggcagtggatgttttctgtttattcaccagtgaaaaagaaacctaatatttcaggttttacagacatttcaccagaggaattgaggcttgaataccataacttcttaaccagcaataacttacagagttatctaaattctgtccaacgtttaataaatcaatggaggaacagggtaaatgaactgaaaagtctaaatatatcaactaaagtagctttgctctctgatgtaaaggatggagtaaatcaagcagcacctgcatttggatttggcagcagtcaagcagcaacatttatgtcgccaggctttccagtcaataacagcagcagtgataatgctcagaactttagttttaaaacaaactctggatttgctgctgcctcttctggaagccctgctggttttgggagttccccagcatttggagctgcagcctctaccagttcaggtatctctacttctgctccagcttttggatttgggaagcctgaagtcacatcggctgcatcattttcattcaaaagccctgcagcttccagttttggatcacctggattttcaggacttccagcttccttggcaacaggtcctgtcagagctccagtggccccagcctttggaggtggcagttctgtggctggttttggtagtccgggctcacattctcacactgctttttctaagccatccagtgacacttttggaaatagcagcatatccacttctctgtcagcctcaagcagcatcattgcaacagataatgtgttattcacacccagagataaactaacagtagaagaactggaacaatttcaatccaagaaatttactctgggaaaaattccattaaagcctccacctctggaacttctaaatgtttaaaagggcaattttaaatacaaaaaagaatgatgtttaaaattgctttgagtgattcatacagagatgtatatatgcatacatgtatatattcataaggaatataagcttccatcaatagtgattttaaatttgatttttttcttaactctaaatatttaagtaaaaagtaacaaaaactctgcaagcaagggaatttttttgtactgtaattttgaatggaactgaaaaattatgcacgaataaagtacttttctcatgccaaaaaaaattac

SEQ ID NO: 420865 - DNA, 2797 bp, Homo sapiens
agcatccctccttcccaggacacactcaaagcgtcagagcggtccgctcttctcaagtcctattggctcaagtccatgcgtctcatggcactgccgggtgagaggcggaaaaaggccttcccaggcgcgagaagatgacgtcacagtagcccggccgggcgccgaggttgccttagggctctctgcccagtaacaggcatcgaacggtgcagactgaagacgccctccgtcagcgacgccgtcgcaatggccatttgtcaattcttccttcaaggccggtgccgctttggagatcggtgctggaacgaacatcccggtgctaggggtgcaggaggaggacggcagcaaccgcagcagcagccttcaggtaataatagacgtggatggaatacaactagccagagatattccaatgtcatccagccatccagtttctccaaatccacaccatgggggggcagcagagatcaagaaaagccatatttcagttcttttgattctggagcttcaactaacaggaaggaaggctttggattgtctgagaacccatttgcttcacttagtcctgatgagcagaaagatgaaaagaaacttctggaaggaattgtaaaagatatggaggtttgggaatcatcagggcagtggatgttttctgtttattcaccagtgaaaaagaaacctaatatttcagatgtgttcggagtttattccttctggtggggtccgtggtctcgctggctcaggagtgaagctgtggaccttcgcggtgagtgttacggctcttaaggcggcccgtctggagttgtttgttcctcccagtgggttcgtggtctcgctggcttcaggagtgaggctgaagaccttcgcggttttacagacatttcaccagaggaattgaggcttgaataccataacttcttaaccagcaataacttacagagttatgtaagtttgtttcctattaatctactgcaataacagatgagctcttaattactgctttctttatcgtggcttgtgttttggcaaaaccgatgaggtctatgatcttttttcaggagtaggctatttttcttttctatattattttcattgaatttggttggttattaaaatgataatatatttttactttaataattaggaatattactatttttattataaattacccaacagtcaatcccagaaatgaaacccttttatcatttgacagatatttattgaacatctgttaggtaccaatccagtgatgaatgctagaaaaacaaagttaaataagatacagtctgtaatacagattaacatcctcatatatcaaatatcaaaaaaaattaaaaatcttgactagaataagttgagtacctgaaggaagcagtttaaatgctgtatttttctgtttctacagtcatgatcatgcatttcaactagtacatgtattcaccgcccatccaaatataactaactacgtgctgccaggtacttgtgatactaaccagatgatacaaggagttgaacgggagagggaactggagctggcatatctttgacaaataggccaagtcaatgcaaattttgcaagtcatgggccataaaactgttacataaaccttttgtgattttggcaaagaagtatgtgaagtttttattgaagaaactaacttaaacatacaatattgaactgttatttttctgtcttccgttttcagctaaattctgtccaacgtttaataaatcaatggaggaacagggtaaatgaactgaaaagtctaaatatatcaactaaagtagctttgaaatgcctttggaagatatatacccacctgtctccaaagatctatggtcccgactgtggcaagttcctctctgatgtaaaggatggagtaaatcaagcagcacctgcatttggatttggcagcagtcaagcagcaacatttatgtcgccaggctttccagtcaataacagcagcagtgataatgctcagaactttagttttaaaacaaactctggatttgctgctgcctcttctggaagccctgctggttttgggagttccccagcatttggagctgcagcctctaccagttcaggtatctctacttctgctccagcttttggatttgggaagcctgaagtcacatcggctgcatcattttcattcaaaagccctgcagcttccagttttggatcacctggattttcaggacttccagcttccttggcaacaggtcctgtcagagctccagtggccccagcctttggaggtggcagttctgtggctggttttggtagtccgggctcacattctcacactgctttttctaagccatccagtgacacttttggaaatagcagcatatccacttctctgtcagcctcaagcagcatcattgcaacagataatgtgttattcacacccagagataaactaacagtagaagaactggaacaatttcaatccaagaaatttactctgggaaaaattccattaaagcctccacctctggaacttctaaatgtttaaaagggcaattttaaatacaaaaaagaatgatgtttaaaattgctttgagtgattcatacagagatgtatatatgcatacatgtatatattcataaggaatataagcttccatcaatagtgattttaaatttgatttttttcttaactctaaatatttaagtaaaaagtaacaaaaactctgcaagcaagggaatttttttgtactgtaattttgaatggaactgaaaaattatgcacgaataaagtacttttctcatgccaaaaaaaattac

SEQ ID NO: 420866 - DNA, 2211 bp, Homo sapiens
attttgttttattgtttattttaggtaataatagacgtggatggaatacaactagccagagatattccaatgtcatccagccatccagtttctccaaatccacaccatgggggggcagcagagatcaagaaaagccatatttcagttcttttgattctggagcttcaactaacaggaaggaaggctttggattgtctgagaacccatttgcttcacttagtcctgatgagcagaaagatgaaaagaaacttctggaaggaattgtaaaagatatggaggtttgggaatcatcagggcagtggatgttttctgtttattcaccagtgaaaaagaaacctaatatttcaggttttacagacatttcaccagaggaattgaggcttgaataccataacttcttaaccagcaataacttacagagttatgtaagtttgtttcctattaatctactgcaataacagatgagctcttaattactgctttctttatcgtggcttgtgttttggcaaaaccgatgaggtctatgatcttttttcaggagtaggctatttttcttttctatattattttcattgaatttggttggttattaaaatgataatatatttttactttaataattaggaatattactatttttattataaattacccaacagtcaatcccagaaatgaaacccttttatcatttgacagatatttattgaacatctgttaggtaccaatccagtgatgaatgctagaaaaacaaagttaaataagatacagtctgtaatacagattaacatcctcatatatcaaatatcaaaaaaaattaaaaatcttgactagaataagttgagtacctgaaggaagcagtttaaatgctgtatttttctgtttctacagtcatgatcatgcatttcaactagtacatgtattcaccgcccatccaaatataactaactacgtgctgccaggtacttgtgatactaaccagatgatacaaggagttgaacgggagagggaactggagctggcatatctttgacaaataggccaagtcaatgcaaattttgcaagtcatgggccataaaactgttacataaaccttttgtgattttggcaaagaagtatgtgaagtttttattgaagaaactaacttaaacatacaatattgaactgttatttttctgtcttccgttttcagctaaattctgtccaacgtttaataaatcaatggaggaacagggtaaatgaactgaaaagtctaaatatatcaactaaagtagctttgctctctgatgtaaaggatggagtaaatcaagcagcacctgcatttggatttggcagcagtcaagcagcaacatttatgtcgccaggctttccagtcaataacagcagcagtgataatgctcagaactttagttttaaaacaaactctggatttgctgctgcctcttctggaagccctgctggttttgggagttccccagcatttggagctgcagcctctaccagttcaggtatctctacttctgctccagcttttggatttgggaagcctgaagtcacatcggctgcatcattttcattcaaaagccctgcagcttccagttttggatcacctggattttcaggacttccagcttccttggcaacaggtcctgtcagagctccagtggccccagcctttggaggtggcagttctgtggctggttttggtagtccgggctcacattctcacactgctttttctaagccatccagtgacacttttggaaatagcagcatatccacttctctgtcagcctcaagcagcatcattgcaacagataatgtgttattcacacccagagataaactaacagtagaagaactggaacaatttcaatccaagaaatttactctgggaaaaattccattaaagcctccacctctggaacttctaaatgtttaaaagggcaattttaaatacaaaaaagaatgatgtttaaaattgctttgagtgattcatacagagatgtatatatgcatacatgtatatattcataaggaatataagcttccatcaatagtgattttaaatttgatttttttcttaactctaaatatttaagtaaaaagtaacaaaaactctgcaagcaagggaatttttttgtactgtaattttgaatggaactgaaaaattatgcacgaataaagtacttttctcatgccaaaaaaaattac

SEQ ID NO: 420867 - DNA, 2062 bp, Homo sapiens
agcatccctccttcccaggacacactcaaagcgtcagagcggtccgctcttctcaagtcctattggctcaagtccatgcgtctcatggcactgccgggtgagaggcggaaaaaggccttcccaggcgcgagaagatgacgtcacagtagcccggccgggcgccgaggttgccttagggctctctgcccagtaacaggcatcgaacggtgcagactgaagacgccctccgtcagcgacgccgtcgcaatggccatttgtcaattcttccttcaaggccggtgccgctttggagatcggtgctggaacgaacatcccggtgctaggggtgcaggaggaggacggcagcaaccgcagcagcagccttcaggtgactctcctctgaatcctccgcggtaaccgagccgggaagggtccgccggcggggaccgggcgtcccgcgtgtttcccgctgctggtgaccccaacgtgcccgcgtcgcggccttgccggccctactgggccctgcacaacgtttttaaaccgagggttttatctacatattattcatgtggtccgtttttattgagcttctgaggacctgggtttgggcctggatgcttgtgcgaaactgagtttttaaatcggaagtacctatcgaaactaccttgtaggtaataatagacgtggatggaatacaactagccagagatattccaatgtcatccagccatccagtttctccaaatccacaccatgggggggcagcagagatcaagaaaagccatatttcagttcttttgattctggagcttcaactaacaggaaggaaggctttggattgtctgagaacccatttgcttcacttagtcctgatgagcagaaagatgaaaagaaacttctggaaggaattgtaaaagatatggaggtttgggaatcatcagggcagtggatgttttctgtttattcaccagtgaaaaagaaacctaatatttcagctaaattctgtccaacgtttaataaatcaatggaggaacagggtaaatgaactgaaaagtctaaatatatcaactaaagtagctttgaaatgcctttggaagatatatacccacctgtctccaaagatctatggtcccgactgtggcaagttcctctctgatgtaaaggatggagtaaatcaagcagcacctgcatttggatttggcagcagtcaagcagcaacatttatgtcgccaggctttccagtcaataacagcagcagtgataatgctcagaactttagttttaaaacaaactctggatttgctgctgcctcttctggaagccctgctggttttgggagttccccagcatttggagctgcagcctctaccagttcaggtatctctacttctgctccagcttttggatttgggaagcctgaagtcacatcggctgcatcattttcattcaaaagccctgcagcttccagttttggatcacctggattttcaggacttccagcttccttggcaacaggtcctgtcagagctccagtggccccagcctttggaggtggcagttctgtggctggttttggtagtccgggctcacattctcacactgctttttctaagccatccagtgacacttttggaaatagcagcatatccacttctctgtcagcctcaagcagcatcattgcaacagataatgtgttattcacacccagagataaactaacagtagaagaactggaacaatttcaatccaagaaatttactctgggaaaaattccattaaagcctccacctctggaacttctaaatgtttaaaagggcaattttaaatacaaaaaagaatgatgtttaaaattgctttgagtgattcatacagagatgtatatatgcatacatgtatatattcataaggaatataagcttccatcaatagtgattttaaatttgatttttttcttaactctaaatatttaagtaaaaagtaacaaaaactctgcaagcaagggaatttttttgtactgtaattttgaatggaactgaaaaattatgcacgaataaagtacttttctcatgccaaaaaaaattac

SEQ ID NO: 420868 - DNA, 1470 bp, Homo sapiens
agcatccctccttcccaggacacactcaaagcgtcagagcggtccgctcttctcaagtcctattggctcaagtccatgcgtctcatggcactgccgggtgagaggcggaaaaaggccttcccaggcgcgagaagatgacgtcacagtagcccggccgggcgccgaggttgccttagggctctctgcccagtaacaggcatcgaacggtgcagactgaagacgccctccgtcagcgacgccgtcgcaatggccatttgtcaattcttccttcaaggccggtgccgctttggagatcggtgctggaacgaacatcccggtgctaggggtgcaggaggaggacggcagcaaccgcagcagcagccttcaggtaataatagacgtggatggaatacaactagccagagatattccaatgtcatccagccatccagtttctccaaatccacaccatgggggggcagcagagatcaagaaaagccatatttcagttcttttgattctggagcttcaactaacaggaaggaaggctttggattgtctgagaacccatttgcttcacttagtcctgatgagcagaaagatgaaaagaaacttctggaaggaattgtaaaagatatggaggtttgggaatcatcagggcagtggatgttttctgtttattcaccagtgaaaaagaaacctaatatttcaggttttacagacatttcaccagaggaattgaggcttgaataccataacttcttaaccagcaataacttacagagttatctaaattctgtccaacgtttaataaatcaatggaggaacagggtaaatgaactgaaaagtctaaatatatcaactaaagtagctttgctctctgatgtaaaggatggagtaaatcaagcagcacctgcatttggatttggcagcagtcaagcagcaacatttatgtcgccaggtaagtgataaagtaatgcaggacttcactgatttagaaaaattagattttataggtttcaaattacaagcctgaatcgccattttaaattaccttcgtaaattctacaaccttccatcatagagcctcaaagcatttgactcattagacatttgtgaaagggaggccagattgggcatgttctttgaaagacacttaagctttagaagtacattttaggaatgagttttcaggagtttcgtagaagtacatagctatgatagcagcacctttgagaactttcttgtcactgtgtataacagcatagcattgtcctcaggtagcagctctggtgaggtaagtagaaaccaaagtgaaagtctattccctagtccctgtggtttctccttgggtgaaggtcgatcaaggtgaaaatgggattgttagcagaaaagacaggcagcaggctttagtgggtagttctagcctctcatttttactttcctcatctcgtccgtccagtaagcttctcaacactgaaacatgacata

SEQ ID NO: 420869 - DNA, 1047 bp, Homo sapiens
tgggaatctggagacaggggaccagtgaagaggatagtacagctgtctatgcaaggtggcatggcccaaggcagaagagagaaggagagaactgtttcctggttgttgggcatagaggcactggatccagcatcctctccgccctccaggacctcttctctgtcacctggctcaataggtccaaggtggaaaagcagctacaggtcatctcagtgctccagtgggtcctgtccttccttgtactgggagtggcctgcagtgccatcctcatgtacatattctgcactgattgctggctcatcgctgtgctctacttcacttggctggtgtttgactggaacacacccaagaaaggtggcaggaggtcacagtgggtccgaaactgggctgtgtggcgctactttcgagactactttcccatccagctggtgaagacacacaacctgctgaccaccaggaactatatctttggataccacccccatggtatcatgggcctgggtgccttctgcaacttcagcacagaggccacagaagtgagcaagaagttcccaggcatacggccttacctggctacactggcaggcaacttccgaatgcctgtgttgagggagtacctgatgtctggaggtatctgccctgttcagcgggacaccatagaactattgcgttccaacgaccgggactggcaagcgatcatcatcacggccgcggaggcaggagaaactctgaagccaagccgggagaaagcgccccgggaaccaagggtcgtgaacagggccccgggcagaaggcacccggggtgcccaccaaatccctggggggaaaagaaggggcaagcaggagaattcacagaaggcacacggagcacagcgagcagacaagatccgaaaaatagtagtgtgccagccagaacaggagaggagacctcacgaagggggggggagcacacacccgagggaggagacaccaccgacaagcacaacacacacagtatcagtcaaaccaccgtacatgctgagatctaacgacgcttctactgtatgg

SEQ ID NO: 420870 - DNA, 1004 bp, Homo sapiens
cctgccccgttgtgaggtgataaagtgttgcgctccgggacgccagcgccgcggctgccgcctctgctggggtctaggctgtttctctcgcgccaccactggccgccggccgcagctccaggtgtcctagccgcccagcctcgacgccgtcccgggacccctgtgctctgcgcgaagccctggccccgggggccggggcatgggccagggcgcggggtgaagcggcttcccgcggggccgtgactgggcgggcttcagccatgaagaccctcatagccgcctactccggggtcctgcgcggcgagcgtcaggccgaggctgaccggagccagcgctctcacggaggacctgcgctgtcgcgcgaggggtctgggagatgggctgcagtccctgcgtttgaggaagtgagaccagggggatgtacacaagatgactgtgcagagtgatctgagcaatgacaggaaagactgccaagaggtgagaccggggagcttgatcaccctgaggtcagggaagtcttcctggaagaggtgacattcagtccggatctggaaagatgaatagacatcagcaagacaggcaagaacattcaggtacaggaaatagcataaatagaggcatgagactggggggggcaggcgactgccgggggggcccggggggcccctggggcggaggactcggggactcggagaccaaaaaaagaaacacaaagagcggggtccacccggggggggaccacagttgtgttgccaagagaaacataagaccgtgtaagaaacgcggggaagaaatgtgggccacccaataagagccgccagtaaaaagcgaaaaaatacctgcatggaccccgagcagtgacagagtgacaacatgcgcgaagatgaagcagccacacaacaaacaccctctacagtcaggaaagcgatacgaagaaaagacagacgcgtaaaagaacaacagaaaaacacagagactcactcgagtggccgcatctctcgtcc

SEQ ID NO: 420871 - DNA, 2335 bp, Homo sapiens
cctgccccgttgtgaggtgataaagtgttgcgctccgggacgccagcgccgcggctgccgcctctgctggggtctaggctgtttctctcgcgccaccactggccgccggccgcagctccaggtgtcctagccgcccagcctcgacgccgtcccgggacccctgtgctctgcgcgaagccctggccccgggggccggggcatgggccagggcgcggggtgaagcggcttcccgcggggccgtgactgggcgggcttcagccatgaagaccctcatagccgcctactccggggtcctgcgcggcgagcgtcaggccgaggctgaccggagccagcgctctcacggaggacctgcgctgtcgcgcgaggggtctgggagatggggcactggatccagcatcctctccgccctccaggacctcttctctgtcacctggctcaataggtccaaggtggaaaagcagctacaggtcatctcagtgctccagtgggtcctgtccttccttgtactgggagtggcctgcagtgccatcctcatgtacatattctgcactgattgctggctcatcgctgtgctctacttcacttggctggtgtttgactggaacacacccaagaaaggtggcaggaggtcacagtgggtccgaaactgggctgtgtggcgctactttcgagactactttcccatccagctggtgaagacacacaacctgctgaccaccaggaactatatctttggataccacccccatggtatcatgggcctgggtgccttctgcaacttcagcacagaggccacagaagtgagcaagaagttcccaggcatacggccttacctggctacactggcaggcaacttccgaatgcctgtgttgagggagtacctgatgtctggaggtatctgccctgtcagccgggacaccatagactatttgctttcaaagaatgggagtggcaatgctatcatcatcgtggtcgggggtgcggctgagtctctgagctccatgcctggcaagaatgcagtcaccctgcggaaccgcaagggctttgtgaaactggccctgcgtcatggagctgacctggttcccatctactcctttggagagaatgaagtgtacaagcaggtgatcttcgaggagggctcctggggccgatgggtccagaagaagttccagaaatacattggtttcgccccatgcatcttccatggtcgaggcctcttctcctccgacacctgggggctggtgccctactccaagcccatcaccactgttgtgggagagcccatcaccatccccaagctggagcacccaacccagcaagacatcgacctgtaccacaccatgtacatggaggccctggtgaagctcttcgacaagcacaagaccaagttcggcctcccggagactgaggtcctggaggtgaactgagccagccttcggggccaattccctggaggaaccagctgcaaatcacttttttgctctgtaaatttggaagtgtcatgggtgtctgtgggttatttaaaagaaattataacaattttgctaaaccattacaatgttaggtcttttttaagaaggaaaaagtcagtatttcaagttctttcacttccagcttgccctgttctaggtggtggctaaatctgggcctaatctgggtggctcagctaacctctcttcttcccttcctgaagtgacaaaggaaactcagtcttcttggggaagaaggattgccattagtgacttggaccagttagatgattcactttttgcccctagggatgagaggcgaaagccacttctcatacaagcccctttattgccactaccccacgctcgtctagtcctgaaactgcaggaccagtttctctgccaaggggaggagttggagagcacagttgccccgttgtgtgagggcagtagtaggcatctggaatgaccattgcagggaggatgccgccaccatgagctaggtggagtaactggtttttcttgggtggctgatgacatggatgcagcacagactcagccttggcctggagcacatgcttactggtggcctcagtttaccttccccagatcctagattctggatgtgaggaagagatccctcttcagaaggggcctggccttctgagcagcagattagttccaaagcaggtggcccccgaacccaagcctcacttttctgtgccttcctgagggggttgggccggggaggaaacccaaccctctcctgtgtgttctgttatctcttgatgagatcattgcaccatgtcagacttttgtatatgccttgaaaataaatgaaagtgagaatcctcaaaaaaaaaaaa

SEQ ID NO: 420872 - DNA, 2709 bp, Homo sapiens
ctcagaccatagcctaaacctcatcgtccctatctggcccacctggagcatccacctagaggatgccactagaggagcctggatgcctgtagagtctggggggctagagtcttcccttttcaggcccaagaaagggaatcaggcagactgctgaacagtaagtatgactttgtaggcagcctttagacatagctattcaccaagctaccgtaagcttttcacagtttgcttttaacaggctcttgtaggctgcacatgcttccctagaaacttgtcttcccttctgcgatgtcacacccctaagctggtcctgaaaaattggacatctcgtcactctgtattcactgttcctcccaacaagagagttgtaccctgtttttagctaccctggggagaggctggctcaggagtctagaacagggctagattggggggcaacaaggggctaccatttccctccctttaggctcatggagagtctacatccagccttatcttctcccatgggaaaccaaaggaggctcaacatggtgagaagagagcatgacatccagagccaggcagcctacagcacctgggaccaccagggaatgggcacacagcaagggttggcctcccttcttgggcagtggaaaaagtcctagaaggagtccatgcttctcccaccaaacatgagtacctgctgcccttgcccttgtgctgaatgccaaggaccaaagaagatgcctccccacccagtgtgggaaattcacaggagtggcctgcagtgccatcctcatgtacatattctgcactgattgctggctcatcgctgtgctctacttcacttggctggtgtttgactggaacacacccaagaaaggtggcaggaggtcacagtgggtccgaaactgggctgtgtggcgctactttcgagactactttcccatccagctggtgaagacacacaacctgctgaccaccaggaactatatctttggataccacccccatggtatcatgggcctgggtgccttctgcaacttcagcacagaggccacagaagtgagcaagaagttcccaggcatacggccttacctggctacactggcaggcaacttccgaatgcctgtgttgagggagtacctgatgtctggaggtatctgccctgtcagccgggacaccatagactatttgctttcaaagaatgggagtggcaatgctatcatcatcgtggtcgggggtgcggctgagtctctgagctccatgcctggcaagaatgcagtcaccctgcggaaccgcaagggctttgtgaaactggccctgcgtcatggagctgacctggttcccatctactcctttggagagaatgaagtgtacaagcaggtgatcttcgaggagggctcctggggccgatgggtccagaagaagttccagaaatacattggtttcgccccatgcatcttccatggtcgaggcctcttctcctccgacacctgggggctggtgccctactccaagcccatcaccactgttgtgggagagcccatcaccatccccaagctggagcacccaacccagcaagacatcgacctgtaccacaccatgtacatggaggccctggtgaagctcttcgacaagcacaagaccaagttcggcctcccggagactgaggtcctggaggtgaactgagccagccttcggggccaattccctggaggaaccagctgcaaatcacttttttgctctgtaaatttggaagtgtcatgggtgtctgtgggttatttaaaagaaattataacaattttgctaaaccattacaatgttaggtcttttttaagaaggaaaaagtcagtatttcaagttctttcacttccagcttgccctgttctaggtggtggctaaatctgggcctaatctgggtggctcagctaacctctcttcttcccttcctgaagtgacaaaggaaactcagtcttcttggggaagaaggattgccattagtgacttggaccagttagatgattcactttttgcccctagggatgagaggcgaaagccacttctcatacaagcccctttattgccactaccccacgctcgtctagtcctgaaactgcaggaccagtttctctgccaaggggaggagttggagagcacagttgccccgttgtgtgagggcagtagtaggcatctggaatgctccagtttgatctcccttctgccacccctacctcacccctagtcactcatatcggagcctggactggcctccaggatgaggatgggggtggcaatgacaccctgcaggggaaaggactgccccccatgcaccattgcagggaggatgccgccaccatgagctaggtggagtaactggtttttcttgggtggctgatgacatggatgcagcacagactcagccttggcctggagcacatgcttactggtggcctcagtttaccttccccagatcctagattctggatgtgaggaagagatccctcttcagaaggggcctggccttctgagcagcagattagttccaaagcaggtggcccccgaacccaagcctcacttttctgtgccttcctgagggggttgggccggggaggaaacccaaccctctcctgtgtgttctgttatctcttgatgagatcattgcaccatgtcagacttttgtatatgccttgaaaataaatgaaagtgagaatcctcaaaaaaaaaaaa

SEQ ID NO: 420873 - DNA, 2465 bp, Homo sapiens
cctgccccgttgtgaggtgataaagtgttgcgctccgggacgccagcgccgcggctgccgcctctgctggggtctaggctgtttctctcgcgccaccactggccgccggccgcagctccaggtgtcctagccgcccagcctcgacgccgtcccgggacccctgtgctctgcgcgaagccctggccccgggggccggggcatgggccagggcgcggggtgaagcggcttcccgcggggccgtgactgggcgggcttcagccatgaagaccctcatagccgcctactccggggtcctgcgcggcgagcgtcaggccgaggctgaccggagccagcgctctcacggaggacctgcgctgtcgcgcgaggggtctgggagatggggcactggatccagcatcctctccgccctccaggacctcttctctgtcacctggctcaataggtccaaggtggaaaagcagctacaggtcatctcagtgctccagtgggtcctgtccttccttgtactgggagtggcctgcagtgccatcctcatgtacatattctgcactgattgctggctcatcgctgtgctctacttcacttggctggtgtttgactggaacacacccaagaaaggtggcaggaggtcacagtgggtccgaaactgggctgtgtggcgctactttcgagactactttcccatccagctggtgaagacacacaacctgctgaccaccaggaactatatctttggataccacccccatggtatcatgggcctgggtgccttctgcaacttcagcacagaggccacagaagtgagcaagaagttcccaggcatacggccttacctggctacactggcaggcaacttccgaatgcctgtgttgagggagtacctgatgtctggaggtatctgccctgtcagccgggacaccatagactatttgctttcaaagaatgggagtggcaatgctatcatcatcgtggtcgggggtgcggctgagtctctgagctccatgcctggcaagaatgcagtcaccctgcggaaccgcaagggctttgtgaaactggccctgcgtcatggagctgacctggttcccatctactcctttggagagaatgaagtgtacaagcaggtgatcttcgaggagggctcctggggccgatgggtccagaagaagttccagaaatacattggtttcgccccatgcatcttccatggtcgaggcctcttctcctccgacacctgggggctggtgccctactccaagcccatcaccactgttgtgggagagcccatcaccatccccaagctggagcacccaacccagcaagacatcgacctgtaccacaccatgtacatggaggccctggtgaagctcttcgacaagcacaagaccaagttcggcctcccggagactgaggtcctggaggtgaactgagccagccttcggggccaattccctggaggaaccagctgcaaatcacttttttgctctgtaaatttggaagtgtcatgggtgtctgtgggttatttaaaagaaattataacaattttgctaaaccattacaatgttaggtcttttttaagaaggaaaaagtcagtatttcaagttctttcacttccagcttgccctgttctaggtggtggctaaatctgggcctaatctgggtggctcagctaacctctcttcttcccttcctgaagtgacaaaggaaactcagtcttcttggggaagaaggattgccattagtgacttggaccagttagatgattcactttttgcccctagggatgagaggcgaaagccacttctcatacaagcccctttattgccactaccccacgctcgtctagtcctgaaactgcaggaccagtttctctgccaaggggaggagttggagagcacagttgccccgttgtgtgagggcagtagtaggcatctggaatgctccagtttgatctcccttctgccacccctacctcacccctagtcactcatatcggagcctggactggcctccaggatgaggatgggggtggcaatgacaccctgcaggggaaaggactgccccccatgcaccattgcagggaggatgccgccaccatgagctaggtggagtaactggtttttcttgggtggctgatgacatggatgcagcacagactcagccttggcctggagcacatgcttactggtggcctcagtttaccttccccagatcctagattctggatgtgaggaagagatccctcttcagaaggggcctggccttctgagcagcagattagttccaaagcaggtggcccccgaacccaagcctcacttttctgtgccttcctgagggggttgggccggggaggaaacccaaccctctcctgtgtgttctgttatctcttgatgagatcattgcaccatgtcagacttttgtatatgccttgaaaataaatgaaagtgagaatcctcaaaaaaaaaaaa

SEQ ID NO: 420874 - DNA, 2424 bp, Homo sapiens
  misc_feature (23)..(23): n is a, c, g, or t
  misc_feature (36)..(36): n is a, c, g, or t
gagtgctatttggtgacccttantagaacaccgctntggtttttaatataatgccaggtgtacgcgaattcggattctctcgcgccactgcgcgcgagctcagtgtctagcgcagctcgacgcgtccggacctgtctctgcgcgagcctgccggggcgcgcatggcaggcgcggggtgaagcggcttcccgcggggccgtgactgggcgggcttcagccatgaagaccctcatagccgcctactccggggtcctgcgcggcgagcgtcaggccgaggctgaccggagccagcgctctcacggaggacctgcgctgtcgcgcgaggggtctgggagatggggcactggatccagcatcctctccgccctccaggacctcttctctgtcacctggctcaataggtccaaggtggaaaagcagctacaggtcatctcagtgctccagtgggtcctgtccttccttgtactgggagtggcctgcagtgccatcctcatgtacatattctgcactgattgctggctcatcgctgtgctctacttcacttggctggtgtttgactggaacacacccaagaaaggtggcaggaggtcacagtgggtccgaaactgggctgtgtggcgctactttcgagactactttcccatccagctggtgaagacacacaacctgctgaccaccaggaactatatctttggataccacccccatggtatcatgggcctgggtgccttctgcaacttcagcacagaggccacagaagtgagcaagaagttcccaggcatacggccttacctggctacactggcaggcaacttccgaatgcctgtgttgagggagtacctgatgtctggaggtatctgccctgtcagccgggacaccatagactatttgctttcaaagaatgggagtggcaatgctatcatcatcgtggtcgggggtgcggctgagtctctgagctccatgcctggcaagaatgcagtcaccctgcggaaccgcaagggctttgtgaaactggccctgcgtcatggagctgacctggttcccatctactcctttggagagaatgaagtgtacaagcaggtgatcttcgaggagggctcctggggccgatgggtccagaagaagttccagaaatacattggtttcgccccatgcatcttccatggtcgaggcctcttctcctccgacacctgggggctggtgccctactccaagcccatcaccactgttgtgggagagcccatcaccatccccaagctggagcacccaacccagcaagacatcgacctgtaccacaccatgtacatggaggccctggtgaagctcttcgacaagcacaagaccaagttcggcctcccggagactgaggtcctggaggtgaactgagccagccttcggggccaattccctggaggaaccagctgcaaatcacttttttgctctgtaaatttggaagtgtcatgggtgtctgtgggttatttaaaagaaattataacaattttgctaaaccattacaatgttaggtcttttttaagaaggaaaaagtcagtatttcaagttctttcacttccagcttgccctgttctaggtggtggctaaatctgggcctaatctgggtggctcagctaacctctcttcttcccttcctgaagtgacaaaggaaactcagtcttcttggggaagaaggattgccattagtgacttggaccagttagatgattcactttttgcccctagggatgagaggcgaaagccacttctcatacaagcccctttattgccactaccccacgctcgtctagtcctgaaactgcaggaccagtttctctgccaaggggaggagttggagagcacagttgccccgttgtgtgagggcagtagtaggcatctggaatgctccagtttgatctcccttctgccacccctacctcacccctagtcactcatatcggagcctggactggcctccaggatgaggatgggggtggcaatgacaccctgcaggggaaaggactgccccccatgcaccattgcagggaggatgccgccaccatgagctaggtggagtaactggtttttcttgggtggctgatgacatggatgcagcacagactcagccttggcctggagcacatgcttactggtggcctcagtttaccttccccagatcctagattctggatgtgaggaagagatccctcttcagaaggggcctggccttctgagcagcagattagttccaaagcaggtggcccccgaacccaagcctcacttttctgtgccttcctgagggggttgggccggggaggaaacccaaccctctcctgtgtgttctgttatctcttgatgagatcattgcaccatgtcagacttttgtatatgccttgaaaataaatgaaagtgagaatcctcaaaaaaaaaaaa

SEQ ID NO: 420875 - DNA, 1320 bp, Homo sapiens
caccggcccactgcgcctgagcacgtagcggtgcatttcgggacgtgtagttttccccggcaggacggtagaagtcgtggtttgtgcgcggccaggcgctggagcctccgctgccgggagcaatcagaccttccagctgcctctcatgtacttgtctgttgggggcttgtgttgatcaggagtgaattcacagtctaccatgaattggaaggttcttgagcacgtgcccctgctgctgtatatcttggcagcaaaaacattaattctctgcctgacatttgctggggtgaaaatgtatcaaagaaaaaggttggaggcaaaacaacaaaaactggaggctgaaaggaagaagcaatcagagaaaaaagataactgaaggtcctaactgggaccacctactccccttggagggtccggatggagtttcccctctgcggctgcctctcactcatcctccaccactttgccgacaaggaaggaaggacaatcgggaggagggagtcttgcttggcgaccatctggacaatatctcgcccatggcaagctggatccctgtggattactttgagctaaagacatttcataaaatgggcatgaaggattccttcaaatgaagacgtggacaaaatgattggtcaggtcctttgctctactgttgaatggaggaggatttttttttttttccctcacacaggggttttcttggagctcaagtttggatgaccccagacagtaagataatctcatcatggtaaagttaatatgaaatatgtggtctccaaacagcctctcccagaggccaggatcagcaggtttgagtggataattggcttgtggtcattttctcataggatttttcttttagtagtggaaactgtttttcaaatcaaatttggatgccaactatgtggaacagaagtgtggctgctctggtggaagtggcaatggtagtcctagagtctccctgtcagccacaccctttgtctccccctacccaagggaccctgtggcctggaaccgcagtgtgaaatgctatatagtgcaatgaagtcaattcgaagacaagagttctttgcctttctcatctaatttttagttatggatatgagacgcttgttcagaagtatggaaaagtatatataatatgttatcttttagatgtgggtgtaaatatgcttatgtatgcaatatgcttatattttaacgcataaacaacatgaataaagcaaacactctagacttctccaaatgtatcttgttttacagttttcattttggaaaatgtcaacatttttacattaaaaaatattactcagccat

SEQ ID NO: 420876 - DNA, 1153 bp, Homo sapiens
caccggcccactgcgcctgagcacgtagcggtgcatttcgggacgtgtagttttccccggcaggacggtagaagtcgtggtttgtgcgcggccaggcgctggagcctccgctgccgggagcaatcagaccttccagctgcctctcatgtacttgtctgttgggggcttgtgttgatcaggagtgaattcacagtctaccatgaattggaaggtcctaactgggaccacctactccccttggagggtccggatggagtttcccctctgcggctgcctctcactcatcctccaccactttgccgacaaggaaggaaggacaatcgggaggagggagtcttgcttggcgaccatctggacaatatctcgcccatggcaagctggatccctgtggattactttgagctaaagacatttcataaaatgggcatgaaggattccttcaaatgaagacgtggacaaaatgattggtcaggtcctttgctctactgttgaatggaggaggatttttttttttttccctcacacaggggttttcttggagctcaagtttggatgaccccagacagtaagataatctcatcatggtaaagttaatatgaaatatgtggtctccaaacagcctctcccagaggccaggatcagcaggtttgagtggataattggcttgtggtcattttctcataggatttttcttttagtagtggaaactgtttttcaaatcaaatttggatgccaactatgtggaacagaagtgtggctgctctggtggaagtggcaatggtagtcctagagtctccctgtcagccacaccctttgtctccccctacccaagggaccctgtggcctggaaccgcagtgtgaaatgctatatagtgcaatgaagtcaattcgaagacaagagttctttgcctttctcatctaatttttagttatggatatgagacgcttgttcagaagtatggaaaagtatatataatatgttatcttttagatgtgggtgtaaatatgcttatgtatgcaatatgcttatattttaacgcataaacaacatgaataaagcaaacactctagacttctccaaatgtatcttgttttacagttttcattttggaaaatgtcaacatttttacattaaaaaatattactcagccat

SEQ ID NO: 420877 - DNA, 1099 bp, Homo sapiens
caccggcccactgcgcctgagcacgtagcggtgcatttcgggacgtgtagttttccccggcaggacggtagaagtcgtggtttgtgcgcggccaggcgctggagcctccgctgccgggagcaatcagaccttccagctgcctctcatgtacttgtctgttgggggcttgtgttgatcaggagtgaattcacagtctaccatgaattggaaggttcttgagcacgtgcccctgctgctgtatatcttggcagcaaaaacattaattctctgcctgacatttgctggggtgaaaatgtatcaaagaaaaaggttggaggcaaaacaacaaaaactggaggctgaaaggaagaagcaatcagagaaaaaagataactgaagattctgccatgtaaatgtcagcttgagtggactccagctgagaagaaagagaagaaagacttaattattgaataatttgtcagaggataaactcccaacctagacctttcacttaaaatagtgtgaatttgtatatgtttttaaaagaaccagtactggccgggtatgctggcttttacctgaaatcccagcactttgggaggccgaggcgagtggatcgcctgagatcgggagtttgagaccagcctggccaacatggtaaaatcctgtctctactaaaaatataaaaattagccaggtgtagtggcgcgcgtctgtaatcccagctactcgggaggctgaggcaggagaattgcttgaatccgggaggtggaggttgcagtgagcctaggtcgtgccactgccctccagcctgggtgacagagcgactgcgtctccaaaaaaaaaaaggtaaaattaaaattaaaaaaaataataataaccagtattttgtttactaaaataaaatgcctttgtaaaaaacaaacacattcacgggccggcgtttaacacagtcgggactgggaaaaccctggcgtaacccaattaatcgctagcagaaaacccctttcgcagaggggtataccgggccgcacgatggcctacgtggcaactcaaggcaaggacactggacgggacttgggaacccggcacacgcggaatgacacattacacaggcatc

SEQ ID NO: 420878 - DNA, 917 bp, Homo sapiens
caccggcccactgcgcctgagcacgtagcggtgcatttcgggacgtgtagttttccccggcaggacggtagaagtcgtggtttgtgcgcggccaggcgctggagcctccgctgccgggagcaatcagaccttccagctgcctctcatgtacttgtctgttgggggcttgtgttgatcaggagtgaattcacagtctaccatgaattggaaggttcttgagcacgtgcccctgctgctgtatatcttggcagcaaaaacattaattctctgcctgacatttgctggggtgaaaatgtatcaaagaaaaaggttggaggcaaaacaacaaaaactggaggctgaaaggaagaagcaatcagagaaaaaagataactgaagattctgccatgtaaatgtcagcttgagtggactccagctgagaagaaagagaagaaagacttaattattgaataatttgtcagaggataaactcccaacctagacctttcacttaaaatagtgtgaatttgtatatgtttttaaaagaaccagtactggccgggtatgctggcttttacctgaaatcccagcactttgggaggccgaggcgagtggatcgcctgagatcgggagtttgagaccagcctggccaacatggtaaaatcctgtctctactaaaaatataaaaattagccaggtgtagtggcgcgcgtctgtaatcccagctactcgggaggctgaggcaggagaattgcttgaatccgggaggtggaggttgcagtgagcctaggtcgtgccactgccctccagcctgggtgacagagcgactgcgtctccaaaaaaaaaaaggtaaaattaaaattaaaaaaaataataataaccagtattttgtttactaaaataaaatgcctttgtaaaaaaaggagtcgtggcctttg

SEQ ID NO: 420879 - DNA, 1299 bp, Homo sapiens
caccggcccactgcgcctgagcacgtagcggtgcatttcgggacgtgtagttttccccggcaggacggtagaagtcgtggtttgtgcgcggccaggcgctggagcctccgctgccgggagcaatcagaccttccagctgcctctcatgtacttgtctgttgggggcttgtgttgatcaggagtgaattcacagtctaccatgaattggaaggttcttgagcacgtgcccctgctgctgtatatcttggcagcaaaaacattaattctctgcctgacatttgctggggtgaaaatgtatcaaagaaaaaggttggaggcaaaacaacaaaaactggaggctgaaaggaagaagcaatcagagaaaaaagataactgaaggtcctaactgggaccacctactccccttggagggtccggatggagtttcccctctgcggctgcctctcactcatcctccaccactttgccgacaaggaaggaaggacaatcgggaggagggagtcttgcttggcgaccatctggacaatatctcgcccatggcaagctggatccctgtggattactttggtgggtggaaacttggcacactatttaatttgggctttttgggggatgactgcacactggttctctttttttctcagacctaaatttcgaccactcaactttcagcctgctcacccctgcttattgccatccacctttgggctgggttagacctaatcctccccttgacaaagccctcaaagtagccttcacaagataagagtcgagacccctaacttaccaacaaattttaatgaaacttctagtaaactcaaagcgctttgccaacatccttaggagcaacccagttctcgcagcaccccatgtgaggtcgctgttgaagtatctttggctgcagtggtgtggaattcatctcaacagagttgacggtaaagaccagacatgtagcagcctcactgcttgttggaggaaccacccttaagaaaatttcccaagatagtagttttcccatctccgtactttgctagttaatgttctccacttgcttgcgtttatcctttcaattcctttgctaattaaattgctgaaaagtatacattggtaagaatagccactgtcaatggactgcaaacaaaactcgtttctgttattgatgataaaccatttcagagaagaccaggctgagtctaaagggttcagataattacaaggggaaggcagagagagtagttcatggccacaggacttggccacctctgggcaacacataatgcttgctaagctaatgactgt

SEQ ID NO: 420880 - DNA, 480 bp, Homo sapiens
  misc_feature (393)..(393): n is a, c, g, or t
caccggcccactgcgcctgagcacgtagcggtgcatttcgggacgtgtagttttccccggcaggacggtagaagtcgtggtttgtgcgcggccaggcgctggagcctccgctgccgggagcaatcagaccttccagctgcctctcatgtacttgtctgttgggggcttgtgttgatcaggagtgaattcacagtctaccatgaattggaaggttcttgagcacgtgcccctgctgctgtatatcttggcagcaaaaacattaattctctgcctgacatttgctggggtgaaaatgtatcaaagaaaaaggttggaggcaaaacaacaaaaactggaggctgaaaggaagaagcaatcagagaaaaaagataactgaagattctgccatggtanaaattgggggtttttccccaaaaagggggcccccccctttttttttttttggggggattattgaataatttgccagaggataaacct

SEQ ID NO: 420881 - DNA, 520 bp, Homo sapiens
aaaacaacaacaacaaacaaaaacctcaaaacctctttgttggacttaacttccagctcctccatgtagtaccttagtacccttgcagcccgtttctcttttacaagacaacaatgttgttataaactcatttggatgtggtcccgtggaggagtatttaccagaatctagcttatttagcgtcttcagaacacggcacttgcctggaattatactgaccccctcaacccataccaaccacccagagatggctgttcttggctcctctccctggggccctgtccttcccacatcgtcttcttcttctttcttcttctttcttcttccttcttcttccttcttcttccttcttcttccttcttcttccttcttcctcttcctcttcctcttcttctttgtgacagagcgactgcgtctccaaaaaaaaaaaggtaaaattaaaattaaaaaaaataataataaccagtattttgtttactaaaataaaatgcctttgtaaaaaaaggagtcgtggcctttg

SEQ ID NO: 420882 - DNA, 302 bp, Homo sapiens
tacagacagctggtgaggagagctttctgcttagcaagggccaggcccgtctgggccctcgcccagcccatccacttcccaccagtctctcaatcgccttgtcaggacacagcccacctctctgtggagctcactttctgttcacattccctctctccatcaaagagacatctttctaaggtggtctgccctaggaactccaaattgacctgcttctttcttcctgcccagatcagaccttccagctgcctctcatgtacttgtctgttgggggcttgtgttgatcaggagtgaattcacag

SEQ ID NO: 420883 - DNA, 590 bp, Homo sapiens
tcagaccttccagctgcctctcatgtacttgtctgttgggggcttgtgttgatcaggagtgaattcacagtctaccatgaattggaaggtgagtatcgttttaaatatttatggcttggggttttttcttcctcctgattgtgaaaattcagaataacagttctacaccagtagcttgattaaaaagaaaaagtaggtgaaagcataatatttatgtttcattttaagttaaaacataaatgtacatttattcgctggacttctggaagaaggccaggccttttcttcgagtgtgcattcactaacttcaaatcttcctcacttttcttacaaaaactatacctttaaagctttacctgcaattttgcattgtgctttctttttttacacattttttttgtagagatagggctccactatgttgcccaggctggtcttgaactcctgggctcaagcagtcctcctgcctgagcctcccaaagtgtcgggattacaagaatgaaccactgtgctcaggccgttttggttcctttaaagtagatgcagtggactgaatgtttgtgtttccccaagttcatatgttgcaaccg

SEQ ID NO: 420884 - DNA, 1932 bp, Homo sapiens
caccggcccactgcgcctgagcacgtagcggtgcatttcgggacgtgtagttttccccggcaggacggtagaagtcgtggtttgtgcgcggccaggcgctggagcctccgctgccgggagcagtaagtgtgtgacgtcggggtagaagggagtgacccaaattccaaaagctctttgggatgctgcgatgtcgcggccggccccgcgctcgggttttccctcctagacaaaagtctgccggctcccggtcgcgccgggtcggggatccggaaggtgaaggccgccaggccccacctgcggggcgcccctgctggacctggccgtcgggcgccgtcaacccgttgagcagcgtgttccggctggcacgtggcccgggcggggcccaggattggttcaagcctacggtgttggtccccggagagtctagggagacaagcaatcccctggaatggtgggggaagcgatgacagcccctggtcctcatccgcagctctgggggaagtcggggggtggggagggcgggtgttgctccctgagtgttgggggaagggtatggggagaggaccctgaactagcccccaggttacccaggaggagctgaggcccagagaggttcagcgactcgcccagggttgcacagcgagcacaggcaccgacgtcgccctccgaggcctgggcttccagcagggagagacccggacacctgtcatcgcttctcggtggatccctgaaatatcagaccttccagctgcctctcatgtacttgtctgttgggggcttgtgttgatcaggagtgaattcacagtctaccatgaattggaaggttcttgagcacgtgcccctgctgctgtatatcttggcagcaaaaacattaattctctgcctgacatttgctggggtgaaaatgtatcaaagaaaaaggttggaggcaaaacaacaaaaactggaggctgaaaggaagaagcaatcagagaaaaaagataactgaaggtcctaactgggaccacctactccccttggagggtccggatggagtttcccctctgcggctgcctctcactcatcctccaccactttgccgacaaggaaggaaggacaatcgggaggagggagtcttgcttggcgaccatctggacaatatctcgcccatggcaagctggatccctgtggattactttgagctaaagacatttcataaaatgggcatgaaggattccttcaaatgaagacgtggacaaaatgattggtcaggtcctttgctctactgttgaatggaggaggatttttttttttttccctcacacaggggttttcttggagctcaagtttggatgaccccagacagtaagataatctcatcatggtaaagttaatatgaaatatgtggtctccaaacagcctctcccagaggccaggatcagcaggtttgagtggataattggcttgtggtcattttctcataggatttttcttttagtagtggaaactgtttttcaaatcaaatttggatgccaactatgtggaacagaagtgtggctgctctggtggaagtggcaatggtagtcctagagtctccctgtcagccacaccctttgtctccccctacccaagggaccctgtggcctggaaccgcagtgtgaaatgctatatagtgcaatgaagtcaattcgaagacaagagttctttgcctttctcatctaatttttagttatggatatgagacgcttgttcagaagtatggaaaagtatatataatatgttatcttttagatgtgggtgtaaatatgcttatgtatgcaatatgcttatattttaacgcataaacaacatgaataaagcaaacactctagacttctccaaatgtatcttgttttacagttttcattttggaaaatgtcaacatttttacattaaaaaatattactcagccat

SEQ ID NO: 420885 - DNA, 400 bp, Homo sapiens
cgtggaggcagctagcgcgaggctggggagcgctgagccgcgcgtcgtgccctgcgctgcccagactagcgaacaatacagtcaggatggctaaaggtgaccccaagaaaccaaagggcaagatgtccgcttatgccttctttgtgcagacatgcagagaagaacataagaagaaaaacccagaggtccctgtcaattttgcggaattttccaagaagtgctctgagaggtggaagacgatgtccggaaaggaatctaatttgatgaatggcaagcagataagtcgctatgatcggaatgaggatatggccactaggaggcagagagaggtctatctccaaagccctctgatctccgtctgtcaaatcgccagtcatccaacccgcatttattggagtgc

SEQ ID NO: 420886 - DNA, 3558 bp, Homo sapiens
cgtggaggcagctagcgcgaggctggggagcgctgagccgcgcgtcgtgccctgcgctgcccagactagcgaacaatacagtcaggatggctaaaggtgaccccaagaaaccaaagggcaagatgtccgcttatgccttctttgtgcagacatgcagagaagaacataagaagaaaaacccagaggtccctgtcaattttgcggaattttccaagaagtgctctgagaggtggaagacgatgtccgggaaagagaaatctaaatttgatgaaatggcaaaggcagataaagtgcgctatgatcgggaaatgaaggattatggaccagctaagggaggcaagaagaagaaggatcctaatgctcccaaaaggccaccgtctggattcttcctgttctgttcagaattccgccccaagatcaaatccacaaaccccggcatctctattggagacgtggcaaaaaagctgggtgagatgtggaataatttaaatgacagtgaaaagcagccttacatcactaaggcggcaaagctgaaggagaagtatgagaaggatgttgctgactataagtcgaaaggaaagtttgatggtgcaaagggtcctgctaaagttgcccggaaaaaggtggaagaggaagatgaagaagaggaggaggaagaagaggaggaggaggaggaggaggatgaataaagaaactgtttatctgtctccttgtgaatacttagagtaggggagcgccgtaattgacacatctcttatttgagaagtgtctgttgccctcattaggtttaattacaaaatttgatcacgatcatattgtagtctctcaaagtgctctagaaattgtcagtggtttacatgaagtggccatgggtgtctggagcaccctgaaactgtatcaaagttgtacatatttccaaacatttttaaaatgaaaaggcactctcgtgttctcctcactctgtgcactttgctgttggtgtgacaaggcatttaaagatgtttctggcattttctttttatttgtaaggtggtggtaactatggttattggctagaaatcctgagttttcaactgtatatatctatagtttgtaaaaagaacaaaacaaccgagacaaacccttgatgctccttgctcggcgttgaggctgtggggaagatgccttttgggagaggctgtagctcagggcgtgcactgtgaggctggacctgttgactctgcagggggcatccatttagcttcaggttgtcttgtttctgtatatagtgacatagcattctgctgccatcttagctgtggacaaaggggggtcagctggcatgagaatattttttttttttaagtgcggtagtttttaaactgtttgtttttaaacaaactatagaactcttcattgtcagcaaagcaaagagtcactgcatcaatgaaagttcaagaacctcctgtacttaaacacgattcgcaacgttctgttattttttttgtatgtttagaatgctgaaatgtttttgaagttaaataaacagtattacatttttagaactcttctctactataacagtcaatttctgactcacagcagtgaacaaacccccactccattgtatttggagactggcctccctataaatgtggtagcttcttttattactcagtggccagctcacttagggctgagatgaaggagagggctacttgaagctactgtgtgattttgtttgtgtctgagtggcattcagatgaagtctggaggagttaggagaacgacataggcaaggttcagcagccttccaaggtataggaaggtgggtgattaggactgaggctatctaggtttaacttttgtcccacctccaccccctattttgtggggccaaatgcattgctaaacagcaatttcagagtgtatggtgtgtcaaaaattaaggccttattgtttttctctttcacccctaccccccgtgctcctggcacatatcacattatttgtggtgcccaacatttggggtcttgagcctgctgctggtctcctggatgccagtgagggtatgtgggatggggtggtggggtaggggacggtatcctttttttgctcctacttggaaacaccaaacaccccaaggaagatgataggctccatcttgggccacctgagctatagggcaggctaatggaatcaaccatttctgagcactaaatgtatcatgaaaagttgaatggcctgctcataagtttagctcattcactggaaatgtagattgatgttcaatgttaaactggaaggagcttggtttgtgtgtcagtggttatattagtgggtagtgtaacattttatccaggttggggtgaggggagatggccacagtagcaagtggtgacactaaataccattttgaaggctgatgtgtatatacatcattactgtccgtagcaatgaaggatacagtactgtgttgtgggtgagtgttgctattgcccagcattaatatttgggtgtgtatgtttgaggctatgaaacacgcaggagtgtttttgtgctattaattttaagagaaagcagctttttcttaaaattcactgttgagaaacttgcatgtctggaggcggtgtcctctccgccctgtcgggtcctggatgagtacgagttatggtcacggtcacagcctgatctcttatgtgttcatagccattcgctctcccatcagaactgtttgtcctgaatgtgttcctctagttctagaaaatgaccactaatttaaaaaactcggttgtgaggtttgcccagaggcacttgttccagaatttcccctcctgcttcagccatgtccttgtcacttggcattctaagctaaagctttagcttcccaattcgtgatgtgctaggccaagattcgggagctgttgccagcctcgtcaaatatggaagagaaacaacctgcggtcaaaagggagtgatttgttaagtggtgcgcgtctatctcataactagatgtaccaaccagggaagggccaaggatggaaaggggtaacttttgtgcttccaaagtagctaagcagaagtgggggagcagtttagccagatgatctttgattaggcaaacattgagttttaaagaggctgtcaagttgaggccacttggtccattagctggggcagcaagatcactactcaacgttttcacactgtggcaagattgctcttctagtggaataatgccctagtttctctgagatgatgtaagtggcatgatgttacctaaggcttaggcttagcttgatttctgggcccactgtctgtgttcttaagatgccaacctgttgctttttttttttttttcccccatttaaaaggatagtacctactccctctaaccacctcaccccattcttgaatgacattttatccttcggaaagaacaaggctgtgatgtagtgactattgtctgtgtctcctgtgtgtgtctgttcttgtcacaaatgtatttggggacgttggatgcattcattttctgtaataaagtttcttaatcactcttcccaaaaagtaaaaaaaaaa

SEQ ID NO: 420887 - DNA, 3618 bp, Homo sapiens
accagtttgtagttcagcttcaggccaagtgcttcagctccatataagaggtagctttcttgagagcagagatcgaaatatttcctatgcaaaggatggaaatacttcctgcgcgtaagcgcaatcctttcatcattcgaatcaggatggctaaaggtgaccccaagaaaccaaagggcaagatgtccgcttatgccttctttgtgcagacatgcagagaagaacataagaagaaaaacccagaggtccctgtcaattttgcggaattttccaagaagtgctctgagaggtggaagacgatgtccgggaaagagaaatctaaatttgatgaaatggcaaaggcagataaagtgcgctatgatcgggaaatgaaggattatggaccagctaagggaggcaagaagaagaaggatcctaatgctcccaaaaggccaccgtctggattcttcctgttctgttcagaattccgccccaagatcaaatccacaaaccccggcatctctattggagacgtggcaaaaaagctgggtgagatgtggaataatttaaatgacagtgaaaagcagccttacatcactaaggcggcaaagctgaaggagaagtatgagaaggatgttgctgactataagtcgaaaggaaagtttgatggtgcaaagggtcctgctaaagttgcccggaaaaaggtggaagaggaagatgaagaagaggaggaggaagaagaggaggaggaggaggaggaggatgaataaagaaactgtttatctgtctccttgtgaatacttagagtaggggagcgccgtaattgacacatctcttatttgagaagtgtctgttgccctcattaggtttaattacaaaatttgatcacgatcatattgtagtctctcaaagtgctctagaaattgtcagtggtttacatgaagtggccatgggtgtctggagcaccctgaaactgtatcaaagttgtacatatttccaaacatttttaaaatgaaaaggcactctcgtgttctcctcactctgtgcactttgctgttggtgtgacaaggcatttaaagatgtttctggcattttctttttatttgtaaggtggtggtaactatggttattggctagaaatcctgagttttcaactgtatatatctatagtttgtaaaaagaacaaaacaaccgagacaaacccttgatgctccttgctcggcgttgaggctgtggggaagatgccttttgggagaggctgtagctcagggcgtgcactgtgaggctggacctgttgactctgcagggggcatccatttagcttcaggttgtcttgtttctgtatatagtgacatagcattctgctgccatcttagctgtggacaaaggggggtcagctggcatgagaatattttttttttttaagtgcggtagtttttaaactgtttgtttttaaacaaactatagaactcttcattgtcagcaaagcaaagagtcactgcatcaatgaaagttcaagaacctcctgtacttaaacacgattcgcaacgttctgttattttttttgtatgtttagaatgctgaaatgtttttgaagttaaataaacagtattacatttttagaactcttctctactataacagtcaatttctgactcacagcagtgaacaaacccccactccattgtatttggagactggcctccctataaatgtggtagcttcttttattactcagtggccagctcacttagggctgagatgaaggagagggctacttgaagctactgtgtgattttgtttgtgtctgagtggcattcagatgaagtctggaggagttaggagaacgacataggcaaggttcagcagccttccaaggtataggaaggtgggtgattaggactgaggctatctaggtttaacttttgtcccacctccaccccctattttgtggggccaaatgcattgctaaacagcaatttcagagtgtatggtgtgtcaaaaattaaggccttattgtttttctctttcacccctaccccccgtgctcctggcacatatcacattatttgtggtgcccaacatttggggtcttgagcctgctgctggtctcctggatgccagtgagggtatgtgggatggggtggtggggtaggggacggtatcctttttttgctcctacttggaaacaccaaacaccccaaggaagatgataggctccatcttgggccacctgagctatagggcaggctaatggaatcaaccatttctgagcactaaatgtatcatgaaaagttgaatggcctgctcataagtttagctcattcactggaaatgtagattgatgttcaatgttaaactggaaggagcttggtttgtgtgtcagtggttatattagtgggtagtgtaacattttatccaggttggggtgaggggagatggccacagtagcaagtggtgacactaaataccattttgaaggctgatgtgtatatacatcattactgtccgtagcaatgaaggatacagtactgtgttgtgggtgagtgttgctattgcccagcattaatatttgggtgtgtatgtttgaggctatgaaacacgcaggagtgtttttgtgctattaattttaagagaaagcagctttttcttaaaattcactgttgagaaacttgcatgtctggaggcggtgtcctctccgccctgtcgggtcctggatgagtacgagttatggtcacggtcacagcctgatctcttatgtgttcatagccattcgctctcccatcagaactgtttgtcctgaatgtgttcctctagttctagaaaatgaccactaatttaaaaaactcggttgtgaggtttgcccagaggcacttgttccagaatttcccctcctgcttcagccatgtccttgtcacttggcattctaagctaaagctttagcttcccaattcgtgatgtgctaggccaagattcgggagctgttgccagcctcgtcaaatatggaagagaaacaacctgcggtcaaaagggagtgatttgttaagtggtgcgcgtctatctcataactagatgtaccaaccagggaagggccaaggatggaaaggggtaacttttgtgcttccaaagtagctaagcagaagtgggggagcagtttagccagatgatctttgattaggcaaacattgagttttaaagaggctgtcaagttgaggccacttggtccattagctggggcagcaagatcactactcaacgttttcacactgtggcaagattgctcttctagtggaataatgccctagtttctctgagatgatgtaagtggcatgatgttacctaaggcttaggcttagcttgatttctgggcccactgtctgtgttcttaagatgccaacctgttgctttttttttttttttcccccatttaaaaggatagtacctactccctctaaccacctcaccccattcttgaatgacattttatccttcggaaagaacaaggctgtgatgtagtgactattgtctgtgtctcctgtgtgtgtctgttcttgtcacaaatgtatttggggacgttggatgcattcattttctgtaataaagtttcttaatcactcttcccaaaaagtaaaaaaaaaa

SEQ ID NO: 420888 - DNA, 3602 bp, Homo sapiens
  misc_feature (22)..(23): n is a, c, g, or t
  misc_feature (27)..(27): n is a, c, g, or t
  misc_feature (31)..(31): n is a, c, g, or t
  misc_feature (52)..(52): n is a, c, g, or t
ggaaacttactggcaacttcannttantagngcgccaccttgggaggtttcnacgggcggtgcgcgtactcgttactactatcgaatttgtcagccatcgcgactcatcgttgaacggagcatactcaggatggctaaaggtgaccccaagaaaccaaagggcaagatgtccgcttatgccttctttgtgcagacatgcagagaagaacataagaagaaaaacccagaggtccctgtcaattttgcggaattttccaagaagtgctctgagaggtggaagacgatgtccgggaaagagaaatctaaatttgatgaaatggcaaaggcagataaagtgcgctatgatcgggaaatgaaggattatggaccagctaagggaggcaagaagaagaaggatcctaatgctcccaaaaggccaccgtctggattcttcctgttctgttcagaattccgccccaagatcaaatccacaaaccccggcatctctattggagacgtggcaaaaaagctgggtgagatgtggaataatttaaatgacagtgaaaagcagccttacatcactaaggcggcaaagctgaaggagaagtatgagaaggatgttgctgactataagtcgaaaggaaagtttgatggtgcaaagggtcctgctaaagttgcccggaaaaaggtggaagaggaagatgaagaagaggaggaggaagaagaggaggaggaggaggaggaggatgaataaagaaactgtttatctgtctccttgtgaatacttagagtaggggagcgccgtaattgacacatctcttatttgagaagtgtctgttgccctcattaggtttaattacaaaatttgatcacgatcatattgtagtctctcaaagtgctctagaaattgtcagtggtttacatgaagtggccatgggtgtctggagcaccctgaaactgtatcaaagttgtacatatttccaaacatttttaaaatgaaaaggcactctcgtgttctcctcactctgtgcactttgctgttggtgtgacaaggcatttaaagatgtttctggcattttctttttatttgtaaggtggtggtaactatggttattggctagaaatcctgagttttcaactgtatatatctatagtttgtaaaaagaacaaaacaaccgagacaaacccttgatgctccttgctcggcgttgaggctgtggggaagatgccttttgggagaggctgtagctcagggcgtgcactgtgaggctggacctgttgactctgcagggggcatccatttagcttcaggttgtcttgtttctgtatatagtgacatagcattctgctgccatcttagctgtggacaaaggggggtcagctggcatgagaatattttttttttttaagtgcggtagtttttaaactgtttgtttttaaacaaactatagaactcttcattgtcagcaaagcaaagagtcactgcatcaatgaaagttcaagaacctcctgtacttaaacacgattcgcaacgttctgttattttttttgtatgtttagaatgctgaaatgtttttgaagttaaataaacagtattacatttttagaactcttctctactataacagtcaatttctgactcacagcagtgaacaaacccccactccattgtatttggagactggcctccctataaatgtggtagcttcttttattactcagtggccagctcacttagggctgagatgaaggagagggctacttgaagctactgtgtgattttgtttgtgtctgagtggcattcagatgaagtctggaggagttaggagaacgacataggcaaggttcagcagccttccaaggtataggaaggtgggtgattaggactgaggctatctaggtttaacttttgtcccacctccaccccctattttgtggggccaaatgcattgctaaacagcaatttcagagtgtatggtgtgtcaaaaattaaggccttattgtttttctctttcacccctaccccccgtgctcctggcacatatcacattatttgtggtgcccaacatttggggtcttgagcctgctgctggtctcctggatgccagtgagggtatgtgggatggggtggtggggtaggggacggtatcctttttttgctcctacttggaaacaccaaacaccccaaggaagatgataggctccatcttgggccacctgagctatagggcaggctaatggaatcaaccatttctgagcactaaatgtatcatgaaaagttgaatggcctgctcataagtttagctcattcactggaaatgtagattgatgttcaatgttaaactggaaggagcttggtttgtgtgtcagtggttatattagtgggtagtgtaacattttatccaggttggggtgaggggagatggccacagtagcaagtggtgacactaaataccattttgaaggctgatgtgtatatacatcattactgtccgtagcaatgaaggatacagtactgtgttgtgggtgagtgttgctattgcccagcattaatatttgggtgtgtatgtttgaggctatgaaacacgcaggagtgtttttgtgctattaattttaagagaaagcagctttttcttaaaattcactgttgagaaacttgcatgtctggaggcggtgtcctctccgccctgtcgggtcctggatgagtacgagttatggtcacggtcacagcctgatctcttatgtgttcatagccattcgctctcccatcagaactgtttgtcctgaatgtgttcctctagttctagaaaatgaccactaatttaaaaaactcggttgtgaggtttgcccagaggcacttgttccagaatttcccctcctgcttcagccatgtccttgtcacttggcattctaagctaaagctttagcttcccaattcgtgatgtgctaggccaagattcgggagctgttgccagcctcgtcaaatatggaagagaaacaacctgcggtcaaaagggagtgatttgttaagtggtgcgcgtctatctcataactagatgtaccaaccagggaagggccaaggatggaaaggggtaacttttgtgcttccaaagtagctaagcagaagtgggggagcagtttagccagatgatctttgattaggcaaacattgagttttaaagaggctgtcaagttgaggccacttggtccattagctggggcagcaagatcactactcaacgttttcacactgtggcaagattgctcttctagtggaataatgccctagtttctctgagatgatgtaagtggcatgatgttacctaaggcttaggcttagcttgatttctgggcccactgtctgtgttcttaagatgccaacctgttgctttttttttttttttcccccatttaaaaggatagtacctactccctctaaccacctcaccccattcttgaatgacattttatccttcggaaagaacaaggctgtgatgtagtgactattgtctgtgtctcctgtgtgtgtctgttcttgtcacaaatgtatttggggacgttggatgcattcattttctgtaataaagtttcttaatcactcttcccaaaaagtaaaaaaaaaa

SEQ ID NO: 420889 - DNA, 3223 bp, Homo sapiens
  misc_feature (21)..(21): n is a, c, g, or t
  misc_feature (29)..(30): n is a, c, g, or t
ggttgatctcgaggatccccncatttgcnnccatcaggcacgtctggattcttcctgttctgttcagaattccgccccaagatcaaatccacaaaccccggcatctctattggagacgtggcaaaaaagctgggtgagatgtggaataatttaaatgacagtgaaaagcagccttacatcactaaggcggcaaagctgaaggagaagtatgagaaggatgttgctgactataagtcgaaaggaaagtttgatggtgcaaagggtcctgctaaagttgcccggaaaaaggtggaagaggaagatgaagaagaggaggaggaagaagaggaggaggaggaggaggaggatgaataaagaaactgtttatctgtctccttgtgaatacttagagtaggggagcgccgtaattgacacatctcttatttgagaagtgtctgttgccctcattaggtttaattacaaaatttgatcacgatcatattgtagtctctcaaagtgctctagaaattgtcagtggtttacatgaagtggccatgggtgtctggagcaccctgaaactgtatcaaagttgtacatatttccaaacatttttaaaatgaaaaggcactctcgtgttctcctcactctgtgcactttgctgttggtgtgacaaggcatttaaagatgtttctggcattttctttttatttgtaaggtggtggtaactatggttattggctagaaatcctgagttttcaactgtatatatctatagtttgtaaaaagaacaaaacaaccgagacaaacccttgatgctccttgctcggcgttgaggctgtggggaagatgccttttgggagaggctgtagctcagggcgtgcactgtgaggctggacctgttgactctgcagggggcatccatttagcttcaggttgtcttgtttctgtatatagtgacatagcattctgctgccatcttagctgtggacaaaggggggtcagctggcatgagaatattttttttttttaagtgcggtagtttttaaactgtttgtttttaaacaaactatagaactcttcattgtcagcaaagcaaagagtcactgcatcaatgaaagttcaagaacctcctgtacttaaacacgattcgcaacgttctgttattttttttgtatgtttagaatgctgaaatgtttttgaagttaaataaacagtattacatttttagaactcttctctactataacagtcaatttctgactcacagcagtgaacaaacccccactccattgtatttggagactggcctccctataaatgtggtagcttcttttattactcagtggccagctcacttagggctgagatgaaggagagggctacttgaagctactgtgtgattttgtttgtgtctgagtggcattcagatgaagtctggaggagttaggagaacgacataggcaaggttcagcagccttccaaggtataggaaggtgggtgattaggactgaggctatctaggtttaacttttgtcccacctccaccccctattttgtggggccaaatgcattgctaaacagcaatttcagagtgtatggtgtgtcaaaaattaaggccttattgtttttctctttcacccctaccccccgtgctcctggcacatatcacattatttgtggtgcccaacatttggggtcttgagcctgctgctggtctcctggatgccagtgagggtatgtgggatggggtggtggggtaggggacggtatcctttttttgctcctacttggaaacaccaaacaccccaaggaagatgataggctccatcttgggccacctgagctatagggcaggctaatggaatcaaccatttctgagcactaaatgtatcatgaaaagttgaatggcctgctcataagtttagctcattcactggaaatgtagattgatgttcaatgttaaactggaaggagcttggtttgtgtgtcagtggttatattagtgggtagtgtaacattttatccaggttggggtgaggggagatggccacagtagcaagtggtgacactaaataccattttgaaggctgatgtgtatatacatcattactgtccgtagcaatgaaggatacagtactgtgttgtgggtgagtgttgctattgcccagcattaatatttgggtgtgtatgtttgaggctatgaaacacgcaggagtgtttttgtgctattaattttaagagaaagcagctttttcttaaaattcactgttgagaaacttgcatgtctggaggcggtgtcctctccgccctgtcgggtcctggatgagtacgagttatggtcacggtcacagcctgatctcttatgtgttcatagccattcgctctcccatcagaactgtttgtcctgaatgtgttcctctagttctagaaaatgaccactaatttaaaaaactcggttgtgaggtttgcccagaggcacttgttccagaatttcccctcctgcttcagccatgtccttgtcacttggcattctaagctaaagctttagcttcccaattcgtgatgtgctaggccaagattcgggagctgttgccagcctcgtcaaatatggaagagaaacaacctgcggtcaaaagggagtgatttgttaagtggtgcgcgtctatctcataactagatgtaccaaccagggaagggccaaggatggaaaggggtaacttttgtgcttccaaagtagctaagcagaagtgggggagcagtttagccagatgatctttgattaggcaaacattgagttttaaagaggctgtcaagttgaggccacttggtccattagctggggcagcaagatcactactcaacgttttcacactgtggcaagattgctcttctagtggaataatgccctagtttctctgagatgatgtaagtggcatgatgttacctaaggcttaggcttagcttgatttctgggcccactgtctgtgttcttaagatgccaacctgttgctttttttttttttttcccccatttaaaaggatagtacctactccctctaaccacctcaccccattcttgaatgacattttatccttcggaaagaacaaggctgtgatgtagtgactattgtctgtgtctcctgtgtgtgtctgttcttgtcacaaatgtatttggggacgttggatgcattcattttctgtaataaagtttcttaatcactcttcccaaaaagtaaaaaaaaaa

SEQ ID NO: 420890 - DNA, 3185 bp, Homo sapiens
ataaatcgagcctgtaccggtgttatcgatgcacttgtcaatgatcaaatccacaaaccccggcatctctattggagacgtggcaaaaaagctgggtgagatgtggaataatttaaatgacagtgaaaagcagccttacatcactaaggcggcaaagctgaaggagaagtatgagaaggatgttgctgactataagtcgaaaggaaagtttgatggtgcaaagggtcctgctaaagttgcccggaaaaaggtggaagaggaagatgaagaagaggaggaggaagaagaggaggaggaggaggaggaggatgaataaagaaactgtttatctgtctccttgtgaatacttagagtaggggagcgccgtaattgacacatctcttatttgagaagtgtctgttgccctcattaggtttaattacaaaatttgatcacgatcatattgtagtctctcaaagtgctctagaaattgtcagtggtttacatgaagtggccatgggtgtctggagcaccctgaaactgtatcaaagttgtacatatttccaaacatttttaaaatgaaaaggcactctcgtgttctcctcactctgtgcactttgctgttggtgtgacaaggcatttaaagatgtttctggcattttctttttatttgtaaggtggtggtaactatggttattggctagaaatcctgagttttcaactgtatatatctatagtttgtaaaaagaacaaaacaaccgagacaaacccttgatgctccttgctcggcgttgaggctgtggggaagatgccttttgggagaggctgtagctcagggcgtgcactgtgaggctggacctgttgactctgcagggggcatccatttagcttcaggttgtcttgtttctgtatatagtgacatagcattctgctgccatcttagctgtggacaaaggggggtcagctggcatgagaatattttttttttttaagtgcggtagtttttaaactgtttgtttttaaacaaactatagaactcttcattgtcagcaaagcaaagagtcactgcatcaatgaaagttcaagaacctcctgtacttaaacacgattcgcaacgttctgttattttttttgtatgtttagaatgctgaaatgtttttgaagttaaataaacagtattacatttttagaactcttctctactataacagtcaatttctgactcacagcagtgaacaaacccccactccattgtatttggagactggcctccctataaatgtggtagcttcttttattactcagtggccagctcacttagggctgagatgaaggagagggctacttgaagctactgtgtgattttgtttgtgtctgagtggcattcagatgaagtctggaggagttaggagaacgacataggcaaggttcagcagccttccaaggtataggaaggtgggtgattaggactgaggctatctaggtttaacttttgtcccacctccaccccctattttgtggggccaaatgcattgctaaacagcaatttcagagtgtatggtgtgtcaaaaattaaggccttattgtttttctctttcacccctaccccccgtgctcctggcacatatcacattatttgtggtgcccaacatttggggtcttgagcctgctgctggtctcctggatgccagtgagggtatgtgggatggggtggtggggtaggggacggtatcctttttttgctcctacttggaaacaccaaacaccccaaggaagatgataggctccatcttgggccacctgagctatagggcaggctaatggaatcaaccatttctgagcactaaatgtatcatgaaaagttgaatggcctgctcataagtttagctcattcactggaaatgtagattgatgttcaatgttaaactggaaggagcttggtttgtgtgtcagtggttatattagtgggtagtgtaacattttatccaggttggggtgaggggagatggccacagtagcaagtggtgacactaaataccattttgaaggctgatgtgtatatacatcattactgtccgtagcaatgaaggatacagtactgtgttgtgggtgagtgttgctattgcccagcattaatatttgggtgtgtatgtttgaggctatgaaacacgcaggagtgtttttgtgctattaattttaagagaaagcagctttttcttaaaattcactgttgagaaacttgcatgtctggaggcggtgtcctctccgccctgtcgggtcctggatgagtacgagttatggtcacggtcacagcctgatctcttatgtgttcatagccattcgctctcccatcagaactgtttgtcctgaatgtgttcctctagttctagaaaatgaccactaatttaaaaaactcggttgtgaggtttgcccagaggcacttgttccagaatttcccctcctgcttcagccatgtccttgtcacttggcattctaagctaaagctttagcttcccaattcgtgatgtgctaggccaagattcgggagctgttgccagcctcgtcaaatatggaagagaaacaacctgcggtcaaaagggagtgatttgttaagtggtgcgcgtctatctcataactagatgtaccaaccagggaagggccaaggatggaaaggggtaacttttgtgcttccaaagtagctaagcagaagtgggggagcagtttagccagatgatctttgattaggcaaacattgagttttaaagaggctgtcaagttgaggccacttggtccattagctggggcagcaagatcactactcaacgttttcacactgtggcaagattgctcttctagtggaataatgccctagtttctctgagatgatgtaagtggcatgatgttacctaaggcttaggcttagcttgatttctgggcccactgtctgtgttcttaagatgccaacctgttgctttttttttttttttcccccatttaaaaggatagtacctactccctctaaccacctcaccccattcttgaatgacattttatccttcggaaagaacaaggctgtgatgtagtgactattgtctgtgtctcctgtgtgtgtctgttcttgtcacaaatgtatttggggacgttggatgcattcattttctgtaataaagtttcttaatcactcttcccaaaaagtaaaaaaaaaa

SEQ ID NO: 420891 - DNA, 3429 bp, Homo sapiens
cgtggaggcagctagcgcgaggctggggagcgctgagccgcgcgtcgtgccctgcgctgcccagactagcgaacaatacagtcaggatggctaaaggtgaccccaagaaaccaaagggcaagatgtccgcttatgccttctttgtgcagacatgcagagaagaacataagaagaaaaacccagaggtccctgtcaattttgcggaattttccaagaagtgctctgagaggtggaagacgatgtccgggaaagagaaatctaaatttgatgaaatggcaaaggcagataaagtgcgctatgatcgggaaatgaaggattatggaccagctaagggaggcaagaagaagaaggatcctaatgctcccaaaaggccaccgtctggattcttcctgttctgttcagaattccgccccaagatcaaatccacaaaccccggcatctctattggagacgtggcaaaaaagctgggtgagatgtggaataatttaaatgacagtgaaaagcagccttacatcactaaggcggcaaagctgaaggagaagtatgagaaggatgaataaagaaactgtttatctgtctccttgtgaatacttagagtaggggagcgccgtaattgacacatctcttatttgagaagtgtctgttgccctcattaggtttaattacaaaatttgatcacgatcatattgtagtctctcaaagtgctctagaaattgtcagtggtttacatgaagtggccatgggtgtctggagcaccctgaaactgtatcaaagttgtacatatttccaaacatttttaaaatgaaaaggcactctcgtgttctcctcactctgtgcactttgctgttggtgtgacaaggcatttaaagatgtttctggcattttctttttatttgtaaggtggtggtaactatggttattggctagaaatcctgagttttcaactgtatatatctatagtttgtaaaaagaacaaaacaaccgagacaaacccttgatgctccttgctcggcgttgaggctgtggggaagatgccttttgggagaggctgtagctcagggcgtgcactgtgaggctggacctgttgactctgcagggggcatccatttagcttcaggttgtcttgtttctgtatatagtgacatagcattctgctgccatcttagctgtggacaaaggggggtcagctggcatgagaatattttttttttttaagtgcggtagtttttaaactgtttgtttttaaacaaactatagaactcttcattgtcagcaaagcaaagagtcactgcatcaatgaaagttcaagaacctcctgtacttaaacacgattcgcaacgttctgttattttttttgtatgtttagaatgctgaaatgtttttgaagttaaataaacagtattacatttttagaactcttctctactataacagtcaatttctgactcacagcagtgaacaaacccccactccattgtatttggagactggcctccctataaatgtggtagcttcttttattactcagtggccagctcacttagggctgagatgaaggagagggctacttgaagctactgtgtgattttgtttgtgtctgagtggcattcagatgaagtctggaggagttaggagaacgacataggcaaggttcagcagccttccaaggtataggaaggtgggtgattaggactgaggctatctaggtttaacttttgtcccacctccaccccctattttgtggggccaaatgcattgctaaacagcaatttcagagtgtatggtgtgtcaaaaattaaggccttattgtttttctctttcacccctaccccccgtgctcctggcacatatcacattatttgtggtgcccaacatttggggtcttgagcctgctgctggtctcctggatgccagtgagggtatgtgggatggggtggtggggtaggggacggtatcctttttttgctcctacttggaaacaccaaacaccccaaggaagatgataggctccatcttgggccacctgagctatagggcaggctaatggaatcaaccatttctgagcactaaatgtatcatgaaaagttgaatggcctgctcataagtttagctcattcactggaaatgtagattgatgttcaatgttaaactggaaggagcttggtttgtgtgtcagtggttatattagtgggtagtgtaacattttatccaggttggggtgaggggagatggccacagtagcaagtggtgacactaaataccattttgaaggctgatgtgtatatacatcattactgtccgtagcaatgaaggatacagtactgtgttgtgggtgagtgttgctattgcccagcattaatatttgggtgtgtatgtttgaggctatgaaacacgcaggagtgtttttgtgctattaattttaagagaaagcagctttttcttaaaattcactgttgagaaacttgcatgtctggaggcggtgtcctctccgccctgtcgggtcctggatgagtacgagttatggtcacggtcacagcctgatctcttatgtgttcatagccattcgctctcccatcagaactgtttgtcctgaatgtgttcctctagttctagaaaatgaccactaatttaaaaaactcggttgtgaggtttgcccagaggcacttgttccagaatttcccctcctgcttcagccatgtccttgtcacttggcattctaagctaaagctttagcttcccaattcgtgatgtgctaggccaagattcgggagctgttgccagcctcgtcaaatatggaagagaaacaacctgcggtcaaaagggagtgatttgttaagtggtgcgcgtctatctcataactagatgtaccaaccagggaagggccaaggatggaaaggggtaacttttgtgcttccaaagtagctaagcagaagtgggggagcagtttagccagatgatctttgattaggcaaacattgagttttaaagaggctgtcaagttgaggccacttggtccattagctggggcagcaagatcactactcaacgttttcacactgtggcaagattgctcttctagtggaataatgccctagtttctctgagatgatgtaagtggcatgatgttacctaaggcttaggcttagcttgatttctgggcccactgtctgtgttcttaagatgccaacctgttgctttttttttttttttcccccatttaaaaggatagtacctactccctctaaccacctcaccccattcttgaatgacattttatccttcggaaagaacaaggctgtgatgtagtgactattgtctgtgtctcctgtgtgtgtctgttcttgtcacaaatgtatttggggacgttggatgcattcattttctgtaataaagtttcttaatcactcttcccaaaaagtaaaaaaaaaa

SEQ ID NO: 420892 - DNA, 3411 bp, Homo sapiens
gtacttcttgtcaattcctccttgcttttcctcattgtatttctttgtttctcttttatcacatcaggatggctaaaggtgaccccaagaaaccaaagggcaagatgtccgcttatgccttctttgtgcagacatgcagagaagaacataagaagaaaaacccagaggtccctgtcaattttgcggaattttccaagaagtgctctgagaggtggaagacgatgtccgggaaagagaaatctaaatttgatgaaatggcaaaggcagataaagtgcgctatgatcgggaaatgaaggattatggaccagctaagggaggcaagaagaagaaggatcctaatgctcccaaaaggccaccgtctggattcttcctgttctgttcagaattccgccccaagatcaaatccacaaaccccggcatctctattggagacgtggcaaaaaagctgggtgagatgtggaataatttaaatgacagtgaaaagcagccttacatcactaaggcggcaaagctgaaggagaagtatgagaaggatgaataaagaaactgtttatctgtctccttgtgaatacttagagtaggggagcgccgtaattgacacatctcttatttgagaagtgtctgttgccctcattaggtttaattacaaaatttgatcacgatcatattgtagtctctcaaagtgctctagaaattgtcagtggtttacatgaagtggccatgggtgtctggagcaccctgaaactgtatcaaagttgtacatatttccaaacatttttaaaatgaaaaggcactctcgtgttctcctcactctgtgcactttgctgttggtgtgacaaggcatttaaagatgtttctggcattttctttttatttgtaaggtggtggtaactatggttattggctagaaatcctgagttttcaactgtatatatctatagtttgtaaaaagaacaaaacaaccgagacaaacccttgatgctccttgctcggcgttgaggctgtggggaagatgccttttgggagaggctgtagctcagggcgtgcactgtgaggctggacctgttgactctgcagggggcatccatttagcttcaggttgtcttgtttctgtatatagtgacatagcattctgctgccatcttagctgtggacaaaggggggtcagctggcatgagaatattttttttttttaagtgcggtagtttttaaactgtttgtttttaaacaaactatagaactcttcattgtcagcaaagcaaagagtcactgcatcaatgaaagttcaagaacctcctgtacttaaacacgattcgcaacgttctgttattttttttgtatgtttagaatgctgaaatgtttttgaagttaaataaacagtattacatttttagaactcttctctactataacagtcaatttctgactcacagcagtgaacaaacccccactccattgtatttggagactggcctccctataaatgtggtagcttcttttattactcagtggccagctcacttagggctgagatgaaggagagggctacttgaagctactgtgtgattttgtttgtgtctgagtggcattcagatgaagtctggaggagttaggagaacgacataggcaaggttcagcagccttccaaggtataggaaggtgggtgattaggactgaggctatctaggtttaacttttgtcccacctccaccccctattttgtggggccaaatgcattgctaaacagcaatttcagagtgtatggtgtgtcaaaaattaaggccttattgtttttctctttcacccctaccccccgtgctcctggcacatatcacattatttgtggtgcccaacatttggggtcttgagcctgctgctggtctcctggatgccagtgagggtatgtgggatggggtggtggggtaggggacggtatcctttttttgctcctacttggaaacaccaaacaccccaaggaagatgataggctccatcttgggccacctgagctatagggcaggctaatggaatcaaccatttctgagcactaaatgtatcatgaaaagttgaatggcctgctcataagtttagctcattcactggaaatgtagattgatgttcaatgttaaactggaaggagcttggtttgtgtgtcagtggttatattagtgggtagtgtaacattttatccaggttggggtgaggggagatggccacagtagcaagtggtgacactaaataccattttgaaggctgatgtgtatatacatcattactgtccgtagcaatgaaggatacagtactgtgttgtgggtgagtgttgctattgcccagcattaatatttgggtgtgtatgtttgaggctatgaaacacgcaggagtgtttttgtgctattaattttaagagaaagcagctttttcttaaaattcactgttgagaaacttgcatgtctggaggcggtgtcctctccgccctgtcgggtcctggatgagtacgagttatggtcacggtcacagcctgatctcttatgtgttcatagccattcgctctcccatcagaactgtttgtcctgaatgtgttcctctagttctagaaaatgaccactaatttaaaaaactcggttgtgaggtttgcccagaggcacttgttccagaatttcccctcctgcttcagccatgtccttgtcacttggcattctaagctaaagctttagcttcccaattcgtgatgtgctaggccaagattcgggagctgttgccagcctcgtcaaatatggaagagaaacaacctgcggtcaaaagggagtgatttgttaagtggtgcgcgtctatctcataactagatgtaccaaccagggaagggccaaggatggaaaggggtaacttttgtgcttccaaagtagctaagcagaagtgggggagcagtttagccagatgatctttgattaggcaaacattgagttttaaagaggctgtcaagttgaggccacttggtccattagctggggcagcaagatcactactcaacgttttcacactgtggcaagattgctcttctagtggaataatgccctagtttctctgagatgatgtaagtggcatgatgttacctaaggcttaggcttagcttgatttctgggcccactgtctgtgttcttaagatgccaacctgttgctttttttttttttttcccccatttaaaaggatagtacctactccctctaaccacctcaccccattcttgaatgacattttatccttcggaaagaacaaggctgtgatgtagtgactattgtctgtgtctcctgtgtgtgtctgttcttgtcacaaatgtatttggggacgttggatgcattcattttctgtaataaagtttcttaatcactcttcccaaaaagtaaaaaaaaaa

SEQ ID NO: 420893 - DNA, 2763 bp, Homo sapiens
cgtggaggcagctagcgcgaggctggggagcgctgagccgcgcgtcgtgccctgcgctgcccagactagcgaacaatacagtcaggatggctaaaggtgaccccaagaaaccaaagggcaagatgtccgcttatgccttctttgtgcagacatgcagagaagaacataagaagaaaaacccagaggtccctgtcaattttgcggaattttccaagaagtgctctgagaggtggaagacgatgtccgggaaagagaaatctaaatttgatgaaatggcaaaggcagataaagtgcgctatgatcgggaaatgaaggattatggaccagctaagggaggcaagaagaagaaggatcctaatgctcccaaaaggccaccgtctggattcttcctgttctgttcagaattccgccccaagatcaaatccacaaaccccggcatctctattggagacgtggcaaaaaagctgggtgagatgtggaataatttaaatgacagtgaaaagcagccttacatcactaaggcggcaaagctgaaggagaagtatgagaaggatgttgctgactataagtcgaaaggaaagtttgatggtgcaaagggtcctgctaaagttgcccggaaaaaggtggaagaggaagatgaagaagaggaggaggaagaagaggaggaggaggaggaggaggatgaataaagaaactgtttatctgtctccttgtgaatacttagagtaggggagcgccgtaattgacacatctcttatttgagaagtgtctgttgccctcattaggtttaattacaaaatttgatcacgatcatattgtagtctctcaaagtgctctagaaattgtcagtggtttacatgaagtggccatgggtgtctggagcaccctgaaactgtatcaaagttgtacatatttccaaacatttttaaaatgaaaaggcactctcgtgttctcctcactctgtgcactttgctgttggtgtgacaaggcatttaaagatgtttctggcattttctttttatttgtaaggtggtggtaactatggttattggctagaaatcctgagttttcaactgtatatatctatagtttgtaaaaagaacaaaacaaccgagacaaacccttgatgctccttgctcggcgttgaggctgtggggaagatgccttttgggagaggctgtagctcagggcgtgcactgtgaggctggacctgttgactctgcagggggcatccatttagcttcaggttgtcttgtttctgtatatagtgacatagcattctgctgccatcttagctgtggacaaaggggggtcagctggcatgagaatattttttttttttaagtgcggtagtttttaaactgtttgtttttaaacaaactatagaactcttcattgtcagcaaagcaaagagtcactgcatcaatgaaagttcaagaacctcctgtacttaaacacgattcgcaacgttctgttattttttttgtatgtttagaatgctgaaatgtttttgaagttaaataaacagtattacatttttagaactcttctctactataacagtcaatttctgactcacagcagtgaacaaacccccactccattgtatttggagactggcctccctataaatgtggtagcttcttttattactcagtggccagctcacttagggctgagatgaaggagagggctacttgaagctactgtgtgattttgtttgtgtctgagtggcattcagatgaagtctggaggagttaggagaacgacataggcaaggttcagcagccttccaaggtataggaaggtgggtgattaggactgaggctatctaggtttaacttttgtcccacctccaccccctattttgtggggccaaatgcattgctaaacagcaatttcagagtgtatggtgtgtcaaaaattaaggccttattgtttttctctttcacccctaccccccgtgctcctggcacatatcacattatttgtggtgcccaacatttggggtcttgagcctgctgctggtctcctggatgccagtgagggtatgtgggatggggtggtggggtaggggacggtatcctttttttgctcctacttggaaacaccaaacaccccaaggaagatgataggctccatcttgggccacctgagctatagggcaggctaatggaatcaaccatttctgagcactaaatgtatcatgaaaagttgaatggcctgctcataagtttagctcattcactggaaatgtagattgatgttcaatgttaaactggaaggagcttggtttgtgtgtcagtggttatattagtgggtagtgtaacattttatccaggttggggtgaggggagatggccacagtagcaagtggtgacactaaataccattttgaaggctgatgtgtatatacatcattactgtccgtagcaatgaaggatacagtactgtgttgtgggtgagtgttgctattgcccagcattaatatttgggtgtgtatgtttgaggctatgaaacacgcaggagtgtttttgtgctattaattttaagagaaagcagctttttcttaaaattcactgttgagaaacttgcatgtctggaggcggtgtcctctccgccctgtcgggtcctggatgagtactattgtctgtgtctcctgtgtgtgtctgttcttgtcacaaatgtatttggggacgttggatgcattcattttctgtaataaagtttcttaatcactcttcccaaaaagtaaaaaaaaaa

SEQ ID NO: 420894 - DNA, 1541 bp, Homo sapiens
cgtggaggcagctagcgcgaggctggggagcgctgagccgcgcgtcgtgccctgcgctgcccagactagcgaacaatacagtcaggatggctaaaggtgaccccaagaaaccaaagggcaagatgtccgcttatgccttctttgtgcagacatgcagagaagaacataagaagaaaaacccagaggtccctgtcaattttgcggaattttccaagaagtgctctgagaggtggaagacgatgtccgggaaagagaaatctaaatttgatgaaatggcaaaggcagataaagtgcgctatgatcgggaaatgaaggattatggaccagctaagggaggcaagaagaagaaggatcctaatgctcccaaaaggccaccgtctggattcttcctgttctgttcagaattccgccccaagatcaaatccacaaaccccggcatctctattggagacgtggcaaaaaagctgggtgagatgtggaataatttaaatgacagtgaaaagcagccttacatcactaaggcggcaaagctgaaggagaagtatgagaaggatgttgctgactataagtcgaaaggaaagtttgatggtgcaaagggtcctgctaaagttgcccggaaaaaggtggaagaggaagatgaagaagaggaggaggaagaagaggaggaggaggaggaggaggatgaataaagaaactgtttatctgtctccttgtgaatacttagagtaggggagcgccgtaattgacacatctcttatttgagaagtgtctgttgccctcattaggtttaattacaaaatttgatcacgatcatattgtagtctctcaaagtgctctagaaattgtcagtggtttacatgaagtggccatgggtgtctggagcaccctgaaactgtatcaaagttgtacatatttccaaacatttttaaaatgaaaaggcactctcgtgttctcctcactctgtgcactttgctgttggtgtgacaaggcatttaaagatgtttctggcattttctttttatttgtaaggtggtggtaactatggttattggctagaaatcctgagttttcaactgtatatatctatagtttgtaaaaagaacaaaacaaccgagacaaacccttgatgctccttgctcggcgttgaggctgtggggaagatgccttttgggagaggctgtagctcagggcgtgcactgtgaggctggacctgttgactctgcagggggcatccatttagcttcaggttgtcttgtttctgtatatagtgacatagcattctgctgccatcttagctgtggacaaaggggggtcagctggcatgagaatattttttttttttaagtgcggtagtttttaaactgtttgtttttaaacaaactatagaactcttcattgtcagcaaagcaaagagtcactgcatcaatgaaagttcaagaacctcctgtacttaaacacgattcgcaacgttctgttattttttttgtatgtttagaatgctgaaatgtttttgaagttaaataaacagtattacattttta

SEQ ID NO: 420895 - DNA, 1815 bp, Homo sapiens
cgtggaggcagctagcgcgaggctggggagcgctgagccgcgcgtcgtgccctgcgctgcccagactagcgaacaatacagtcaggatggctaaaggtgaccccaagaaaccaaagggcaagatgtccgcttatgccttctttgtgcagacatgcagagaagaacataagaagaaaaacccagaggtccctgtcaattttgcggaattttccaagaagtgctctgagaggtggaagacgatgtccgggaaagagaaatctaaatttgatgaaatggcaaaggcagataaagtgcgctatgatcgggaaatgaaggattatggaccagctaagggaggcaagaagaagaaggatcctaatgctcccaaaaggccaccgtctggattcttcctgttctgttcagaattccgccccaagatcaaatccacaaaccccggcatctctattggagacgtggcaaaaaagctgggtgagatgtggaataatttaaatgacagtgaaaagcagccttacatcactaaggcggcaaagctgaaggagaagtatgagaaggatgttgctgactataagtcgaaaggaaagtttgatggtgcaaagggtcctgctaaagttgcccggaaaaaggtggaagaggaagatgaagaagaggaggaggaagaagaggaggaggaggaggaggaggatgaataaagaaactgtttatctgtctccttgtgaatacttagagtaggggagcgccgtaattgacacatctcttatttgagaagtgtctgttgccctcattaggtttaattacaaaatttgatcacgatcatattgtagtctctcaaagtgctctagaaattgtcagtggtttacatgaagtggccatgggtgtctggagcaccctgaaactgtatcaaagttgtacatatttccaaacatttttaaaatgaaaaggcactctcgtgttctcctcactctgtgcactttgctgttggtgtgacaaggcatttaaagatgtttctggcattttctttttatttgtaaggtggtggtaactatggttattggctagaaatcctgagttttcaactgtatatatctatagtttgtaaaaagaacaaaacaaccgagacaaacccttgatgctccttgctcggcgttgaggctgtggggaagatgccttttgggagaggctgtagctcagggcgtgcactgtgaggctggacctgttgactctgcagggggcatccatttagcttcaggttgtcttgtttctgtatatagtgacatagcattctgctgccatcttagccccctttgtccggacgcgtggggggacgcgtgggtggacgcgtgggctgttgatctgtctccttgtgagtacttagagtaggggagcgccgtaattggacacattctcctaattggaaaagggtcggtggccctcataaggttaataacaaagtttggtatcacgactcattatggtagtctctcaaagtgctctagaatatgtcagtggtttacatgaagtggccatgggtgtctggagcaccctgaaactgtatcaaagttgtacatatgttccaaaacatgtttaccactgaaagggcactctcgtgttgctcctcactcgtgtgcacttgtgctgtggggtcgtgacaaggcatttaaagatgttgcgggcattgccttgtcatggcaggggggggtaccatggtgaatggtaggaatccctgggtgcaactggtttttcccatggcgggaagggacacacacgggaaacctgggcctgacggaatgaagggggaagagcccggaggtggccaag

SEQ ID NO: 420896 - DNA, 787 bp, Homo sapiens
cgtggaggcagctagcgcgaggctggggagcgctgagccgcgcgtcgtgccctgcgctgcccagactagcgaacaatacagtcaggatggctaaaggtgaccccaagaaaccaaagggcaagatgtccgcttatgccttctttgtgcagacatgcagagaagaacataagaagaaaaacccagaggtccctgtcaattttgcggaattttccaagaagtgctctgagaggtggaagacgatgtccgggaaagagaaatctaaatttgatgaaatggcaaaggcagataaagtgcgctatgatcgggaaatgaaggattatggaccagctaagggaggcaagaagaagaaggatcctaatgctcccaaaaggccaccgtctggattcttcctgttctgttcagaattccgccccaagatcaaatccacaaaccccggcatctctattggagacgtggcaaaaaagctgggtgagatgtggaataatttaaatgacagtgaaaagcagccttacatcactaaggcggcaaagctgaaggagaagtatgagaaggtttgatgacctcgaaacccttaaaaaaaaaacaacaacctgtttttcaaaagtgatgctgtcatatcctgagagtgacgctgtaggaaaaaaaaaatttaaaaataaaaacaaaacaaaacaaagctaagctttcagacttgcagggttggatgacatcaaaccctgtcatcaaccctcatcaaaccctgtatacaagtagaccactacagccagttaggtaagggttccgatga

SEQ ID NO: 420897 - DNA, 2502 bp, Homo sapiens
ctcggttggcgcgagtgtcctgtcgccgccgcctcgggcgggtgggctgactggcggcaggctcgccgcggcgcggagtcccggctgcgggatagaccgagggccatggccgcctctcccggacccgccggcgttggcggcgccggagcagtctacggctccggctcttcgggcttcgccctcgactcgggactggagatcaaaactcgctcggtggagcagacgctactcccgctggtttctcagatcaccacgcttattaatcataaagataataccaaaaagtctgataaaactctgcaagcaattcagcgtgtaggacaagctgtcaacttggcagttggaagatttgttaaagtaggagaagctatagccaatgaaaactgggatttgaaagaagaaataaatattgcttgtattgaagctaaacaagcaggagaaacaattgcagcacttacagacataaccaacttgaaccatctggaatctgatgggcagatcacaatttttacagacaaaacaggagtgataaaggctgcaagattacttctttcttcagtgacaaaagtgttgttgctggcagaccgagtagtcattaaacagataataacatcaagaaataaggttctcgcaactatggaaagactagagaaagtgaatagctttcaagagtttgtccaaatattcagtcaatttggaaatgaaatggtggagtttgcacatctgagtggagatagacaaaatgatttgaaagatgaaaagaaaaaggcaaaaatggcagcagctagggcagttcttgaaaagtgtacaatgatgcttctcacagcttcaaagacatgtctgaggcatcctaactgcgaatcagcccataaaaacaaagaaggagtatttgaccgtatgaaagtggcattggataaggtcattgaaattgtgactgactgtaaaccgaatggagagactgacatttcatctatcagtatttttactggaattaaggaattcaagatgaatattgaagctcttcgggagaatctttattttcagtccaaagagaacctttctgtgacattggaagtcatcttggagcgtatggaggactttactgattctgcctacaccagccatgagcacagagaacgcatcttggaactgtcaactcaggcgagaatggaactgcagcagttaatttctgtgtggattcaagctcaaagcaagaaaacaaaaagcatcgctgaagaactggaactcagtattttgaaaatcagtcacagtcttaatgaacttaagaaagaacttcatagtacagcgacacagctggcagcagatctattaaaataccatgctgatcatgtggttctaaaagcattaaaacttactggagtagaaggaaatttagaagctttggctgaatatgcctgtaaactctctgaacagaaagagcagcttgttgagacctgtcgattgttacgacacatatctgggacagaacctctggaaataacctgtatacatgcagaggagacatttcaggtgactggccaacagataatttctgctgctgaaacattgacattgcatccatctagtaaaattgctaaagaaaacctagatgtattttgtgaagcttgggaatcccaaattagtgacatgtcaacactgctgagagaaatcaatgacgtgtttgaaggaagacgaggagagaagtatggctacctttcacttccaaagccaatgaagaataatgcaaacctgaaatcattaaagccagacaagcctgactctgaggagcaagccaagatagcaaagcttggacttaagctgggtttgctcacctctgacgctgactgcgaaattgagaagtgggaagatcaggagaatgagattgttcaatatggacggaacatgtccagtatggcctattctctgtatttatttactagaggagaggggccactgaaaacttcccaggatttaattcatcaactagaggtttttgctgcagagggtttaaagcttacttccagtgttcaagctttttcaaaacagctgaaagacgatgacaagcttatgcttctcctggaaataaacaagctaattcctctatgccaccagctccagacagtaactaagacttctttgcagaataaagtatttctaaaggttgacaagtgtattacgaagacaagatccatgatggctctcttagtccaacttctttcactttgttataaactgctgaagaagcttcagatggaaaataacggatgggtctcagttacaaataaggacactatggatagtaaaacttgagaagcttttggggtcagatctctggaacatcatgtgatgaagctgacatttttaaaaatcaaatgatcctttatcttttcagaaattcatcaattttataaagaaaacaatattgaaattttgctctattttctgatcatgaaactgattgtaaagctttttgacaactaataaatgtcttggtaattgcta

SEQ ID NO: 420898 - DNA, 2539 bp, Homo sapiens
ctcggttggcgcgagtgtcctgtcgccgccgcctcgggcgggtgggctgactggcggcaggctcgccgcggcgcggagtcccggctgcgggatagaccgagggccatggccgcctctcccggacccgccggcgttggcggcgccggagcagtctacggctccggctcttcgggcttcgccctcgactcgggactggagatcaaaactcgctcggtggagcagacgctactcccgctggtttctcagatcaccacgcttattaatcataaagataataccaaaaagtctgataaaactctgcaagcaattcagcgtgtaggacaagctgtcaacttggcagttggaagatttgttaaagtaggagaagctatagccaatgaaaactgggatttgaaagaagaaataaatattgcttgtattgaagctaaacaagcaggagaaacaattgcagcacttacagacataaccaacttgaaccatctggaatctgatgggcagatcacaatttttacagacaaaacaggagtgataaaggctgcaagattacttctttcttcagtgacaaaagtgttgttgctggcagaccgagtagtcattaaacagataataacatcaagaaataaggttctcgcaactatggaaagactagagaaagtgaatagctttcaagagtttgtccaaatattcagtcaatttggaaatgaaatggtggagtttgcacatctgagtggagatagacaaaatgatttgaaagatgaaaagaaaaaggcaaaaatggcagcagctagggcagttcttgaaaagtgtacaatgatgcttctcacagcttcaaagacatgtctgaggcatcctaactgcgaatcagcccataaaaacaaagaaggagtatttgaccgtatgaaagtggcattggataaggtcattgaaattgtgactgactgtaaaccgaatggagagactgacatttcatctatcagtatttttactggaattaaggaattcaagatgaatattgaagctcttcgggagaatctttattttcagtccaaagagaacctttctgtgacattggaagtcatcttggagcgtatggaggactttactgattctgcctacaccagccatgagcacagagaacgcatcttggaactgtcaactcaggcgagaatggaactgcagcagttaatttctgtgtggattcaagctcaaagcaagaaaacaaaaagcatcgctgaagaactggaactcagtattttgaaaatcagtcacagtcttaatgaacttaagaaagaacttcatagtacagcgacacagctggcagcagatctattaaaataccatgctgatcatgtggttctaaaagcattaaaacttactggagtagaaggaaatttagaagctttggctgaatatgcctgtaaactctctgaacagaaagagcagcttgttgagacctgtcgattgttacgacacatatctgggacagaacctctggaaataacctgtatacatgcagaggagacatttcaggtgactggccaacagataatttctgctgctgaaacattgacattgcatccatctagtaaaattgctaaagaaaacctagatgtattttgtgaagcttgggaatcccaaattagtgacatgtcaacactgctgagagaaatcaatgacgtgtttgaaggaagacgaggagagaagtatggctacctttcacttccaaagccaatgaagaataatgcaaacctgaaatcattaaagccagacaagcctgactctgaggagcaagccaagatagcaaagcttggacttaagctgggtttgctcacctctgacgctgactgcgaaattgagaagtgggaagatcaggagaatgagattgttcaatatggacggaacatgtccagtatggcctattctctgtatttatttactagaggagaggggccactgaaaacttcccaggatttaattcatcaactagaggtttttgctgcagagggtttaaagcttacttccagtgttcaagctttttcaaaacagctgaaagacgatgacaagcttatgcttctcctggaaataaacaagctaattcctctatgccaccagctccagacagtaactaagacttctttgcagaataaagtatttctaaaggttgacaagtgtattacgaagacaagatccatgatggctctcttagtccaacttctttcactttgttataaactgctgaagaagagtgaaaccagatactaattgtcttaactctttccagcttcagatggaaaataacggatgggtctcagttacaaataaggacactatggatagtaaaacttgagaagcttttggggtcagatctctggaacatcatgtgatgaagctgacatttttaaaaatcaaatgatcctttatcttttcagaaattcatcaattttataaagaaaacaatattgaaattttgctctattttctgatcatgaaactgattgtaaagctttttgacaactaataaatgtcttggtaattgcta

SEQ ID NO: 420899 - DNA, 953 bp, Homo sapiens
ggctggaggagtgccacaggatggctatttttctggcatgtgactgactttatgtacttgtaaacgtgttccacgtgcactgtgagaagctttactaatagctgcagccattctggaaagaatatggcatcaatcctggccagctgattctcctctttaccagaacaccattgagcttagtacagaagaataatgcaaacctgaaatcattaaagccagacaagcctgactctgaggagcaagccaagatagcaaagcttggacttaagctgggtttgctcacctctgacgctgactgcgaaattgagaagtgggaagatcaggagaatgagattgttcaatatggacggaacatgtccagtatggcctattctctgtatttatttactagaggagaggggccactgaaaacttcccaggatttaattcatcaactagaggtttttgctgcagagggtttaaagcttacttccagtgttcaagctttttcaaaacagctgaaagacgatgacaagcttatgcttctcctggaaataaacaagctaattcctctatgccaccagctccagacagtaactaagacttctttgcagaataaagtatttctaaaggttgacaagtgtattacgaagacaagatccatgatggctctcttagtccaacttctttcactttgttataaactgctgaagaagcttcagatggaaaataacggatgggtctcagttacaaataaggacactatggatagtaaaacttgagaagcttttggggtcagatctctggaacatcatgtgatgaagctgacatttttaaaaatcaaatgatcctttatcttttcagaaattcatcaattttataaagaaaacaatattgaaattttgctctattttctgatcatgaaactgattgtaaagctttttgacaactaataaatgtcttggtaattgcta

SEQ ID NO: 420900 - DNA, 851 bp, Homo sapiens
ctcggttggcgcgagtgtcctgtcgccgccgcctcgggcgggtgggctgactggcggcaggctcgccgcggcgcggagtcccggctgcgggatagaccgagggccatggccgcctctcccggacccgccggcgttggcggcgccggagcagtctacggctccggctcttcgggcttcgccctcgactcgggactggagatcaaaactcgctcggtggagcagacgctactcccgctggtttctcagatcaccacgcttattaatcataaagataataccaaaaagtctgataaaactctgcaagcaattcagcgtgtaggacaagctgtcaacttggcagttggaagatttgttaaagtaggagaagctatagccaatgaaaactgggatttgaaagaagaaataaatattgcttgtattgaagctaaacaagcaggagaaacaattgcagcacttacagacataaccaacttgaaccatctggaatctgatgggcagatcacaatttttacagacaaaacaggagtgataaaggctgcaagattacttctttcttcagtgacaaaagtgttgttgctggcagaccgagtagtcattaaacagataataacatcaagaaataaggtacttacctttctgatgttgctgtatttttgtctttctgtgttgttcaaagtgctttttatgactcttagtggtggattgcttggcttgtgtgtcgatgaagaatgcagctagctgtgggaattaatgtgcaatgcaggatacattgacacactgatcatctgtacgttgaatgcacttgtggccctgggttcctcccggggctatgcatgtctgagcgttgctta

SEQ ID NO: 420901 - DNA, 806 bp, Homo sapiens
ctcggttggcgcgagtgtcctgtcgccgccgcctcgggcgggtgggctgactggcggcaggctcgccgcggcgcggagtcccggctgcgggatagaccgagggccatggccgcctctcccggacccgccggcgttggcggcgccggagcagtctacggctccggctcttcgggcttcgccctcgactcgggactggagatcaaaactcgctcggtggagcagacgctactcccgctggtttctcagatcaccacgcttattaatcataaagataataccaaaaagtctgataaaactctgcaagcaattcagcgtgtaggacaagctgtcaacttggcagttggaagatttgttaaagtaggagaagctatagccaatgaaaactgggatttgaaagaagaaataaatattgcttgtattgaagctaaacaagcaggagaaacaattgcagcacttacagacataaccaacttgaaccatctggaatctgatgggcagatcacaatttttacagacaaaacaggagtgataaaggctgcaagattacttctttcttcagtgacaaaagtgttgttgctggcagaccgagtagtcattaaacagataataacatcaagaaataagagactaacaatatataacttaagacacagttaaatcagtggaaatgataattatccacaactacaaaatttctgtactcagagtccctaaatgttactgaataatctcaaaacttacagaacagatttaaactcttccagtccagaagttaatctctcagatgatggtcatgctccatgatc

SEQ ID NO: 420902 - DNA, 687 bp, Homo sapiens
aagtaaaatctggagaagaagatgaagaaattttgtttaaagagagagcccaactttatagatgggatcgggatgtcagtcagtggaaggagcgcggtgaaggagaaatccatgacgtgtttgaaggaagacgaggagagaagtatggctacctttcacttcctaagccaatgaagaataatgcaaacctgaaatcattaaaacttactggagtagaaggaaatttagaagctttggctgaatatgcctgtaaactctctgaacagaaagagcagcttgttgagacctgtcgattgttacgacacatatctgggacagaacctctggaaataacctgtatacatgcagaggagacatttcaggtgactggccaacagataatttctgctgctgaaacattgacattgcatccatctagtaaaattgctaaagaaaacctagatgtattttgtgaagcttgggaatcccaaattagtgacatgtcaacactgctgagagaaatcaatgacgtgtttgaaggaagacgaggaagtatggctacccttttcacttccaaacccaatgaagaataatgcaaacctggaaaccattaagccatcaacagtcatgagaattaagacctaatatctagtatatgctctcagtgagaatagaaatgtgtcctagactgtcctgggtcctctagtc

SEQ ID NO: 420903 - DNA, 338 bp, Homo sapiens
atagaaaaaattttttaagttatatgtgttatttgtaggagagaagtatggctacctttcacttccaaagccaatgaagaataatgcaaacctgaaatcattaaagccagacaagcctgactctgaggagcaagccaagatagcaaagcttggacttaagctgggtttgctcacctctgacgctgactgcgaaattgagaagtgggaagatcaggagaatgagattgttcaatatggacggaacatgtccagtatggcctattctctgtatttatttactaggtaaatgtagttgtatttttattttttaaatcagtataatgatatctggtgtaaag

SEQ ID NO: 420904 - DNA, 419 bp, Homo sapiens
ggctggaggagtgccacaggatggctatttttctggcatgtgactgactttatgtacttgtaaacgtgttccacgtgcactgtgagaagctttactaatagctgcagccattctggaaagaatatggcatcaatcctggccagctgattctcctctttaccagaacaccattgagcttagtacaggtatctcctatagtgttttcagtgctgaagaggtttgtgttttcattcttgtaaacatgggctatggctgagttttcattacttgtacttcttccatgtccctaggccagtgagttcatcatcatctgaaatggatatggttctagttttcttgaccaagggcctgagcccccttcctctttgtgtttgagatgctcgcagtttctaaatcgggctgttctaccagcattttgg

SEQ ID NO: 420905 - DNA, 2250 bp, Homo sapiens
ctcggttggcgcgagtgtcctgtcgccgccgcctcgggcgggtgggctgactggcggcaggctcgccgcggcgcggagtcccggctgcgggatagaccgagggccatggccgcctctcccggacccgccggcgttggcggcgccggagcagtctacggctccggctcttcgggcttcgccctcgactcgggactggagatcaaaactcgctcggtggagcagacgctactcccgctggtttctcagatcaccacgcttattaatcataaagataataccaaaaagtctgataaaactctgcaagcaattcagcgtgtaggacaagctgtcaacttggcagttggaagatttgttaaagtaggagaagctatagccaatgaaaactgggatttgaaagaagaaataaatattgcttgtattgaagctaaacaagcaggagaaacaattgcagcacttacagacataaccaacttgaaccatctggaatctgatgggcagatcacaatttttacagacaaaacaggagtgataaaggctgcaagattacttctttcttcagtgacaaaagtgttgttgctggcagaccgagtagtcattaaacagataataacatcaagaaataaggttctcgcaactatggaaagactagagaaagtgaatagctttcaagagtttgtccaaatattcagtcaatttggaaatgaaatggtggagtttgcacatctgagtggagatagacaaaatgatttgaaagatgaaaagaaaaaggcaaaaatggcagcagctagggcagttcttgaaaagtgtacaatgatgcttctcacagcttcaaagacatgtctgaggcatcctaactgcgaatcagcccataaaaacaaagaaggagtatttgaccgtatgaaagtggcattggataaggtcattgaaattgtgactgactgtaaaccgaatggagagactgacatttcatctatcagtatttttactggaattaaggaattcaagatgaatattgaagctcttcgggagaatctttattttcagtccaaagagaacctttctgtgacattggaagtcatcttggagcgtatggaggactttactgattctgcctacaccagccatgagcacagagaacgcatcttggaactgtcaactcaggcgagaatggaactgcagcagttaatttctgtgtggattcaagctcaaagcaagaaaacaaaaagcatcgctgaagaactggaactcagtattttgaaaatcagtcacagtcttaatgaacttaagaaagaaataatttctgctgctgaaacattgacattgcatccatctagtaaaattgctaaagaaaacctagatgtattttgtgaagcttgggaatcccaaattagtgacatgtcaacactgctgagagaaatcaatgacgtgtttgaaggaagacgaggagagaagtatggctacctttcacttccaaagccaatgaagaataatgcaaacctgaaatcattaaagccagacaagcctgactctgaggagcaagccaagatagcaaagcttggacttaagctgggtttgctcacctctgacgctgactgcgaaattgagaagtgggaagatcaggagaatgagattgttcaatatggacggaacatgtccagtatggcctattctctgtatttatttactagaggagaggggccactgaaaacttcccaggatttaattcatcaactagaggtttttgctgcagagggtttaaagcttacttccagtgttcaagctttttcaaaacagctgaaagacgatgacaagcttatgcttctcctggaaataaacaagctaattcctctatgccaccagctccagacagtaactaagacttctttgcagaataaagtatttctaaaggttgacaagtgtattacgaagacaagatccatgatggctctcttagtccaacttctttcactttgttataaactgctgaagaagcttcagatggaaaataacggatgggtctcagttacaaataaggacactatggatagtaaaacttgagaagcttttggggtcagatctctggaacatcatgtgatgaagctgacatttttaaaaatcaaatgatcctttatcttttcagaaattcatcaattttataaagaaaacaatattgaaattttgctctattttctgatcatgaaactgattgtaaagctttttgacaactaataaatgtcttggtaattgcta

SEQ ID NO: 420906 - DNA, 2440 bp, Homo sapiens
ctcggttggcgcgagtgtcctgtcgccgccgcctcgggcgggtgggctgactggcggcaggctcgccgcggcgcggagtcccggctgcgggatagaccgagggccatggccgcctctcccggacccgccggcgttggcggcgccggagcagtctacggctccggctcttcgggcttcgccctcgactcgggactggagatcaaaactcgctcggtggagcagacgctactcccgctggtttctcagatcaccacgcttattaatcataaagataataccaaaaagtctgataaaactctgcaagcaattcagcgtgtaggacaagctgtcaacttggcagttggaagatttgttaaagtaggagaagctatagccaatgaaaactgggatttgaaagaagaaataaatattgcttgtattgaagctaaacaagcaggagaaacaattgcagcacttacagacataaccaacttgaaccatctggaatctgatgggcagatcacaatttttacagacaaaacaggagtgataaaggctgcaagattacttctttcttcagtgacaaaagtgttgttgctggcagaccgagtagtcattaaacagataataacatcaagaaataaggttctcgcaactatggaaagactagagaaagtgaatagctttcaagagtttgtccaaatattcagtcaatttggaaatgaaatggtggagtttgcacatctgagtggagatagacaaaatgatttgaaagatgaaaagaaaaaggcaaaaatggcagcagctagggcagttcttgaaagcccataaaaacaaagaaggagtatttgaccgtatgaaagtggcattggataaggtcattgaaattgtgactgactgtaaaccgaatggagagactgacatttcatctatcagtatttttactggaattaaggaattcaagatgaatattgaagctcttcgggagaatctttattttcagtccaaagagaacctttctgtgacattggaagtcatcttggagcgtatggaggactttactgattctgcctacaccagccatgagcacagagaacgcatcttggaactgtcaactcaggcgagaatggaactgcagcagttaatttctgtgtggattcaagctcaaagcaagaaaacaaaaagcatcgctgaagaactggaactcagtattttgaaaatcagtcacagtcttaatgaacttaagaaagaacttcatagtacagcgacacagctggcagcagatctattaaaataccatgctgatcatgtggttctaaaagcattaaaacttactggagtagaaggaaatttagaagctttggctgaatatgcctgtaaactctctgaacagaaagagcagcttgttgagacctgtcgattgttacgacacatatctgggacagaacctctggaaataacctgtatacatgcagaggagacatttcaggtgactggccaacagataatttctgctgctgaaacattgacattgcatccatctagtaaaattgctaaagaaaacctagatgtattttgtgaagcttgggaatcccaaattagtgacatgtcaacactgctgagagaaatcaatgacgtgtttgaaggaagacgaggagagaagtatggctacctttcacttccaaagccaatgaagaataatgcaaacctgaaatcattaaagccagacaagcctgactctgaggagcaagccaagatagcaaagcttggacttaagctgggtttgctcacctctgacgctgactgcgaaattgagaagtgggaagatcaggagaatgagattgttcaatatggacggaacatgtccagtatggcctattctctgtatttatttactagaggagaggggccactgaaaacttcccaggatttaattcatcaactagaggtttttgctgcagagggtttaaagcttacttccagtgttcaagctttttcaaaacagctgaaagacgatgacaagcttatgcttctcctggaaataaacaagctaattcctctatgccaccagctccagacagtaactaagacttctttgcagaataaagtatttctaaaggttgacaagtgtattacgaagacaagatccatgatggctctcttagtccaacttctttcactttgttataaactgctgaagaagcttcagatggaaaataacggatgggtctcagttacaaataaggacactatggatagtaaaacttgagaagcttttggggtcagatctctggaacatcatgtgatgaagctgacatttttaaaaatcaaatgatcctttatcttttcagaaattcatcaattttataaagaaaacaatattgaaattttgctctattttctgatcatgaaactgattgtaaagctttttgacaactaataaatgtcttggtaattgcta

SEQ ID NO: 420907 - DNA, 2440 bp, Homo sapiens
ctcggttggcgcgagtgtcctgtcgccgccgcctcgggcgggtgggctgactggcggcaggctcgccgcggcgcggagtcccggctgcgggatagaccgagggccatggccgcctctcccggacccgccggcgttggcggcgccggagcagtctacggctccggctcttcgggcttcgccctcgactcgggactggagatcaaaactcgctcggtggagcagacgctactcccgctggtttctcagatcaccacgcttattaatcataaagataataccaaaaagtctgataaaactctgcaagcaattcagcgtgtaggacaagctgtcaacttggcagttggaagatttgttaaagtaggagaagctatagccaatgaaaactgggatttgaaagaagaaataaatattgcttgtattgaagctaaacaagcaggagaaacaattgcagcacttacagacataaccaacttgaaccatctggaatctgatgggcagatcacaatttttacagacaaaacaggagtgataaaggctgcaagattacttctttcttcagtgacaaaagtgttgttgctggcagaccgagtagtcattaaacagataataacatcaagaaataaggttctcgcaactatggaaagactagagaaagtgaatagctttcaagagtttgtccaaatattcagtcaatttggaaatgaaatggtggagtttgcacatctgagtggagatagacaaaatgatttgaaagatgaaaagaaaaaggcaaaaatggcagcagctagggcagttcttgaaaagtgtacaatgatgcttctcacagcttcaaagacatgtctgaggcatcctaactgcgaatcaaattgtgactgactgtaaaccgaatggagagactgacatttcatctatcagtatttttactggaattaaggaattcaagatgaatattgaagctcttcgggagaatctttattttcagtccaaagagaacctttctgtgacattggaagtcatcttggagcgtatggaggactttactgattctgcctacaccagccatgagcacagagaacgcatcttggaactgtcaactcaggcgagaatggaactgcagcagttaatttctgtgtggattcaagctcaaagcaagaaaacaaaaagcatcgctgaagaactggaactcagtattttgaaaatcagtcacagtcttaatgaacttaagaaagaacttcatagtacagcgacacagctggcagcagatctattaaaataccatgctgatcatgtggttctaaaagcattaaaacttactggagtagaaggaaatttagaagctttggctgaatatgcctgtaaactctctgaacagaaagagcagcttgttgagacctgtcgattgttacgacacatatctgggacagaacctctggaaataacctgtatacatgcagaggagacatttcaggtgactggccaacagataatttctgctgctgaaacattgacattgcatccatctagtaaaattgctaaagaaaacctagatgtattttgtgaagcttgggaatcccaaattagtgacatgtcaacactgctgagagaaatcaatgacgtgtttgaaggaagacgaggagagaagtatggctacctttcacttccaaagccaatgaagaataatgcaaacctgaaatcattaaagccagacaagcctgactctgaggagcaagccaagatagcaaagcttggacttaagctgggtttgctcacctctgacgctgactgcgaaattgagaagtgggaagatcaggagaatgagattgttcaatatggacggaacatgtccagtatggcctattctctgtatttatttactagaggagaggggccactgaaaacttcccaggatttaattcatcaactagaggtttttgctgcagagggtttaaagcttacttccagtgttcaagctttttcaaaacagctgaaagacgatgacaagcttatgcttctcctggaaataaacaagctaattcctctatgccaccagctccagacagtaactaagacttctttgcagaataaagtatttctaaaggttgacaagtgtattacgaagacaagatccatgatggctctcttagtccaacttctttcactttgttataaactgctgaagaagcttcagatggaaaataacggatgggtctcagttacaaataaggacactatggatagtaaaacttgagaagcttttggggtcagatctctggaacatcatgtgatgaagctgacatttttaaaaatcaaatgatcctttatcttttcagaaattcatcaattttataaagaaaacaatattgaaattttgctctattttctgatcatgaaactgattgtaaagctttttgacaactaataaatgtcttggtaattgcta

SEQ ID NO: 420908 - DNA, 2448 bp, Homo sapiens
ctcggttggcgcgagtgtcctgtcgccgccgcctcgggcgggtgggctgactggcggcaggctcgccgcggcgcggagtcccggctgcgggatagaccgagggccatggccgcctctcccggacccgccggcgttggcggcgccggagcagtctacggctccggctcttcgggcttcgccctcgactcgggactggagatcaaaactcgctcggtggagcagacgctactcccgctggtttctcagatcaccacgcttattaatcataaagataataccaaaaagtctgataaaactctgcaagcaattcagcgtgtaggacaagctgtcaacttggcagttggaagatttgttaaagtaggagaagctatagccaatgaaaactgggatttgaaagaagaaataaatattgcttgtattgaagctaaacaagcaggagaaacaattgcagcacttacagacataaccaacttgaaccatctggaatctgatgggcagatcacaatttttacagacaaaacaggagtgataaaggctgcaagattacttctttcttcagtgacaaaagtgttgttgctggcagaccgagtagtcattaaacagataataacatcaagaaataaggttctcgcaactatggaaagactagagaaagtgaatagctttcaagagtttgtccaaatattcagtcaatttggaaatgaaatggtggagtttgcacatctgagtggagatagacaaaatgatttgaaagatgaaaagaaaaaggcaaaaatggcagcagctagggcagttcttgaaaagtgtacaatgatgcttctcacagcttcaaagacatgtctgaggcatcctaactgcgaatcagcccataaaaacaaagaaggagtatttgaccgtatgaaagtggcattggataaggtcattgaaattgtgactgactgtaaaccgaatggagagactgacatttcatctatcagtatttttactggaattaaggaattcaagatgaatattgaagctcttcgggagaatctttattttcagtccaaagagaacctttctgtgacattggaagtcatcttggagcgtatggaggactttactgattctgcctacaccagccatgagcacagagaacgcatcttggaactgtcaactcaggcgagaatggaactgcagcagttaatttctgtgtggattcaagctcaaagcaagaaaacaaaaagcatcgctgaagaactggaactcagtattttgaaaatcagtcacagtcttaatgaacttaagaaagaacttcatagtacagcgacacagctggcagcagatctattaaaataccatgctgatcatgtggttctaaaagcattaatctctgaacagaaagagcagcttgttgagacctgtcgattgttacgacacatatctgggacagaacctctggaaataacctgtatacatgcagaggagacatttcaggtgactggccaacagataatttctgctgctgaaacattgacattgcatccatctagtaaaattgctaaagaaaacctagatgtattttgtgaagcttgggaatcccaaattagtgacatgtcaacactgctgagagaaatcaatgacgtgtttgaaggaagacgaggagagaagtatggctacctttcacttccaaagccaatgaagaataatgcaaacctgaaatcattaaagccagacaagcctgactctgaggagcaagccaagatagcaaagcttggacttaagctgggtttgctcacctctgacgctgactgcgaaattgagaagtgggaagatcaggagaatgagattgttcaatatggacggaacatgtccagtatggcctattctctgtatttatttactagaggagaggggccactgaaaacttcccaggatttaattcatcaactagaggtttttgctgcagagggtttaaagcttacttccagtgttcaagctttttcaaaacagctgaaagacgatgacaagcttatgcttctcctggaaataaacaagctaattcctctatgccaccagctccagacagtaactaagacttctttgcagaataaagtatttctaaaggttgacaagtgtattacgaagacaagatccatgatggctctcttagtccaacttctttcactttgttataaactgctgaagaagcttcagatggaaaataacggatgggtctcagttacaaataaggacactatggatagtaaaacttgagaagcttttggggtcagatctctggaacatcatgtgatgaagctgacatttttaaaaatcaaatgatcctttatcttttcagaaattcatcaattttataaagaaaacaatattgaaattttgctctattttctgatcatgaaactgattgtaaagctttttgacaactaataaatgtcttggtaattgcta

SEQ ID NO: 420909 - DNA, 2442 bp, Homo sapiens
ctcggttggcgcgagtgtcctgtcgccgccgcctcgggcgggtgggctgactggcggcaggctcgccgcggcgcggagtcccggctgcgggatagaccgagggccatggccgcctctcccggacccgccggcgttggcggcgccggagcagtctacggctccggctcttcgggcttcgccctcgactcgggactggagatcaaaactcgctcggtggagcagacgctactcccgctggtttctcagatcaccacgcttattaatcataaagataataccaaaaagtctgataaaactctgcaagcaattcagcgtgtaggacaagctgtcaacttggcagttggaagatttgttaaagtaggagaagctatagccaatgaaaactgggatttgaaagaagaaataaatattgcttgtattgaagctaaacaagcaggagaaacaattgcagcacttacagacataaccaacttgaaccatctggaatctgatgggcagatcacaatttttacagacaaaacaggagtgataaaggctgcaagattacttctttcttcagtgacaaaagtgttgttgctggcagaccgagtagtcattaaacagataataacatcaagaaataaggttctcgcaactatggaaagactagagaaagtgaatagctttcaagagtttgtccaaatattcagtcaatttggaaatgaaatggtggagtttgcacatctgagtggagatagacaaaatgatttgaaagatgaaaagaaaaaggcaaaaatggcagcagctagggcagttcttgaaaagtgtacaatgatgcttctcacagcttcaaagacatgtctgaggcatcctaactgcgaatcagcccataaaaacaaagaaggagtatttgaccgtatgaaagtggcattggataaggtcattgaaattgtgactgactgtaaaccgaatggagagactgacatttcatctatcagtatttttactggaattaaggaattcaagatgaatattgaagctcttcgggagaatctttattttcagtccaaagagaacctttctgtgacattggaagtcatcttggagcgtatggaggactttactgattctgcctacaccagccatgagcacagagaacgcatcttggaactgtcaactcaggcgagaatggaactgcagcagttaatttctgtgtggattcaagctcaaagcaagaaaacaaaaagcatcgctgaagaactggaactcagtattttgaaaatcagtcacagtcttaatgaacttaagaaagaacttcatagtacagcgacacagctggcagcagatctattaaaataccatgctgatcatgtggttctaaaagcattaaaacttactggagtagaaggaaatttagaagctttggctgaatatgcctgtaaactctctgaacagaaagagcagcttgttgagacctgtcgattgttacgacacatatctgggacagaacctctggaaataacctgtatacatgcagaggagacatttcaggtgactggccaacagataatttctgctgctgaaacattgacattgcatccatctagtatgtcaacactgctgagagaaatcaatgacgtgtttgaaggaagacgaggagagaagtatggctacctttcacttccaaagccaatgaagaataatgcaaacctgaaatcattaaagccagacaagcctgactctgaggagcaagccaagatagcaaagcttggacttaagctgggtttgctcacctctgacgctgactgcgaaattgagaagtgggaagatcaggagaatgagattgttcaatatggacggaacatgtccagtatggcctattctctgtatttatttactagaggagaggggccactgaaaacttcccaggatttaattcatcaactagaggtttttgctgcagagggtttaaagcttacttccagtgttcaagctttttcaaaacagctgaaagacgatgacaagcttatgcttctcctggaaataaacaagctaattcctctatgccaccagctccagacagtaactaagacttctttgcagaataaagtatttctaaaggttgacaagtgtattacgaagacaagatccatgatggctctcttagtccaacttctttcactttgttataaactgctgaagaagcttcagatggaaaataacggatgggtctcagttacaaataaggacactatggatagtaaaacttgagaagcttttggggtcagatctctggaacatcatgtgatgaagctgacatttttaaaaatcaaatgatcctttatcttttcagaaattcatcaattttataaagaaaacaatattgaaattttgctctattttctgatcatgaaactgattgtaaagctttttgacaactaataaatgtcttggtaattgcta

SEQ ID NO: 420910 - DNA, 1668 bp, Homo sapiens
ttaatttttaactaggttaggagtgaaagcatggacattctaggcagaaaataaaagagattaattttagacttgagtttattaaagaaaattagattttaaaagttcacctttcaatataatccataggttcacagaaaaataaataaataaaaaaacagaagttcatctatttgtagttagcattgaaaaatataactaaactgaaattttattttccactgtaacttaaacaggtaaattttgaaaatctacttttatagttcacagaatagtattaaaatttattacaatttacagtccaaacaaaattgtaattaacagattaaagagatgcggtaacattacatgtatactttttaaaatttttagcaaagcaagaaaacaaaaagcatcgctgaagaactggaactcagtattttgaaaatcagtcacagtcttaatgaacttaagaaagaacttcatagtacagcgacacagctggcagcagatctattaaaataccatgctgatcatgtggttctaaaagcattaaaacttactggagtagaaggaaatttagaagctttggctgaatatgcctgtaaactctctgaacagaaagagcagcttgttgagacctgtcgattgttacgacacatatctgggacagaacctctggaaataacctgtatacatgcagaggagacatttcaggtgactggccaacagataatttctgctgctgaaacattgacattgcatccatctagtaaaattgctaaagaaaacctagatgtattttgtgaagcttgggaatcccaaattagtgacatgtcaacactgctgagagaaatcaatgacgtgtttgaaggaagacgaggagagaagtatggctacctttcacttccaaagccaatgaagaataatgcaaacctgaaatcattaaagccagacaagcctgactctgaggagcaagccaagatagcaaagcttggacttaagctgggtttgctcacctctgacgctgactgcgaaattgagaagtgggaagatcaggagaatgagattgttcaatatggacggaacatgtccagtatggcctattctctgtatttatttactagaggagaggggccactgaaaacttcccaggatttaattcatcaactagaggtttttgctgcagagggtttaaagcttacttccagtgttcaagctttttcaaaacagctgaaagacgatgacaagcttatgcttctcctggaaataaacaagctaattcctctatgccaccagctccagacagtaactaagacttctttgcagaataaagtatttctaaaggttgacaagtgtattacgaagacaagatccatgatggctctcttagtccaacttctttcactttgttataaactgctgaagaagcttcagatggaaaataacggatgggtctcagttacaaataaggacactatggatagtaaaacttgagaagcttttggggtcagatctctggaacatcatgtgatgaagctgacatttttaaaaatcaaatgatcctttatcttttcagaaattcatcaattttataaagaaaacaatattgaaattttgctctattttctgatcatgaaactgattgtaaagctttttgacaactaataaatgtcttggtaattgcta

SEQ ID NO: 420911 - DNA, 2729 bp, Homo sapiens
ctcggttggcgcgagtgtcctgtcgccgccgcctcgggcgggtgggctgactggcggcaggctcgccgcggcgcggagtcccggctgcgggatagaccgagggccatggccgcctctcccggacccgccggcgttggcggcgccggagcagtctacggctccggctcttcgggcttcgccctcgactcgggactggagatcaaaactcgctcggtggagcagacgctactcccgctggtttctcagatcaccacgcttattaatcataaagataataccaaaaagtctgataaaactctgcaagcaattcagcgtgtaggacaagctgtcaacttggcagttggaagatttgttaaagtaggagaagctatagccaatgaaaactgggatttgaaagaagaaataaatattgcttgtattgaagctaaacaagcaggagaaacaattgcagcacttacagacataaccaacttgaaccatctggaatctgatgggcagatcacaatttttacagacaaaacaggagtgataaaggctgcaagattacttctttcttcagtgacaaaagtgttgttgctggcagaccgagtagtcattaaacagataataacatcaagaaataaggttctcgcaactatggaaagactagagaaagtgaatagctttcaagagtttgtccaaatattcagtcaatttggaaatgaaatggtggagtttgcacatctgagtggagatagacaaaatgatttgaaagatgaaaagaaaaaggcaaaaatggcagcagctagggcagttcttgaaaagtgtacaatgatgcttctcacagcttcaaagacatgtctgaggcatcctaactgcgaatcagcccataaaaacaaagaaggagtatttgaccgtatgaaagtggcattggataaggtcattgaaattgtgactgactgtaaaccgaatggagagactgacatttcatctatcagtatttttactggaattaaggaattcaagatgaatattgaagctcttcgggagaatctttattttcagtccaaagagaacctttctgtgacattggaagtcatcttggagcgtatggaggactttactgattctgcctacaccagccatgagcacagagaacgcatcttggaactgtcaactcaggcgagaatggaactgcagcagttaatttctgtgtggattcaagctcaaagcaagaaaacaaaaagcatcgctgaagaactggaactcagtattttgaaaatcagtcacagtcttaatgaacttaagaaagaacttcatagtacagcgacacagctggcagcagatctattaaaataccatgctgatcatgtggttctaaaagcattaaaacttactggagtagaaggaaatttagaagctttggctgaatatgcctgtaaactctctgaacagaaagagcagcttgttgagacctgtcgattgttacgacacatatctgggacagaacctctggaaataacctgtatacatgcagaggagacatttcaggtgactggccaacagataatttctgctgctgaaacattgacattgcatccatctagtaaaattgctaaagaaaacctagatgtattttgtgaagcttgggaatcccaaattagtgacatgtcaacactgctgagagaaatcaatgacgtgtttgaaggaagacgaggagagaagtatggctacctttcacttccaaagccaatgaagaataatgcaaacctgaaatcattaaagccagacaagcctgactctgaggagcaagccaagatagcaaagcttggacttaagctgggtttgctcacctctgacgctgactgcgaaattgagaagtgggaagatcaggagaatgagattgttcaatatggacggaacatgtccagtatggcctattctctgtatttatttactagaggagaggggccactgaaaacttcccaggatttaattcatcaactagaggtttttgctgcagagggtttaaagcttacttccagtgttcaagctttttcaaaacagctgaaagacgatgacaagcttatgcttctcctggaaataaacaagctaattcctctatgccaccagctccagacagtaactaagacttctttgcagaataaagtatttctaaaggttgacaagtgtattacgaagacaagatccatgatggctctcttagtccaacttctttcactttgttataaactgctgaagaagcttcagatggaaaataacggatgggtctcagttacaaataaggacactatggatagtaaaacttgagaagcttttggggtcagatctctggaacatcatgtgatgaagctgacatttttaaaaatcaaatgatcctttatcttttcagaaattcatcaattttataaagaaaacaatattgaaattttgctctattttctgatcatgaaactgattgtaaagctttttgacaactaataaatgtcttggtaattgctaaaaaaaaaaaaaaaaaaaaaaaacaataaaaataaataaaaatataaacataaataaaatcataaaaatatatataatataccatactttattttctctttctttacatttttcactcctctcccctatattttttatttatttactctccttcattatcctttactaccttacttattatcttatatcttaaatgtcttttttttcttatatattcttattaaccg

SEQ ID NO: 420912 - DNA, 2628 bp, Homo sapiens
ctcggttggcgcgagtgtcctgtcgccgccgcctcgggcgggtgggctgactggcggcaggctcgccgcggcgcggagtcccggctgcgggatagaccgagggccatggccgcctctcccggacccgccggcgttggcggcgccggagcagtctacggctccggctcttcgggcttcgccctcgactcgggactggagatcaaaactcgctcggtggagcagacgctactcccgctggtttctcagatcaccacgcttattaatcataaagataataccaaaaagtctgataaaactctgcaagcaattcagcgtgtaggacaagctgtcaacttggcagttggaagatttgttaaagtaggagaagctatagccaatgaaaactgggatttgaaagaagaaataaatattgcttgtattgaagctaaacaagcaggagaaacaattgcagcacttacagacataaccaacttgaaccatctggaatctgatgggcagatcacaatttttacagacaaaacaggagtgataaaggctgcaagattacttctttcttcagtgacaaaagtgttgttgctggcagaccgagtagtcattaaacagataataacatcaagaaataaggttctcgcaactatggaaagactagagaaagtgaatagctttcaagagtttgtccaaatattcagtcaatttggaaatgaaatggtggagtttgcacatctgagtggagatagacaaaatgatttgaaagatgaaaagaaaaaggcaaaaatggcagcagctagggcagttcttgaaaagtgtacaatgatgcttctcacagcttcaaagacatgtctgaggcatcctaactgcgaatcagcccataaaaacaaagaaggagtatttgaccgtatgaaagtggcattggataaggtcattgaaattgtgactgactgtaaaccgaatggagagactgacatttcatctatcagtatttttactggaattaaggaattcaagatgaatattgaagctcttcgggagaatctttattttcagtccaaagagaacctttctgtgacattggaagtcatcttggagcgtatggaggactttactgattctgcctacaccagccatgagcacagagaacgcatcttggaactgtcaactcaggcgagaatggaactgcagcagttaatttctgtgtggattcaagctcaaagcaagaaaacaaaaagcatcgctgaagaactggaactcagtattttgaaaatcagtcacagtcttaatgaacttaagaaagaacttcatagtacagcgacacagctggcagcagatctattaaaataccatgctgatcatgtggttctaaaagcattaaaacttactggagtagaaggaaatttagaagctttggctgaatatgcctgtaaactctctgaacagaaagagcagcttgttgagacctgtcgattgttacgacacatatctgggacagaacctctggaaataacctgtatacatgcagaggagacatttcaggtgactggccaacagataatttctgctgctgaaacattgacattgcatccatctagtaaaattgctaaagaaaacctagatgtattttgtgaagcttgggaatcccaaattagtgacatgtcaacactgctgagagaaatcaatgacgtgtttgaaggaagacgaggagagaagtatggctacctttcacttccaaagccaatgaagaataatgcaaacctgaaatcattaaagccagacaagcctgactctgaggagcaagccaagatagcaaagcttggacttaagctgggtttgctcacctctgacgctgactgcgaaattgagaagtgggaagatcaggagaatgagattgttcaatatggacggaacatgtccagtatggcctattctctgtatttatttactagaggagaggggccactgaaaacttcccaggatttaattcatcaactagaggtttttgctgcagagggtttaaagcttacttccagtgttcaagctttttcaaaacagctgaaagacgatgacaagcttatgcttctcctggaaataaacaagctaattcctctatgccaccagctccagacagtaactaagacttctttgcagaataaagtatttctaaaggttgacaagtgtattacgaagacaagatccatgatggctctcttagtccaacttctttcactttgttataaactgctgaagaaggtgaggtagtttttctattttagactcatactttaaaaaatggtttaaaagaaaatagttactacttaattttgtaatttttttttcagagtgaaaccagatactaattgtcttaactctttccagcttcagatggaaaataacggatgggtctcagttacaaataaggacactatggatagtaaaacttgagaagcttttggggtcagatctctggaacatcatgtgatgaagctgacatttttaaaaatcaaatgatcctttatcttttcagaaattcatcaattttataaagaaaacaatattgaaattttgctctattttctgatcatgaaactgattgtaaagctttttgacaactaataaatgtcttggtaattgcta

SEQ ID NO: 420913 - DNA, 2342 bp, Homo sapiens
ctcggttggcgcgagtgtcctgtcgccgccgcctcgggcgggtgggctgactggcggcaggctcgccgcggcgcggagtcccggctgcgggatagaccgagggccatggccgcctctcccggacccgccggcgttggcggcgccggagcagtctacggctccggctcttcgggcttcgccctcgactcgggactggagatcaaaactcgctcggtggagcagacgctactcccgctggtttctcagatcaccacgcttattaatcataaagataataccaaaaagtctgataaaactctgcaagcaattcagcgtgtaggacaagctgtcaacttggcagttggaagatttgttaaagtaggagaagctatagccaatgaaaactgggatttgaaagaagaaataaatattgcttgtattgaagctaaacaagcaggagaaacaattgcagcacttacagacataaccaacttgaaccatctggaatctgatgggcagatcacaatttttacagacaaaacaggagtgataaaggctgcaagattacttctttcttcagtgacaaaagtgttgttgctggcagaccgagtagtcattaaacagataataacatcaagaaataaggttctcgcaactatggaaagactagagaaagtgaatagctttcaagagtttgtccaaatattcagtcaatttggaaatgaaatggtggagtttgcacatctgagtggagatagacaaaatgatttgaaagatgaaaagaaaaaggcaaaaatggcagcagctagggcagttcttgaaaagtgtacaatgatgcttctcacagcttcaaagacatgtctgaggcatcctaactgcgaatcagcccataaaaacaaagaaggagtatttgaccgtatgaaagtggcattggataaggtcattgaaattgtgactgactgtaaaccgaatggagagactgacatttcatctatcagtatttttactggaattaaggaattcaagatgaatattgaagctcttcgggagaatctttattttcagtccaaagagaacctttctgtgacattggaagtcatcttggagcgtatggaggactttactgattctgcctacaccagccatgagcacagagaacgcatcttggaactgtcaactcaggcgagaatggaactgcagcagttaatttctgtgtggattcaagctcaaagcaagaaaacaaaaagcatcgctgaagaactggaactcagtattttgaaaatcagtcacagtcttaatgaacttaagaaagaacttcatagtacagcgacacagctggcagcagatctattaaaataccatgctgatcatgtggttctaaaagcattaaaacttactggagtagaaggaaatttagaagctttggctgaatatgcctgtaaactctctgaacagaaagagcagcttgttgagacctgtcgattgttacgacacatatctgggacagaacctctggaaataacctgtatacatgcagaggagacatttcaggtgactggccaacagataatttctgctgctgaaacattgacattgcatccatctagtaaaattgctaaagaaaacctagatgtattttgtgaagcttgggaatcccaaattagtgacatgtcaacactgctgagagaaatcaatgacgtgtttgaaggaagacgaggagagaagtatggctacctttcacttccaaagccaatgaagaataatgcaaacctgaaatcattaaagccagacaagcctgactctgaggagcaagccaagatagcaaagcttggacttaagctgggtttgctcacctctgacgctgactgcgaaattgagaagtgggaagatcaggagaatgagattgttcaatatggacggaacatgtccagtatggcctattctctgtatttatttactagaggagaggggccactgaaaacttcccaggatttaattcatcaactagaggtttttgctgcagagggtttaaagcttacttccagtgttcaagctttttcaaaacagctgaaagacgatgacaagcttatgcttctcctggaaataaacaagctaattcctctatgccaccagctccagacagtaactaagacttctttgcagaataaagtatttctaaagttgcagtgtttcgagacaagatcctgagggtctctatcactcttcacttggttaactgctgagaagagtggaccggttcaatgtttactcttcagtcgaggaaaacggggtctgcaaaggacctgtgtaacgcaactgggcgccttccacgggaggttaaaagcgctttacattaaaagtgt

SEQ ID NO: 420914 - DNA, 1334 bp, Homo sapiens
aagtaaaatctggagaagaagatgaagaaattttgtttaaagagagagcccaactttatagatgggatcgggatgtcagtcagtggaaggagcgcggtgaaggagaaatccatgacgtgtttgaaggaagacgaggagagaagtatggctacctttcacttcctaagccaatgaagaataatgcaaacctgaaatcattaaaacttactggagtagaaggaaatttagaagctttggctgaatatgcctgtaaactctctgaacagaaagagcagcttgttgagacctgtcgattgttacgacacatatctgggacagaacctctggaaataacctgtatacatgcagaggagacatttcaggtgactggccaacagataatttctgctgctgaaacattgacattgcatccatctagtaaaattgctaaagaaaacctagatgtattttgtgaagcttgggaatcccaaattagtgacatgtcaacactgctgagagaaatcaatgacgtgtttgaaggaagacgaggagagaagtatggctacctttcacttccaaagccaatgaagaataatgcaaacctgaaatcattaaagccagacaagcctgactctgaggagcaagccaagatagcaaagcttggacttaagctgggtttgctcacctctgacgctgactgcgaaattgagaagtgggaagatcaggagaatgagattgttcaatatggacggaacatgtccagtatggcctattctctgtatttatttactagaggagaggggccactgaaaacttcccaggatttaattcatcaactagaggtttttgctgcagagggtttaaagcttacttccagtgttcaagctttttcaaaacagctgaaagacgatgacaagcttatgcttctcctggaaataaacaagctaattcctctatgccaccagctccagacagtaactaagacttctttgcagaataaagtatttctaaaggttgacaagtgtattacgaagacaagatccatgatggctctcttagtccaacttctttcactttgttataaactgctgaagaagcttcagatggaaaataacggatgggtctcagttacaaataaggacactatggatagtaaaacttgagaagcttttggggtcagatctctggaacatcatgtgatgaagctgacatttttaaaaatcaaatgatcctttatcttttcagaaattcatcaattttataaagaaaacaatattgaaattttgctctattttctgatcatgaaactgattgtaaagctttttgacaactaataaatgtcttggtaattgcta

SEQ ID NO: 420915 - DNA, 1110 bp, Homo sapiens
ttaggagcacgttgtcgatacctatctatagttgggcaaaatttttgccaaagaaactctggacatgaaccatgtgtccctatgacttgcagcgtaccacattatcaaagcggcaccgggggcaaacagcgataacgtttctgctgcctgtccacgtatgaccacttgtcgatccattctatgtaggaactcctactcaagcaagaaggcttaaagtcgtagctcgagaatccttgggaatcccaaattagtgacatgtcaacactgctgagagaaatcaatgacgtgtttgaaggaagacgaggagagaagtatggctacctttcacttccaaagccaatgaagaataatgcaaacctgaaatcattaaagccagacaagcctgactctgaggagcaagccaagatagcaaagcttggacttaagctgggtttgctcacctctgacgctgactgcgaaattgagaagtgggaagatcaggagaatgagattgttcaatatggacggaacatgtccagtatggcctattctctgtatttatttactagaggagaggggccactgaaaacttcccaggatttaattcatcaactagaggtttttgctgcagagggtttaaagcttacttccagtgttcaagctttttcaaaacagctgaaagacgatgacaagcttatgcttctcctggaaataaacaagctaattcctctatgccaccagctccagacagtaactaagacttctttgcagaataaagtatttctaaaggttgacaagtgtattacgaagacaagatccatgatggctctcttagtccaacttctttcactttgttataaactgctgaagaagcttcagatggaaaataacggatgggtctcagttacaaataaggacactatggatagtaaaacttgagaagcttttggggtcagatctctggaacatcatgtgatgaagctgacatttttaaaaatcaaatgatcctttatcttttcagaaattcatcaattttataaagaaaacaatattgaaattttgctctattttctgatcatgaaactgattgtaaagctttttgacaactaataaatgtcttggtaattgcta

SEQ ID NO: 420916 - DNA, 1892 bp, Homo sapiens
ctcggttggcgcgagtgtcctgtcgccgccgcctcgggcgggtgggctgactggcggcaggctcgccgcggcgcggagtcccggctgcgggatagaccgagggccatggccgcctctcccggacccgccggcgttggcggcgccggagcagtctacggctccggctcttcgggcttcgccctcgactcgggactggagatcaaaactcgctcggtggagcagacgctactcccgctggtttctcagatcaccacgcttattaatcataaagataataccaaaaagtctgataaaactctgcaagcaattcagcgtgtaggacaagctgtcaacttggcagttggaagatttgttaaagtaggagaagctatagccaatgaaaactgggatttgaaagaagaaataaatattgcttgtattgaagctaaacaagcaggagaaacaattgcagcacttacagacataaccaacttgaaccatctggaatctgatgggcagatcacaatttttacagacaaaacaggagtgataaaggctgcaagattacttctttcttcagtgacaaaagtgttgttgctggcagaccgagtagtcattaaacagataataacatcaagaaataaggttctcgcaactatggaaagactagagaaagtgaatagctttcaagagtttgtccaaatattcagtcaatttggaaatgaaatggtggagtttgcacatctgagtggagatagacaaaatgatttgaaagatgaaaagaaaaaggcaaaaatggcagcagctagggcagttcttgaaaagtgtacaatgatgcttctcacagcttcaaagacatgtctgaggcatcctaactgcgaatcagcccataaaaacaaagaaggagtatttgaccgtatgaaagtggcattggataaggtcattgaaattgtgactgactgtaaaccgaatggagagactgacatttcatctatcagtatttttactggaattaaggaattcaagatgaatattgaagctcttcgggagaatctttattttcagtccaaagagaacctttctgtgacattggaagtcatcttggagcgtatggaggactttactgattctgcctacaccagccatgagcacagagaacgcatcttggaactgtcaactcaggcgagaatggaactgcagcagttaatttctgtgtggattcaagctcaaagcaagaaaacaaaaagcatcgctgaagaactggaactcagtattttgaaaatcagtcacagtcttaatgaacttaagaaagaacttcatagtacagcgacacagctggcagcagatctattaaaataccatgctgatcatgtggttctaaaagcattaaaacttactggagtagaaggaaatttagaagctttggctgaatatgcctgtaaactctctgaacagaaagagcagcttgttgagacctgtcgattgttacgacacatatctgggacagaacctctggaaataacctgtatacatgcagaggagacatttcaggtgactggccaacagataatttctgctgctgaaacattgacattgcatccatctagtaaaattgctaaagaaaacctagatgtattttgtgaagcttgggaatcccaaattagtgacatgtcaacactgctgagagaaatcaatgacgtgtttgaaggaagacgagaatagtgccatacaatgtataggaaggcatcatttttattctttattttaataccgagtggaagttttgtttattttccattgtactgtgtgtcctgttatttatatttacatgtttatattttttctcttcaaatggcttctgtagtgtcaaagcttgcttatttttttaaataaaatgtcatttacaattatat

SEQ ID NO: 420917 - DNA, 1833 bp, Homo sapiens
ctcggttggcgcgagtgtcctgtcgccgccgcctcgggcgggtgggctgactggcggcaggctcgccgcggcgcggagtcccggctgcgggatagaccgagggccatggccgcctctcccggacccgccggcgttggcggcgccggagcagtctacggctccggctcttcgggcttcgccctcgactcgggactggagatcaaaactcgctcggtggagcagacgctactcccgctggtttctcagatcaccacgcttattaatcataaagataataccaaaaagtctgataaaactctgcaagcaattcagcgtgtaggacaagctgtcaacttggcagttggaagatttgttaaagtaggagaagctatagccaatgaaaactgggatttgaaagaagaaataaatattgcttgtattgaagctaaacaagcaggagaaacaattgcagcacttacagacataaccaacttgaaccatctggaatctgatgggcagatcacaatttttacagacaaaacaggagtgataaaggctgcaagattacttctttcttcagtgacaaaagtgttgttgctggcagaccgagtagtcattaaacagataataacatcaagaaataaggttctcgcaactatggaaagactagagaaagtgaatagctttcaagagtttgtccaaatattcagtcaatttggaaatgaaatggtggagtttgcacatctgagtggagatagacaaaatgatttgaaagatgaaaagaaaaaggcaaaaatggcagcagctagggcagttcttgaaaagtgtacaatgatgcttctcacagcttcaaagacatgtctgaggcatcctaactgcgaatcagcccataaaaacaaagaaggagtatttgaccgtatgaaagtggcattggataaggtcattgaaattgtgactgactgtaaaccgaatggagagactgacatttcatctatcagtatttttactggaattaaggaattcaagatgaatattgaagctcttcgggagaatctttattttcagtccaaagagaacctttctgtgacattggaagtcatcttggagcgtatggaggactttactgattctgcctacaccagccatgagcacagagaacgcatcttggaactgtcaactcaggcgagaatggaactgcagcagttaatttctgtgtggattcaagctcaaagcaagaaaacaaaaagcatcgctgaagaactggaactcagtattttgaaaatcagtcacagtcttaatgaacttaagaaagaacttcatagtacagcgacacagctggcagcagatctattaaaataccatgctgatcatgtggttctaaaagcattaaaacttactggagtagaaggaaatttagaagctttggctgaatatgcctgtaaactctctgaacagaaagagcagcttgttgagacctgtcgattgttacgacacatatctgggacagaacctctggaaataacctgtatacatgcagaggagacatttcaggtgactggccaacagataatttctgctgctgaaacattgacattgcatccatctagtaaaattgctaaagaaaacctagatgtattttgtgaagcttgggaatcccaaattagtgacatgtcaacactgctgagagaaatcaatgacgtgtttgaaggaagacgaggtgagaaactgtccacataatgaaatatgttattattttaatgtaactcttgttagttttttaatgccaaacctcaactgcaaatgaattcttgtcgtaacccagctgggttatttttgtagtaaaatattgttcac

SEQ ID NO: 420918 - DNA, 636 bp, Homo sapiens
gagtgaagagaattgctccctgaatgcaggtttgtatataataatgcatactatttgtctgcaggtcagattataagaaacagcaaattttgtcctactgtgcatcttcatattgcccaacatggagcttgtgtatagaaattacttcatagttgtttattgagttgaattgaacagcagacttacttacctttggtcttcaaagtgattctgagggctaagattttgaaattcacacaggtgtatattgtgtttctttagataatttctgctgctgaaacattgacattgcatccatctagtaaaattgctaaagaaaacctagatgtattttgtgaagcttgggaatcccaaattagtgacatgtcaacactgctgagagaaatcaatgacgtgtttgaaggaagacgaggtgagaaactgtccacataatgaaatatgttattattttaatgtaactcttgttagttttttaatgccaaacctcaactgcaaatgaattcttgtcgtaacccagctgggttatttttgtagtaaaatattgttcacaaaaaaattacaaaaatattattttatcctcctttattttagtatccaagcagtaaagtttgttgtacaacagtgtagtaggccagg

SEQ ID NO: 420919 - DNA, 393 bp, Homo sapiens
agttatatgtgttatttgtaggagagaagtatggctacctttcacttccaaagccaatggtaagtagaagaattatgtacattgcagaatgtttttattcagaattcaaattatgctcttgttgcctgttgctgctcccctctaccacaaataattgacatgacagaaaaaagttaggatattaatgttgacttcagagttgttattctgggtagcaatctagttgtggcttacactctgaatatttgttttaggtttgggggtttgagagaataggtaacataatttgtgattaataaaaagccatatcccagtaatagcatcataaaaataaataaataagccatatctgaagtcagaagttgttttgttcttccaatcttggatctactt

SEQ ID NO: 420920 - DNA, 379 bp, Homo sapiens
gttttgttgcgggctgttataacttgttaaattacatttcagctgaaagacgatgacaagcttatgcttctcctggaaataaacaagctaattcctctatgccaccagctccagacagtaactaagacttctttgcagaataaagtatttctaaaggtaaaagagacatatgaaaaactttcacacatctatctttatctggttaaagcccctttttcttcaaataaactgttagtacccacagaagggcaatttatttccttttttcatgccttgtctacaagaatcatttattatctactctcataactgaccccagagagtagcagattcaccaaataaagtagttttttggacatcattaattccatagcactga

SEQ ID NO: 420921 - DNA, 394 bp, Homo sapiens
gctgaagaaggtgaggtagtttttctattttagactcatactttaaaaaatggtttaaaagaaaatagttactacttaattttgtaatttttttttcagagtgaaaccagatactaattgtcttaactctttccagcttcagatggaaaataacggatgggtctcagttacaaataaggacactatggatagtaaaacttgagaagcttttggggtcagatctctggaacatcatgtgatgaagctgacatttttaaaaatcaaatgatcctttatcttttcagaaattcatcaattttataaagaaaacaatattgaaattttgctctattttctgatcatgaaactgattgtaaagctttttgacaactaataaatgtcttggtaattgcta

SEQ ID NO: 420922 - DNA, 12446 bp, Homo sapiens
atggcgccgccgccgccgcccgtgctgcccgtgctgctgctcctggccgccgccgccgccctgccggcgatggggctgcgagcggccgcctgggagccgcgcgtacccggcgggacccgcgccttcgccctccggcccggctgtacctacgcggtgggcgccgcttgcacgccccgggcgccgcgggagctgctggacgtgggccgcgatgggcggctggcaggacgtcggcgcgtctcgggcgcggggcgcccgctgccgctgcaagtccgcttggtggcccgcagtgccccgacggcgctgagccgccgcctgcgggcgcgcacgcaccttcccggctgcggagcccgtgcccggctctgcggaaccggtgcccggctctgcggggcgctctgcttccccgtccccggcggctgcgcggccgcgcagcattcggcgctcgcagctccgaccaccttacccgcctgccgctgcccgccgcgccccaggccccgctgtcccggccgtcccatctgcctgccgccgggcggctcggtccgcctgcgtctgctgtgcgccctgcggcgcgcggctggcgccgtccgggtgggactggcgctggaggccgccaccgcggggacgccctccgcgtcgccatccccatcgccgcccctgccgccgaacttgcccgaagcccgggcggggccggcgcgacgggcccggcggggcacgagcggcagagggagcctgaagtttccgatgcccaactaccaggtggcgttgtttgagaacgaaccggcgggcaccctcatcctccagctgcacgcgcactacaccatcgagggcgaggaggagcgcgtgagctattacatggaggggctgttcgacgagcgctcccggggctacttccgaatcgactctgccacgggcgccgtgagcacggacagcgtactggaccgcgagaccaaggagacgcacgtcctcagggtgaaagccgtggactacagtacgccgccgcgctcggccaccacctacatcactgtcttggtcaaagacaccaacgaccacagcccggtcttcgagcagtcggagtaccgcgagcgcgtgcgggagaacctggaggtgggctacgaggtgctgaccatccgcgccagcgaccgcgactcgcccatcaacgccaacttgcgttaccgcgtgttggggggcgcgtgggacgtcttccagctcaacgagagctctggcgtggtgagcacacgggcggtgctggaccgggaggaggcggccgagtaccagctcctggtggaggccaacgaccaggggcgcaatccgggcccgctcagtgccacggccaccgtgtacatcgaggtggaggacgagaacgacaactacccccagttcagcgagcagaactacgtggtccaggtgcccgaggacgtggggctcaacacggctgtgctgcgagtgcaggccacggaccgggaccagggccagaacgcggccattcactacagcatcctcagcgggaacgtggccggccagttctacctgcactcgctgagcgggatcctggatgtgatcaaccccttggatttcgaggatgtccagaaatactcgctgagcattaaggcccaggatgggggccggcccccgctcatcaattcttcaggggtggtgtctgtgcaggtgctggatgtcaacgacaacgagcctatctttgtgagcagccccttccaggccacggtgctggagaatgtgcccctgggctaccccgtggtgcacattcaggcggtggacgcggactctggagagaacgcccggctgcactatcgcctggtggacacggcctccacctttctggggggcggcagcgctgggcctaagaatcctgcccccacccctgacttccccttccagatccacaacagctccggttggatcacagtgtgtgccgagctggaccgcgaggaggtggagcactacagcttcggggtggaggcggtggaccacggctcgccccccatgagctcctccaccagcgtgtccatcacggtgctggacgtgaatgacaacgacccggtgttcacgcagcccacctacgagcttcgtctgaatgaggatgcggccgtggggagcagcgtgctgaccctgcaggcccgcgaccgtgacgccaacagtgtgattacctaccagctcacaggcggcaacacccggaaccgctttgcactcagcagccagagagggggcggcctcatcaccctggcgctacctctggactacaagcaggagcagcagtacgtgctggcggtgacagcatccgacggcacacggtcgcacactgcgcatgtcctaatcaacgtcactgatgccaacacccacaggcctgtctttcagagctcccattacacagtgagtgtcagtgaggacaggcctgtgggcacctccattgctaccctcagtgccaacgatgaggacacaggagagaatgcccgcatcacctacgtgattcaggaccccgtgccgcagttccgcattgaccccgacagtggcaccatgtacaccatgatggagctggactatgagaaccaggtcgcctacacgctgaccatcatggcccaggacaacggcatcccgcagaaatcagacaccaccaccctagagatcctcatcctcgatgccaatgacaatgcaccccagttcctgtgggatttctaccagggttccatctttgaggatgctccaccctcgaccagcatcctccaggtctctgccacggaccgggactcaggtcccaatgggcgtctgctgtacaccttccagggtggggacgacggcgatggggacttctacatcgagcccacgtccggtgtgattcgcacccagcgccggctggaccgggagaatgtggccgtgtacaacctttgggctctggctgtggatcggggcagtcccactccccttagcgcctcggtagaaatccaggtgaccatcttggacattaatgacaatgcccccatgtttgagaaggacgaactggagctgtttgttgaggagaacaacccagtggggtcggtggtggcaaagattcgtgctaacgaccctgatgaaggccctaatgcccagatcatgtatcagattgtggaaggggacatgcggcatttcttccagctggacctgctcaacggggacctgcgtgccatggtggagctggactttgaggtccggcgggagtatgtgctggtggtgcaggccacgtcggctccgctggtgagccgagccacggtgcacatccttctcgtggaccagaatgacaacccgcctgtgctgcccgacttccagatcctcttcaacaactatgtcaccaacaagtccaacagtttccccaccggcgtgatcggctgcatcccggcccatgaccccgacgtgtcagacagcctcaactacaccttcgtgcagggcaacgagctgcgcctgttgctgctggaccccgccacgggcgaactgcagctcagccgcgacctggacaacaaccggccgctggaggcgctcatggaggtgtctgtgtctgatggcatccacagcgtcacggccttctgcaccctgcgtgtcaccatcatcacggacgacatgctgaccaacagcatcactgtccgcctggagaacatgtcccaggagaagttcctgtccccgctgctggccctcttcgtggagggggtggccgccgtgctgtccaccaccaaggacgacgtcttcgtcttcaacgtccagaacgacaccgacgtcagctccaacatcctgaacgtgaccttctcggcgctgctgcctggcggcgtccgcggccagttcttcccgtcggaggacctgcaggagcagatctacctgaatcggacgctgctgaccaccatctccacgcagcgcgtgctgcccttcgacgacaacatctgcctgcgcgagccctgcgagaactacatgaagtgcgtgtccgttctgcgattcgacagctccgcgcccttcctcagctccaccaccgtgctcttccggcccatccaccccatcaacggcctgcgctgccgctgcccgcccggcttcaccggcgactactgcgagacggagatcgacctctgctactccgacccgtgcggcgccaacggccgctgccgcagccgcgagggcggctacacctgcgagtgcttcgaggacttcactggagagcactgtgaggtggatgcccgctcaggccgctgtgccaacggggtgtgcaagaacgggggcacctgcgtgaacctgctcatcggcggcttccactgcgtgtgtcctcctggcgagtatgagaggccctactgtgaggtgaccaccaggagcttcccgccccagtccttcgtcaccttccggggcctgagacagcgcttccacttcaccatctccctcacgtttgccactcaggaaaggaacggcttgcttctctacaacggccgcttcaatgagaagcacgacttcatcgccctggagatcgtggacgagcaggtgcagctcaccttctctgcaggcgagacaacaacgaccgtggcaccgaaggttcccagtggtgtgagtgacgggcggtggcactctgtgcaggtgcagtactacaacaagcccaatattggccacctgggcctgccccatgggccgtccggggaaaagatggccgtggtgacagtggatgattgtgacacaaccatggctgtgcgctttggaaaggacatcgggaactacagctgcgctgcccagggcactcagaccggctccaagaagtccctggatctgaccggccctctactcctggggggtgtccccaacctgccagaagacttcccagtgcacaaccggcagttcgtgggctgcatgcggaacctgtcagtcgacggcaaaaatgtggacatggccggattcatcgccaacaatggcacccgggaaggctgcgctgctcggaggaacttctgcgatgggaggcggtgtcagaatggaggcacctgtgtcaacaggtggaatatgtatctgtgtgagtgtccactccgattcggcgggaagaactgtgagcaagccatgcctcacccccagctcttcagcggtgagagcgtcgtgtcctggagtgacctgaacatcatcatctctgtgccctggtacctggggctcatgttccggacccggaaggaggacagcgttctgatggaggccaccagtggtgggcccaccagctttcgcctccagatcctgaacaactacctccagtttgaggtgtcccacggcccctccgatgtggagtccgtgatgctgtccgggttgcgggtgaccgacggggagtggcaccacctgctgatcgagctgaagaatgttaaggaggacagtgagatgaagcacctggtcaccatgaccttggactatgggatggaccagaacaaggcagatatcgggggcatgcttcccgggctgacggtaaggagcgtggtggtcggaggcgcctctgaagacaaggtctccgtgcgccgtggattccgaggctgcatgcagggagtgaggatgggggggacgcccaccaacgtcgccaccctgaacatgaacaacgcactcaaggtcagggtgaaggacggctgtgatgtggacgacccctgtacctcgagcccctgtccccccaatagccgctgccacgacgcctgggaggactacagctgcgtctgtgacaaagggaataaactgtgtggatgcctgtcacctgaacccctgcgagaacatgggggcctgcgtgcgctcccccggctccccgcagggctacgtgtgcgagtgtgggcccagtcactacgggccgtactgtgagaacaaactcgaccttccgtgccccagaggctggtgggggaaccccgtctgtggaccctgccactgtgccgtcagcaaaggctttgatcccgactgtaataagaccaacggccagtgccaatgcaaggagaattactacaagctcctagcccaggacacctgtctgccctgcgactgcttcccccatggctcccacagccgcacttgcgacatggccaccgggcagtgtgcctgcaagcccggcgtcatcggccgccagtgcaaccgctgcgacaacccgtttgccgaggtcaccacgctcggctgtgaagtgatctacaatggctgtcccaaagcatttgaggccggcatctggtggccacagaccaagttcgggcagccggctgcggtgccatgccctaagggatccgttggaaatgcggtccgacactgcagcggggagaagggctggctgcccccagagctctttaactgtaccaccatctccttcgtggacctcagggccatgaatgagaagctgagccgcaatgagacgcaggtggacggcgccagggccctgcagctggtgagggcgctgcgcagtgctacacagcacacgggcacgctctttggcaatgacgtgcgcacggcctaccagctgctgggccacgtccttcagcacgagagctggcagcagggcttcgacctggcagccacgcaggacgccgactttcacgaggacgtcatccactcgggcagcgccctcctggccccagccaccagggcggcgtgggagcagatccagcggagcgagggcggcacggcacagctgctccggcgcctcgagggctacttcagcaacgtggcacgcaacgtgcggcggacgtacctgcggcccttcgtcatcgtcaccgccaacatgattcttgctgtcgacatctttgacaagttcaactttacgggagccagggtcccgcgattcgacaccatccatgaagagttccccagggagctggagtcctccgtctccttcccagccgacttcttcagaccacctgaagaaaaagaaggccccctgctgaggccggctggccggaggaccaccccgcagaccacgcgcccggggcctggcaccgagagggaggccccgatcagcaggcggaggcgacaccctgatgacgctggccagttcgccgtcgctctggtcatcatttaccgcaccctggggcagctcctgcccgagcgctacgaccccgaccgtcgcagcctccggttgcctcaccggcccatcattaataccccgatggtgagcacgctggtgtacagcgagggggctccgctcccgagacccctggagaggcccgtcctggtggagttcgccctgctggaggtggaggagcgaaccaagcctgtctgcgtgttctggaaccactccctggccgttggtgggacgggagggtggtctgcccggggctgcgagctcctgtccaggaaccggacacatgtcgcctgccagtgcagccacacagccagctttgcggtgctcatggatatctccaggcgtgagaacggggaggtcctgcctctgaagattgtcacctatgccgctgtgtccttgtcactggcagccctgctggtggccttcgtcctcctgagcctggtccgcatgctgcgctccaacctgcacagcattcacaagcacctcgccgtggcgctcttcctctctcagctggtgttcgtgattgggatcaaccagacggaaaacccgtttctgtgcacagtggttgccatcctcctccactacatctacatgagcacctttgcctggaccctcgtggagagcctgcatgtctaccgcatgctgaccgaggtgcgcaacatcgacacggggcccatgcggttctactacgtcgtgggctggggcatcccggccattgtcacaggactggcggtcggcctggacccccagggctacgggaaccccgacttctgctggctgtcgcttcaagacaccctgatttggagctttgcggggcccatcggagctgttataatcatcaacacagtcacttctgtcctatctgcaaaggtttcctgccaaagaaagcaccattattatgggaaaaaagggatcgtctccctgctgaggaccgcattcctcctgctgctgctcatcagcgccacctggctgctggggctgctggctgtgaaccgcgatgcactgagctttcactacctcttcgccatcttcagcggcttacagggccccttcgtcctccttttccactgcgtgctcaaccaggaggtccggaagcacctgaagggcgtgctcggcgggaggaagctgcacctggaggactccgccaccaccagggccaccctgctgacgcgctccctcaactgcaacaccaccttcggtgacgggcctgacatgctgcgcacagacttgggcgagtccaccgcctcgctggacagcatcgtcagggatgaagggatccagaagctcggcgtgtcctctgggctggtgaggggcagccacggagagccagacgcgtccctcatgcccaggagctgcaaggatccccctggccacgattccgactcagatagcgagctgtccctggatgagcagagcagctcttacgcctcctcacactcgtcagacagcgaggacgatggggtgggagctgaggaaaaatgggacccggccaggggcgccgtccacagcacccccaaaggggacgctgtggccaaccacgttccggccggctggcccgaccagagcctggctgagagtgacagtgaggaccccagcggcaagccccgcctgaaggtggagaccaaggtcagcgtggagctgcaccgcgaggagcagggcagtcaccgtggagagtaccccccggaccaggagagcgggggcgcagccaggcttgctagcagccagcccccagagcagaggaaaggcatcttgaaaaataaagtcacctacccgccgccgctgacgctgacggagcagacgctgaagggccggctccgggagaagctggccgactgtgagcagagccccacatcctcgcgcacgtcttccctgggctctggcggccccgactgcgccatcacagtcaagagccctgggagggagccggggcgtgaccacctcaacggggtggccatgaatgtgcgcactgggagcgcccaggccgatggctccgactctgagaaaccgtgaggcaagcccgtcaccccacacaggctgcggcatcaccctcagaccttggagcccaaggggccactgcccttgaagtggagtgggcccagagtgtggcggtccccatggtggcagccccccgactgatcatccagacacaaaggtcttggttctcccaggagctcagggcctgtcagacctggtgacaagtgccaaaggccacaggcatgagggaggcgtggaccactgggccagcaccgctgagtcctaagactgcagtcaaagccagaactgagaggggaccccagactgggcccagaggctggccagagttcaggaacgccgggcacagaccaaagaccgcggtccagccccgcccaggcgggcatctcatggcagtgcggacccgtggctggcagcccgggcagtcctttgcaaaggcaccccttgtcttaaaatcacttcgctatgtgggaaaggtggagatacttttatatatttgtatgggactctgaggaggtgcaacctgtatatatattgcattcgtgctgactttgttatcccgagagatccatgcaatgatctcttgctgtcttctctgtcaagattgcacagttgtacttgaatctggcatgtgttgacgaaactggtgccccagcagatcaaaggtgggaaatacgtcagcagtggggctaaaaccaagcggctagaagccctacagctgccttcggccaggaagtgaggatggtgtgggccctccccgccggccccctgggtccccagtgttcgctgtgtgtgcgtttgtcctctgctgccatctgccccggctgtgtgaattcaagacagggcagtgcagcactaggcaggtgtgaggagccctgctgaggtcactgtggggcacggttgccacacggctgtcatttttcacctggtcattctgtgaccaccaccccctcccctcaccgcctcccaggtggcccgggagctgcaggtggggatggctttgtcctttgctcctgctccccgtgggacctgggaccttaaagcgttgcaggttcctgatttggacagaggtgtggggccttccaggccgttacatacctcctgccaattctctaactctctgagactgcgaggatctccaggcagggttctcccctctggagtctgaccaattacttcattttgcttcaaatggccaattgtgcagagggacaaagccacagccacactcttcaacggttaccaaactgtttttggaaattcacaccaaggtcgggcccactgcaggcagctggcacagcgtggcccgaggggctgtggaacgggtcccggaactgtcagacatgtttgattttagcgtttcctttgttcttcaaatcaggtgcccaaataagtgatcagcacagctgcttccaaataggagaaaccataaaataggatgaaaatcaagtaaaatgcaaagatgtccacactgttttaaacttgaccctgatgaaaatgtgagcactgttagcagatgcctatgggagaggaaaagcgtatctgaaaatggtccaggacaggaggatgaaatgagatcccagagtcctcacacctgaatgaattatacatgtgccttaccaggtgagtggtctttcgaagataaaaaactctagtccctttaaacgtttgcccctggcgtttcctaagtacgaaaaggtttttaagtcttcgaacagtctcctttcatgactttaacaggattctgccccctgaggtgtaatttttttgttctatttttttccacgtactccacagccaacatcacgaggtgtaatttttaatttgatcagaactgttaccaaaaaacaactgtcagttttattgagatgggaaaaatgtaaacctatttttattacttaagactttatgggagagattagacactggaggtttttaacagaacgtgtatttattaatgttcaaaacactggaattacaaatgagaagagtctacaataaattaagatttttgaatttgtacttctgcggtgctggtttttctccacaaacacccccgcccctccccatgcccagggtggccgtggaagggacggtttacggacgtgcagctgagctgtccgtgtcccatgctccctcagccagtggaacgtgccggaactttttgtccattccctagtaggcctgccacagcctagatgggcagtttttgtctttcaccaaatttgaggactttttttttttgccattatttcttcagttttcttttcttgcactgatctttctcctctccttctgtgactccagtgactcagacgttagacctcttgatgttttcccactggtccctgaggctctgttcacctttcttcattcttttttctgtctgtccttcagatttggctatttctggtgctccgtcttcaagttcactgattttttttcctctgtcgtcttaattctgctactgaactcacccagtgaatttatttcaaatactgtaattaagttttaaaatttccattaggttcctttttatttctctgctgggtacttctggttttccactcattccaagagtgttcacctttacttcatgaagcatggttataactaggactgcagtgaattctgggataatttgaacgtttgagcatcttggggctgaaatcgtcttttctgtttgcattttcctggttgtgtgctgagtaactgcaagttgaatcctcactcgtcatgtggaatgttaggttagactctgggttgttaacaccctcgttgtaagtgtcatttcatgtgtttgtttcagcagcaggcaacctggtttaggttctgaccactggttctgtctctctttccacgagcagcaggtccaccaccaggtcagcccttggccttggctgtgctgttttgggtcgttgcctgcactcacaggtggggtgggcagggacgtgtgtcagcacatgtagagaatctgggggtctgcttctccagcactctccttgctggaatttgccttgcattttctcacttctggggtcccttttcttggtttctctgtccagaaagatgggtttctcccagagctctagccacctgcactgtctcacgcttccacccttaaggaaacagggctcacccttaaggaaaagtagtgacagcaaagagagaaaaatgggaaccccaaccctctctagtccacagtgcccccgtttcccaggcctctctggagttgttgccctggtgctggctgcacaggaccacagattagggccacccccgggtcaaatctgagagaggaaaaaccacccatgtgcctgaggtcatttttcaagttgttgctttctcctcagttcacctgctaacgtttacatcctagaatgctcagtggctaacatgatagaatatttctacctcaaccccaaag

SEQ ID NO: 420923 - DNA, 4319 bp, Homo sapiens
  misc_feature (4312)..(4312): n is a, c, g, or t
atggcgccgccgccgccgcccgtgctgcccgtgctgctgctcctggccgccgccgccgccctgccggcgatggggctgcgagcggccgcctgggagccgcgcgtacccggcgggacccgcgccttcgccctccggcccggctgtacctacgcggtgggcgccgcttgcacgccccgggcgccgcgggagctgctggacgtgggccgcgatgggcggctggcaggacgtcggcgcgtctcgggcgcggggcgcccgctgccgctgcaagtccgcttggtggcccgcagtgccccgacggcgctgagccgccgcctgcgggcgcgcacgcaccttcccggctgcggagcccgtgcccggctctgcggaaccggtgcccggctctgcggggcgctctgcttccccgtccccggcggctgcgcggccgcgcagcattcggcgctcgcagctccgaccaccttacccgcctgccgctgcccgccgcgccccaggccccgctgtcccggccgtcccatctgcctgccgccgggcggctcggtccgcctgcgtctgctgtgcgccctgcggcgcgcggctggcgccgtccgggtgggactggcgctggaggccgccaccgcggggacgccctccgcgtcgccatccccatcgccgcccctgccgccgaacttgcccgaagcccgggcggggccggcgcgacgggcccggcggggcacgagcggcagagggagcctgaagtttccgatgcccaactaccaggtggcgttgtttgagaacgaaccggcgggcaccctcatcctccagctgcacgcgcactacaccatcgagggcgaggaggagcgcgtgagctattacatggaggggctgttcgacgagcgctcccggggctacttccgaatcgactctgccacgggcgccgtgagcacggacagcgtactggaccgcgagaccaaggagacgcacgtcctcagggtgaaagccgtggactacagtacgccgccgcgctcggccaccacctacatcactgtcttggtcaaagacaccaacgaccacagcccggtcttcgagcagtcggagtaccgcgagcgcgtgcgggagaacctggaggtgggctacgaggtgctgaccatccgcgccagcgaccgcgactcgcccatcaacgccaacttgcgttaccgcgtgttggggggcgcgtgggacgtcttccagctcaacgagagctctggcgtggtgagcacacgggcggtgctggaccgggaggaggcggccgagtaccagctcctggtggaggccaacgaccaggggcgcaatccgggcccgctcagtgccacggccaccgtgtacatcgaggtggaggacgagaacgacaactacccccagttcagcgagcagaactacgtggtccaggtgcccgaggacgtggggctcaacacggctgtgctgcgagtgcaggccacggaccgggaccagggccagaacgcggccattcactacagcatcctcagcgggaacgtggccggccagttctacctgcactcgctgagcgggatcctggatgtgatcaaccccttggatttcgaggatgtccagaaatactcgctgagcattaaggcccaggatgggggccggcccccgctcatcaattcttcaggggtggtgtctgtgcaggtgctggatgtcaacgacaacgagcctatctttgtgagcagccccttccaggccacggtgctggagaatgtgcccctgggctaccccgtggtgcacattcaggcggtggacgcggactctggagagaacgcccggctgcactatcgcctggtggacacggcctccacctttctggggggcggcagcgctgggcctaagaatcctgcccccacccctgacttccccttccagatccacaacagctccggttggatcacagtgtgtgccgagctggaccgcgaggaggtggagcactacagcttcggggtggaggcggtggaccacggctcgccccccatgagctcctccaccagcgtgtccatcacggtgctggacgtgaatgacaacgacccggtgttcacgcagcccacctacgagcttcgtctgaatgaggatgcggccgtggggagcagcgtgctgaccctgcaggcccgcgaccgtgacgccaacagtgtgattacctaccagctcacaggcggcaacacccggaaccgctttgcactcagcagccagagagggggcggcctcatcaccctggcgctacctctggactacaagcaggagcagcagtacgtgctggcggtgacagcatccgacggcacacggtcgcacactgcgcatgtcctaatcaacgtcactgatgccaacacccacaggcctgtctttcagagctcccattacacagtgagtgtcagtgaggacaggcctgtgggcacctccattgctaccctcagtgccaacgatgaggacacaggagagaatgcccgcatcacctacgtgattcaggaccccgtgccgcagttccgcattgaccccgacagtggcaccatgtacaccatgatggagctggactatgagaaccaggtcgcctacacgctgaccatcatggcccaggacaacggcatcccgcagaaatcagacaccaccaccctagagatcctcatcctcgatgccaatgacaatgcaccccagttcctgtgggatttctaccagggttccatctttgaggatgctccaccctcgaccagcatcctccaggtctctgccacggaccgggactcaggtcccaatgggcgtctgctgtacaccttccagggtggggacgacggcgatggggacttctacatcgagcccacgtccggtgtgattcgcacccagcgccggctggaccgggagaatgtggccgtgtacaacctttgggctctggctgtggatcggggcagtcccactccccttagcgcctcggtagaaatccaggtgaccatcttggacattaatgacaatgcccccatgtttgagaaggacgaactggagctgtttgttgaggagaacaacccagtggggtcggtggtggcaaagattcgtgctaacgaccctgatgaaggccctaatgcccagatcatgtatcagattgtggaaggggacatgcggcatttcttccagctggacctgctcaacggggacctgcgtgccatggtggagctggactttgaggtccggcgggagtatgtgctggtggtgcaggccacgtcggctccgctggtgagccgagccacggtgcacatccttctcgtggaccagaatgacaacccgcctgtgctgcccgacttccagatcctcttcaacaactatgtcaccaacaagtccaacagtttccccaccggcgtgatcggctgcatcccggcccatgaccccgacgtgtcagacagcctcaactacaccttcgtgcagggcaacgagctgcgcctgttgctgctggaccccgccacgggcgaactgcagctcagccgcgacctggacaacaaccggccgctggaggcgctcatggaggtgtctgtgtctgatggcatccacagcgtcacggccttctgcaccctgcgtgtcaccatcatcacggacgacatgctgaccaacagcatcactgtccgcctggagaacatgtcccaggagaagttcctgtccccgctgctggccctcttcgtggagggggtggccgccgtgctgtccaccaccaaggacgacgtcttcgtcttcaacgtccagaacgacaccgacgtcagctccaacatcctgaacgtgaccttctcggcgctgctgcctggcggcgtccgcggccagttcttcccgtcggaggacctgcaggagcagatctacctgaatcggacgctgctgaccaccatctccacgcagcgcgtgctgcccttcgacgacaacatctgcctgcgcgagccctgcgagaactacatgaagtgcgtgtccgttctgcgattcgacagctccgcgcccttcctcagctccaccaccgtgctcttccggcccatccaccccatcaacggcctgcgctgccgctgcccgcccggcttcaccggcgactactgcgagacggagatcgacctctgctactccgacccgtgcggcgccaacggccgctgccgcagccgcgagggcggctacacctgcgagtgcttcgaggacttcactgaaatttcgtgactcatcctcccgcctctgaagatgctctttccttgatacctcctgactcatcaccaagatgaattactccaaatgtagccaacggtggtttttaaaaataaagagccaccccgagagnggtacag

SEQ ID NO: 420924 - DNA, 11101 bp, Homo sapiens
atggcgccgccgccgccgcccgtgctgcccgtgctgctgctcctggccgccgccgccgccctgccggcgatggggctgcgagcggccgcctgggagccgcgcgtacccggcgggacccgcgccttcgccctccggcccggctgtacctacgcggtgggcgccgcttgcacgccccgggcgccgcgggagctgctggacgtgggccgcgatgggcggctggcaggacgtcggcgcgtctcgggcgcggggcgcccgctgccgctgcaagtccgcttggtggcccgcagtgccccgacggcgctgagccgccgcctgcgggcgcgcacgcaccttcccggctgcggagcccgtgcccggctctgcggaaccggtgcccggctctgcggggcgctctgcttccccgtccccggcggctgcgcggccgcgcagcattcggcgctcgcagctccgaccaccttacccgcctgccgctgcccgccgcgccccaggccccgctgtcccggccgtcccatctgcctgccgccgggcggctcggtccgcctgcgtctgctgtgcgccctgcggcgcgcggctggcgccgtccgggtgggactggcgctggaggccgccaccgcggggacgccctccgcgtcgccatccccatcgccgcccctgccgccgaacttgcccgaagcccgggcggggccggcgcgacgggcccggcggggcacgagcggcagagggagcctgaagtttccgatgcccaactaccaggtggcgttgtttgagaacgaaccggcgggcaccctcatcctccagctgcacgcgcactacaccatcgagggcgaggaggagcgcgtgagctattacatggaggggctgttcgacgagcgctcccggggctacttccgaatcgactctgccacgggcgccgtgagcacggacagcgtactggaccgcgagaccaaggagacgcacgtcctcagggtgaaagccgtggactacagtacgccgccgcgctcggccaccacctacatcactgtcttggtcaaagacaccaacgaccacagcccggtcttcgagcagtcggagtaccgcgagcgcgtgcgggagaacctggaggtgggctacgaggtgctgaccatccgcgccagcgaccgcgactcgcccatcaacgccaacttgcgttaccgcgtgttggggggcgcgtgggacgtcttccagctcaacgagagctctggcgtggtgagcacacgggcggtgctggaccgggaggaggcggccgagtaccagctcctggtggaggccaacgaccaggggcgcaatccgggcccgctcagtgccacggccaccgtgtacatcgaggtggaggacgagaacgacaactacccccagttcagcgagcagaactacgtggtccaggtgcccgaggacgtggggctcaacacggctgtgctgcgagtgcaggccacggaccgggaccagggccagaacgcggccattcactacagcatcctcagcgggaacgtggccggccagttctacctgcactcgctgagcgggatcctggatgtgatcaaccccttggatttcgaggatgtccagaaatactcgctgagcattaaggcccaggatgggggccggcccccgctcatcaattcttcaggggtggtgtctgtgcaggtgctggatgtcaacgacaacgagcctatctttgtgagcagccccttccaggccacggtgctggagaatgtgcccctgggctaccccgtggtgcacattcaggcggtggacgcggactctggagagaacgcccggctgcactatcgcctggtggacacggcctccacctttctggggggcggcagcgctgggcctaagaatcctgcccccacccctgacttccccttccagatccacaacagctccggttggatcacagtgtgtgccgagctggaccgcgaggaggtggagcactacagcttcggggtggaggcggtggaccacggctcgccccccatgagctcctccaccagcgtgtccatcacggtgctggacgtgaatgacaacgacccggtgttcacgcagcccacctacgagcttcgtctgaatgaggatgcggccgtggggagcagcgtgctgaccctgcaggcccgcgaccgtgacgccaacagtgtgattacctaccagctcacaggcggcaacacccggaaccgctttgcactcagcagccagagagggggcggcctcatcaccctggcgctacctctggactacaagcaggagcagcagtacgtgctggcggtgacagcatccgacggcacacggtcgcacactgcgcatgtcctaatcaacgtcactgatgccaacacccacaggcctgtctttcagagctcccattacacagtgagtgtcagtgaggacaggcctgtgggcacctccattgctaccctcagtgccaacgatgaggacacaggagagaatgcccgcatcacctacgtgattcaggaccccgtgccgcagttccgcattgaccccgacagtggcaccatgtacaccatgatggagctggactatgagaaccaggtcgcctacacgctgaccatcatggcccaggacaacggcatcccgcagaaatcagacaccaccaccctagagatcctcatcctcgatgccaatgacaatgcaccccagttcctgtgggatttctaccagggttccatctttgaggatgctccaccctcgaccagcatcctccaggtctctgccacggaccgggactcaggtcccaatgggcgtctgctgtacaccttccagggtggggacgacggcgatggggacttctacatcgagcccacgtccggtgtgattcgcacccagcgccggctggaccgggagaatgtggccgtgtacaacctttgggctctggctgtggatcggggcagtcccactccccttagcgcctcggtagaaatccaggtgaccatcttggacattaatgacaatgcccccatgtttgagaaggacgaactggagctgtttgttgaggagaacaacccagtggggtcggtggtggcaaagattcgtgctaacgaccctgatgaaggccctaatgcccagatcatgtatcagattgtggaaggggacatgcggcatttcttccagctggacctgctcaacggggacctgcgtgccatggtggagctggactttgaggtccggcgggagtatgtgctggtggtgcaggccacgtcggctccgctggtgagccgagccacggtgcacatccttctcgtggaccagaatgacaacccgcctgtgctgcccgacttccagatcctcttcaacaactatgtcaccaacaagtccaacagtttccccaccggcgtgatcggctgcatcccggcccatgaccccgacgtgtcagacagcctcaactacaccttcgtgcagggcaacgagctgcgcctgttgctgctggaccccgccacgggcgaactgcagctcagccgcgacctggacaacaaccggccgctggaggcgctcatggaggtgtctgtgtctgatggcatccacagcgtcacggccttctgcaccctgcgtgtcaccatcatcacggacgacatgctgaccaacagcatcactgtccgcctggagaacatgtcccaggagaagttcctgtccccgctgctggccctcttcgtggagggggtggccgccgtgctgtccaccaccaaggacgacgtcttcgtcttcaacgtccagaacgacaccgacgtcagctccaacatcctgaacgtgaccttctcggcgctgctgcctggcggcgtccgcggccagttcttcccgtcggaggacctgcaggagcagatctacctgaatcggacgctgctgaccaccatctccacgcagcgcgtgctgcccttcgacgacaacatctgcctgcgcgagccctgcgagaactacatgaagtgcgtgtccgttctgcgattcgacagctccgcgcccttcctcagctccaccaccgtgctcttccggcccatccaccccatcaacggcctgcgctgccgctgcccgcccggcttcaccggcgactactgcgagacggagatcgacctctgctactccgacccgtgcggcgccaacggccgctgccgcagccgcgagggcggctacacctgcgagtgcttcgaggacttcactggagagcactgtgaggtggatgcccgctcaggccgctgtgccaacggggtgtgcaagaacgggggcacctgcgtgaacctgctcatcggcggcttccactgcgtgtgtcctcctggcgagtatgagaggccctactgtgaggtgaccaccaggagcttcccgccccagtccttcgtcaccttccggggcctgagacagcgcttccacttcaccatctccctcacgtttgccactcaggaaaggaacggcttgcttctctacaacggccgcttcaatgagaagcacgacttcatcgccctggagatcgtggacgagcaggtgcagctcaccttctctgcaggcgagacaacaacgaccgtggcaccgaaggttcccagtggtgtgagtgacgggcggtggcactctgtgcaggtgcagtactacaacaagcccaatattggccacctgggcctgccccatgggccgtccggggaaaagatggccgtggtgacagtggatgattgtgacacaaccatggctgtgcgctttggaaaggacatcgggaactacagctgcgctgcccagggcactcagaccggctccaagaagtccctggatctgaccggccctctactcctggggggtgtccccaacctgccagaagacttcccagtgcacaaccggcagttcgtgggctgcatgcggaacctgtcagtcgacggcaaaaatgtggacatggccggattcatcgccaacaatggcacccgggaaggctgcgctgctcggaggaacttctgcgatgggaggcggtgtcagaatggaggcacctgtgtcaacaggtggaatatgtatctgtgtgagtgtccactccgattcggcgggaagaactgtgagcaagccatgcctcacccccagctcttcagcggtgagagcgtcgtgtcctggagtgacctgaacatcatcatctctgtgccctggtacctggggctcatgttccggacccggaaggaggacagcgttctgatggaggccaccagtggtgggcccaccagctttcgcctccagatcctgaacaactacctccagtttgaggtgtcccacggcccctccgatgtggagtccgtgatgctgtccgggttgcgggtgaccgacggggagtggcaccacctgctgatcgagctgaagaatgttaaggaggacagtgagatgaagcacctggtcaccatgaccttggactatgggatggaccagaacaaggcagatatcgggggcatgcttcccgggctgacggtaaggagcgtggtggtcggaggcgcctctgaagacaaggtctccgtgcgccgtggattccgaggctgcatgcagggagtgaggatgggggggacgcccaccaacgtcgccaccctgaacatgaacaacgcactcaaggtcagggtgaaggacggctgtgatgtggacgacccctgtacctcgagcccctgtccccccaatagccgctgccacgacgcctgggaggactacagctgcgtctgtgacaaagggaataaactgtgtggatgcctgtcacctgaacccctgcgagaacatgggggcctgcgtgcgctcccccggctccccgcagggctacgtgtgcgagtgtgggcccagtcactacgggccgtactgtgagaacaaactcgaccttccgtgccccagaggctggtgggggaaccccgtctgtggaccctgccactgtgccgtcagcaaaggctttgatcccgactgtaataagaccaacggccagtgccaatgcaaggagaattactacaagctcctagcccaggacacctgtctgccctgcgactgcttcccccatggctcccacagccgcacttgcgacatggccaccgggcagtgtgcctgcaagcccggcgtcatcggccgccagtgcaaccgctgcgacaacccgtttgccgaggtcaccacgctcggctgtgaagtgatctacaatggctgtcccaaagcatttgaggccggcatctggtggccacagaccaagttcgggcagccggctgcggtgccatgccctaagggatccgttggaaatgcggtccgacactgcagcggggagaagggctggctgcccccagagctctttaactgtaccaccatctccttcgtggacctcagggccatgaatgagaagctgagccgcaatgagacgcaggtggacggcgccagggccctgcagctggtgagggcgctgcgcagtgctacacagcacacgggcacgctctttggcaatgacgtgcgcacggcctaccagctgctgggccacgtccttcagcacgagagctggcagcagggcttcgacctggcagccacgcaggacgccgactttcacgaggacgtcatccactcgggcagcgccctcctggccccagccaccagggcggcgtgggagcagatccagcggagcgagggcggcacggcacagctgctccggcgcctcgagggctacttcagcaacgtggcacgcaacgtgcggcggacgtacctgcggcccttcgtcatcgtcaccgccaacatgattcttgctgtcgacatctttgacaagttcaactttacgggagccagggtcccgcgattcgacaccatccatgaagagttccccagggagctggagtcctccgtctccttcccagccgacttcttcagaccacctgaagaaaaagaaggccccctgctgaggccggctggccggaggaccaccccgcagaccacgcgcccggggcctggcaccgagagggaggccccgatcagcaggcggaggcgacaccctgatgacgctggccagttcgccgtcgctctggtcatcatttaccgcaccctggggcagctcctgcccgagcgctacgaccccgaccgtcgcagcctccggttgcctcaccggcccatcattaataccccgatggtgagcacgctggtgtacagcgagggggctccgctcccgagacccctggagaggcccgtcctggtggagttcgccctgctggaggtggaggagcgaaccaagcctgtctgcgtgttctggaaccactccctggccgttggtgggacgggagggtggtctgcccggggctgcgagctcctgtccaggaaccggacacatgtcgcctgccagtgcagccacacagccagctttgcggtgctcatggatatctccaggcgtgagaacggggaggtcctgcctctgaagattgtcacctatgccgctgtgtccttgtcactggcagccctgctggtggccttcgtcctcctgagcctggtccgcatgctgcgctccaacctgcacagcattcacaagcacctcgccgtggcgctcttcctctctcagctggtgttcgtgattgggatcaaccagacggaaaacccgtttctgtgcacagtggttgccatcctcctccactacatctacatgagcacctttgcctggaccctcgtggagagcctgcatgtctaccgcatgctgaccgaggtgcgcaacatcgacacggggcccatgcggttctactacgtcgtgggctggggcatcccggccattgtcacaggactggcggtcggcctggacccccagggctacgggaaccccgacttctgctggctgtcgcttcaagacaccctgatttggagctttgcggggcccatcggagctgttataatcatcaacacagtcacttctgtcctatctgcaaaggtttcctgccaaagaaagcaccattattatgggaaaaaagggatcgtctccctgctgaggaccgcattcctcctgctgctgctcatcagcgccacctggctgctggggctgctggctgtgaaccgcgatgcactgagctttcactacctcttcgccatcttcagcggcttacagggccccttcgtcctccttttccactgcgtgctcaaccaggaggtccggaagcacctgaagggcgtgctcggcgggaggaagctgcacctggaggactccgccaccaccagggccaccctgctgacgcgctccctcaactgcaacaccaccttcggtgacgggcctgacatgctgcgcacagacttgggcgagtccaccgcctcgctggacagcatcgtcagggatgaagggatccagaagctcggcgtgtcctctgggctggtgaggggcagccacggagagccagacgcgtccctcatgcccaggagctgcaaggatccccctggccacgattccgactcagatagcgagctgtccctggatgagcagagcagctcttacgcctcctcacactcgtcagacagcgaggacgatggggtgggagctgaggaaaaatgggacccggccaggggcgccgtccacagcacccccaaaggggacgctgtggccaaccacgttccggccggctggcccgaccagagcctggctgagagtgacagtgaggaccccagcggcaagccccgcctgaaggtggagaccaaggtcagcgtggagctgcaccgcgaggagcagggcagtcaccgtggagagtaccccccggaccaggagagcgggggcgcagccaggcttgctagcagccagcccccagagcagaggaaaggcatcttgaaaaataaagtcacctacccgccgccgctgacgctgacggagcagacgctgaagggccggctccgggagaagctggccgactgtgagcagagccccacatcctcgcgcacgtcttccctgggctctggcggccccgactgcgccatcacagtcaagagccctgggagggagccggggcgtgaccacctcaacggggtggccatgaatgtgcgcactgggagcgcccaggccgatggctccgactctgaaggcagtaatgaaacttcaatttgaaccatcagtaatgaaacttcaatttgaaccatcaggaaaccgtgaggcaagcccgtcaccccacacaggctgcggcatcaccctcagaccttggagcccaaggggccactgcccttgaagtggagtgggcccagagtgtggcggtccccatggtggcagccccccgactgatcatccagacacaaaggtcttggttctcccaggagctcagggcctgtcagacctggtgacaagtgccaaaggccacaggcatgagggaggcgtggaccactgggccagcaccgctgagtcctaagactgcagtcaaagccagaactgagaggggaccccagactgggcccagaggctggccagagttcaggaacgccgggcacagaccaaagaccgcggtccagccccgcccaggcgggcatctcatggcagtgcggacccgtggctggcagcccgggcagtcctttgcaaaggcaccccttgtcttaaaatcacttcgctatgtgggaaaggtggagatacttttatatatttgtatgggactctgaggaggtgcaacctgtatatatattgcattcgtgctgactttgttatcccgagagatccatgcaatgatctcttgctgtcttctctgtcaagattgcacagttgtacttgaatctggcatgtgttgacgaaactggtgccccagcagatcaaaggtgggaaatacgtcagcagtggggctaaaaccaagcggctagaagccctacagctgccttcggccaggaagtgaggatggtgtgggccctccccgccggccccctgggtccccagtgttcgctgtgtgtgcgtttgtcctctgctgccatctgccccggctgtgtgaattcaagacagggcagtgcagcactaggcaggtgtgaggagccctgctgaggtcactgtggggcacggttgccacacggctgtcatttttcacctggtcattctgtgaccaccaccccctcccctcaccgcctcccaggtggcccgggagctgcaggtggggatggctttgtcctttgctcctgctccccgtgggacctgggaccttaaagcgttgcaggttcctgatttggacagaggtgtggggccttccaggccgttacatacctcctgccaattctctaactctctgagactgcgaggatctccaggcagggttctcccctctggagtctgaccaattacttcattttgcttcaaatggccaattgtgcagagggacaaagccacagccacactcttcaacggttaccaaactgtttttggaaattcacaccaaggtcgggcccactgcaggcagctggcacagcgtggcccgaggggctgtggaacgggtcccggaactgtcagacatgtttgattttagcgtttcctttgttcttcaaatcaggtgcccaaataagtgatcagcacagctgcttccaaataggagaaaccataaaataggatgaaaatcaagtaaaatgcaaagatgtccacactgttttaaacttgaccctgatgaaaatgtgagcactgttagcagatgcctatgggagaggaaaagcgtatctgaaaatggtccaggacaggaggatgaaatgagatcccagagtcctcacacctgaatgaattatacatgtgccttaccaggtgagtggtctttcgaagataaaaaactctagtccctttaaacgtttgcccctggcgtttcctaagtacgaaaaggtttttaagtcttcgaacagtctcctttcatgactttaacaggattctgccccctgaggtgtaatttttttgttctatttttttccacgtactccacagccaacatcacgaggtgtaatttttaatttgatcagaactgttaccaaaaaacaactgtcagttttattgagatgggaaaaatgtaaacctatttttattacttaagactttatgggagagattagacactggaggtttttaacagaacgtgtatttattaatgttcaaaacactggaattacaaatgagaagagtctacaataaattaagatttttgaatttgta

SEQ ID NO: 420925 - DNA, 6243 bp, Homo sapiens
gtcccagggtgcgcttctctggagcccacgtggctgactgtgagggctggatgcgtcacagaggggaggctcagacccaccttcgtgttaaagtgaaaaaggcccaggcctagcctgcaggcccatcccccgcccctgcagccaagtccgcggccgtgtgatttcgggagacacctgaggtccctgggcctgtgtccgcagccatgcctcacccccagctcttcagcggtgagagcgtcgtgtcctggagtgacctgaacatcatcatctctgtgccctggtacctggggctcatgttccggacccggaaggaggacagcgttctgatggaggccaccagtggtgggcccaccagctttcgcctccagatcctgaacaactacctccagtttgaggtgtcccacggcccctccgatgtggagtccgtgatgctgtccgggttgcgggtgaccgacggggagtggcaccacctgctgatcgagctgaagaatgttaaggaggacagtgagatgaagcacctggtcaccatgaccttggactatgggatggaccagaacaaggcagatatcgggggcatgcttcccgggctgacggtaaggagcgtggtggtcggaggcgcctctgaagacaaggtctccgtgcgccgtggattccgaggctgcatgcagggagtgaggatgggggggacgcccaccaacgtcgccaccctgaacatgaacaacgcactcaaggtcagggtgaaggacggctgtgatgtggacgacccctgtacctcgagcccctgtccccccaatagccgctgccacgacgcctgggaggactacagctgcgtctgtgacaaagggaataaactgtgtggatgcctgtcacctgaacccctgcgagaacatgggggcctgcgtgcgctcccccggctccccgcagggctacgtgtgcgagtgtgggcccagtcactacgggccgtactgtgagaacaaactcgaccttccgtgccccagaggctggtgggggaaccccgtctgtggaccctgccactgtgccgtcagcaaaggctttgatcccgactgtaataagaccaacggccagtgccaatgcaaggagaattactacaagctcctagcccaggacacctgtctgccctgcgactgcttcccccatggctcccacagccgcacttgcgacatggccaccgggcagtgtgcctgcaagcccggcgtcatcggccgccagtgcaaccgctgcgacaacccgtttgccgaggtcaccacgctcggctgtgaagtgatctacaatggctgtcccaaagcatttgaggccggcatctggtggccacagaccaagttcgggcagccggctgcggtgccatgccctaagggatccgttggaaatgcggtccgacactgcagcggggagaagggctggctgcccccagagctctttaactgtaccaccatctccttcgtggacctcagggccatgaatgagaagctgagccgcaatgagacgcaggtggacggcgccagggccctgcagctggtgagggcgctgcgcagtgctacacagcacacgggcacgctctttggcaatgacgtgcgcacggcctaccagctgctgggccacgtccttcagcacgagagctggcagcagggcttcgacctggcagccacgcaggacgccgactttcacgaggacgtcatccactcgggcagcgccctcctggccccagccaccagggcggcgtgggagcagatccagcggagcgagggcggcacggcacagctgctccggcgcctcgagggctacttcagcaacgtggcacgcaacgtgcggcggacgtacctgcggcccttcgtcatcgtcaccgccaacatgattcttgctgtcgacatctttgacaagttcaactttacgggagccagggtcccgcgattcgacaccatccatgaagagttccccagggagctggagtcctccgtctccttcccagccgacttcttcagaccacctgaagaaaaagaaggccccctgctgaggccggctggccggaggaccaccccgcagaccacgcgcccggggcctggcaccgagagggaggccccgatcagcaggcggaggcgacaccctgatgacgctggccagttcgccgtcgctctggtcatcatttaccgcaccctggggcagctcctgcccgagcgctacgaccccgaccgtcgcagcctccggttgcctcaccggcccatcattaataccccgatggtgagcacgctggtgtacagcgagggggctccgctcccgagacccctggagaggcccgtcctggtggagttcgccctgctggaggtggaggagcgaaccaagcctgtctgcgtgttctggaaccactccctggccgttggtgggacgggagggtggtctgcccggggctgcgagctcctgtccaggaaccggacacatgtcgcctgccagtgcagccacacagccagctttgcggtgctcatggatatctccaggcgtgagaacggggaggtcctgcctctgaagattgtcacctatgccgctgtgtccttgtcactggcagccctgctggtggccttcgtcctcctgagcctggtccgcatgctgcgctccaacctgcacagcattcacaagcacctcgccgtggcgctcttcctctctcagctggtgttcgtgattgggatcaaccagacggaaaacccgtttctgtgcacagtggttgccatcctcctccactacatctacatgagcacctttgcctggaccctcgtggagagcctgcatgtctaccgcatgctgaccgaggtgcgcaacatcgacacggggcccatgcggttctactacgtcgtgggctggggcatcccggccattgtcacaggactggcggtcggcctggacccccagggctacgggaaccccgacttctgctggctgtcgcttcaagacaccctgatttggagctttgcggggcccatcggagctgttataatcatcaacacagtcacttctgtcctatctgcaaaggtttcctgccaaagaaagcaccattattatgggaaaaaagggatcgtctccctgctgaggaccgcattcctcctgctgctgctcatcagcgccacctggctgctggggctgctggctgtgaaccgcgatgcactgagctttcactacctcttcgccatcttcagcggcttacagggccccttcgtcctccttttccactgcgtgctcaaccaggaggtccggaagcacctgaagggcgtgctcggcgggaggaagctgcacctggaggactccgccaccaccagggccaccctgctgacgcgctccctcaactgcaacaccaccttcggtgacgggcctgacatgctgcgcacagacttgggcgagtccaccgcctcgctggacagcatcgtcagggatgaagggatccagaagctcggcgtgtcctctgggctggtgaggggcagccacggagagccagacgcgtccctcatgcccaggagctgcaaggatccccctggccacgattccgactcagatagcgagctgtccctggatgagcagagcagctcttacgcctcctcacactcgtcagacagcgaggacgatggggtgggagctgaggaaaaatgggacccggccaggggcgccgtccacagcacccccaaaggggacgctgtggccaaccacgttccggccggctggcccgaccagagcctggctgagagtgacagtgaggaccccagcggcaagccccgcctgaaggtggagaccaaggtcagcgtggagctgcaccgcgaggagcagggcagtcaccgtggagagtaccccccggaccaggagagcgggggcgcagccaggcttgctagcagccagcccccagagcagaggaaaggcatcttgaaaaataaagtcacctacccgccgccgctgacgctgacggagcagacgctgaagggccggctccgggagaagctggccgactgtgagcagagccccacatcctcgcgcacgtcttccctgggctctggcggccccgactgcgccatcacagtcaagagccctgggagggagccggggcgtgaccacctcaacggggtggccatgaatgtgcgcactgggagcgcccaggccgatggctccgactctgaaggcagtaatgaaacttcaatttgaaccatcagtaatgaaacttcaatttgaaccatcaggaaaccgtgaggcaagcccgtcaccccacacaggctgcggcatcaccctcagaccttggagcccaaggggccactgcccttgaagtggagtgggcccagagtgtggcggtccccatggtggcagccccccgactgatcatccagacacaaaggtcttggttctcccaggagctcagggcctgtcagacctggtgacaagtgccaaaggccacaggcatgagggaggcgtggaccactgggccagcaccgctgagtcctaagactgcagtcaaagccagaactgagaggggaccccagactgggcccagaggctggccagagttcaggaacgccgggcacagaccaaagaccgcggtccagccccgcccaggcgggcatctcatggcagtgcggacccgtggctggcagcccgggcagtcctttgcaaaggcaccccttgtcttaaaatcacttcgctatgtgggaaaggtggagatacttttatatatttgtatgggactctgaggaggtgcaacctgtatatatattgcattcgtgctgactttgttatcccgagagatccatgcaatgatctcttgctgtcttctctgtcaagattgcacagttgtacttgaatctggcatgtgttgacgaaactggtgccccagcagatcaaaggtgggaaatacgtcagcagtggggctaaaaccaagcggctagaagccctacagctgccttcggccaggaagtgaggatggtgtgggccctccccgccggccccctgggtccccagtgttcgctgtgtgtgcgtttgtcctctgctgccatctgccccggctgtgtgaattcaagacagggcagtgcagcactaggcaggtgtgaggagccctgctgaggtcactgtggggcacggttgccacacggctgtcatttttcacctggtcattctgtgaccaccaccccctcccctcaccgcctcccaggtggcccgggagctgcaggtggggatggctttgtcctttgctcctgctccccgtgggacctgggaccttaaagcgttgcaggttcctgatttggacagaggtgtggggccttccaggccgttacatacctcctgccaattctctaactctctgagactgcgaggatctccaggcagggttctcccctctggagtctgaccaattacttcattttgcttcaaatggccaattgtgcagagggacaaagccacagccacactcttcaacggttaccaaactgtttttggaaattcacaccaaggtcgggcccactgcaggcagctggcacagcgtggcccgaggggctgtggaacgggtcccggaactgtcagacatgtttgattttagcgtttcctttgttcttcaaatcaggtgcccaaataagtgatcagcacagctgcttccaaataggagaaaccataaaataggatgaaaatcaagtaaaatgcaaagatgtccacactgttttaaacttgaccctgatgaaaatgtgagcactgttagcagatgcctatgggagaggaaaagcgtatctgaaaatggtccaggacaggaggatgaaatgagatcccagagtcctcacacctgaatgaattatacatgtgccttaccaggtgagtggtctttcgaagataaaaaactctagtccctttaaacgtttgcccctggcgtttcctaagtacgaaaaggtttttaagtcttcgaacagtctcctttcatgactttaacaggattctgccccctgaggtgtaatttttttgttctatttttttccacgtactccacagccaacatcacgaggtgtaatttttaatttgatcagaactgttaccaaaaaacaactgtcagttttattgagatgggaaaaatgtaaacctatttttattacttaagactttatgggagagattagacactggaggtttttaacagaacgtgtatttattaatgttcaaaacactggaattacaaatgagaagagtctacaataaattaagatttttgaatttgta

SEQ ID NO: 420926 - DNA, 5505 bp, Homo sapiens
  misc_feature (73)..(73): n is a, c, g, or t
  misc_feature (79)..(79): n is a, c, g, or t
  misc_feature (81)..(81): n is a, c, g, or t
  misc_feature (84)..(84): n is a, c, g, or t
  misc_feature (92)..(92): n is a, c, g, or t
  misc_feature (103)..(103): n is a, c, g, or t
cgggacgaggctgtgtgcgagtggcatgcagtagcccgcaccagctggcacacagcaggagtggacgacttcnccagcntncancgcaagtngttggaggtgnccggaataaactgtgtggatgcctgtcacctgaacccctgcgagaacatgggggcctgcgtgcgctcccccggctccccgcagggctacgtgtgcgagtgtgggcccagtcactacgggccgtactgtgagaacaaactcgaccttccgtgccccagaggctggtgggggaaccccgtctgtggaccctgccactgtgccgtcagcaaaggctttgatcccgactgtaataagaccaacggccagtgccaatgcaaggagaattactacaagctcctagcccaggacacctgtctgccctgcgactgcttcccccatggctcccacagccgcacttgcgacatggccaccgggcagtgtgcctgcaagcccggcgtcatcggccgccagtgcaaccgctgcgacaacccgtttgccgaggtcaccacgctcggctgtgaagtgatctacaatggctgtcccaaagcatttgaggccggcatctggtggccacagaccaagttcgggcagccggctgcggtgccatgccctaagggatccgttggaaatgcggtccgacactgcagcggggagaagggctggctgcccccagagctctttaactgtaccaccatctccttcgtggacctcagggccatgaatgagaagctgagccgcaatgagacgcaggtggacggcgccagggccctgcagctggtgagggcgctgcgcagtgctacacagcacacgggcacgctctttggcaatgacgtgcgcacggcctaccagctgctgggccacgtccttcagcacgagagctggcagcagggcttcgacctggcagccacgcaggacgccgactttcacgaggacgtcatccactcgggcagcgccctcctggccccagccaccagggcggcgtgggagcagatccagcggagcgagggcggcacggcacagctgctccggcgcctcgagggctacttcagcaacgtggcacgcaacgtgcggcggacgtacctgcggcccttcgtcatcgtcaccgccaacatgattcttgctgtcgacatctttgacaagttcaactttacgggagccagggtcccgcgattcgacaccatccatgaagagttccccagggagctggagtcctccgtctccttcccagccgacttcttcagaccacctgaagaaaaagaaggccccctgctgaggccggctggccggaggaccaccccgcagaccacgcgcccggggcctggcaccgagagggaggccccgatcagcaggcggaggcgacaccctgatgacgctggccagttcgccgtcgctctggtcatcatttaccgcaccctggggcagctcctgcccgagcgctacgaccccgaccgtcgcagcctccggttgcctcaccggcccatcattaataccccgatggtgagcacgctggtgtacagcgagggggctccgctcccgagacccctggagaggcccgtcctggtggagttcgccctgctggaggtggaggagcgaaccaagcctgtctgcgtgttctggaaccactccctggccgttggtgggacgggagggtggtctgcccggggctgcgagctcctgtccaggaaccggacacatgtcgcctgccagtgcagccacacagccagctttgcggtgctcatggatatctccaggcgtgagaacggggaggtcctgcctctgaagattgtcacctatgccgctgtgtccttgtcactggcagccctgctggtggccttcgtcctcctgagcctggtccgcatgctgcgctccaacctgcacagcattcacaagcacctcgccgtggcgctcttcctctctcagctggtgttcgtgattgggatcaaccagacggaaaacccgtttctgtgcacagtggttgccatcctcctccactacatctacatgagcacctttgcctggaccctcgtggagagcctgcatgtctaccgcatgctgaccgaggtgcgcaacatcgacacggggcccatgcggttctactacgtcgtgggctggggcatcccggccattgtcacaggactggcggtcggcctggacccccagggctacgggaaccccgacttctgctggctgtcgcttcaagacaccctgatttggagctttgcggggcccatcggagctgttataatcatcaacacagtcacttctgtcctatctgcaaaggtttcctgccaaagaaagcaccattattatgggaaaaaagggatcgtctccctgctgaggaccgcattcctcctgctgctgctcatcagcgccacctggctgctggggctgctggctgtgaaccgcgatgcactgagctttcactacctcttcgccatcttcagcggcttacagggccccttcgtcctccttttccactgcgtgctcaaccaggaggtccggaagcacctgaagggcgtgctcggcgggaggaagctgcacctggaggactccgccaccaccagggccaccctgctgacgcgctccctcaactgcaacaccaccttcggtgacgggcctgacatgctgcgcacagacttgggcgagtccaccgcctcgctggacagcatcgtcagggatgaagggatccagaagctcggcgtgtcctctgggctggtgaggggcagccacggagagccagacgcgtccctcatgcccaggagctgcaaggatccccctggccacgattccgactcagatagcgagctgtccctggatgagcagagcagctcttacgcctcctcacactcgtcagacagcgaggacgatggggtgggagctgaggaaaaatgggacccggccaggggcgccgtccacagcacccccaaaggggacgctgtggccaaccacgttccggccggctggcccgaccagagcctggctgagagtgacagtgaggaccccagcggcaagccccgcctgaaggtggagaccaaggtcagcgtggagctgcaccgcgaggagcagggcagtcaccgtggagagtaccccccggaccaggagagcgggggcgcagccaggcttgctagcagccagcccccagagcagaggaaaggcatcttgaaaaataaagtcacctacccgccgccgctgacgctgacggagcagacgctgaagggccggctccgggagaagctggccgactgtgagcagagccccacatcctcgcgcacgtcttccctgggctctggcggccccgactgcgccatcacagtcaagagccctgggagggagccggggcgtgaccacctcaacggggtggccatgaatgtgcgcactgggagcgcccaggccgatggctccgactctgaaggcagtaatgaaacttcaatttgaaccatcagtaatgaaacttcaatttgaaccatcaggaaaccgtgaggcaagcccgtcaccccacacaggctgcggcatcaccctcagaccttggagcccaaggggccactgcccttgaagtggagtgggcccagagtgtggcggtccccatggtggcagccccccgactgatcatccagacacaaaggtcttggttctcccaggagctcagggcctgtcagacctggtgacaagtgccaaaggccacaggcatgagggaggcgtggaccactgggccagcaccgctgagtcctaagactgcagtcaaagccagaactgagaggggaccccagactgggcccagaggctggccagagttcaggaacgccgggcacagaccaaagaccgcggtccagccccgcccaggcgggcatctcatggcagtgcggacccgtggctggcagcccgggcagtcctttgcaaaggcaccccttgtcttaaaatcacttcgctatgtgggaaaggtggagatacttttatatatttgtatgggactctgaggaggtgcaacctgtatatatattgcattcgtgctgactttgttatcccgagagatccatgcaatgatctcttgctgtcttctctgtcaagattgcacagttgtacttgaatctggcatgtgttgacgaaactggtgccccagcagatcaaaggtgggaaatacgtcagcagtggggctaaaaccaagcggctagaagccctacagctgccttcggccaggaagtgaggatggtgtgggccctccccgccggccccctgggtccccagtgttcgctgtgtgtgcgtttgtcctctgctgccatctgccccggctgtgtgaattcaagacagggcagtgcagcactaggcaggtgtgaggagccctgctgaggtcactgtggggcacggttgccacacggctgtcatttttcacctggtcattctgtgaccaccaccccctcccctcaccgcctcccaggtggcccgggagctgcaggtggggatggctttgtcctttgctcctgctccccgtgggacctgggaccttaaagcgttgcaggttcctgatttggacagaggtgtggggccttccaggccgttacatacctcctgccaattctctaactctctgagactgcgaggatctccaggcagggttctcccctctggagtctgaccaattacttcattttgcttcaaatggccaattgtgcagagggacaaagccacagccacactcttcaacggttaccaaactgtttttggaaattcacaccaaggtcgggcccactgcaggcagctggcacagcgtggcccgaggggctgtggaacgggtcccggaactgtcagacatgtttgattttagcgtttcctttgttcttcaaatcaggtgcccaaataagtgatcagcacagctgcttccaaataggagaaaccataaaataggatgaaaatcaagtaaaatgcaaagatgtccacactgttttaaacttgaccctgatgaaaatgtgagcactgttagcagatgcctatgggagaggaaaagcgtatctgaaaatggtccaggacaggaggatgaaatgagatcccagagtcctcacacctgaatgaattatacatgtgccttaccaggtgagtggtctttcgaagataaaaaactctagtccctttaaacgtttgcccctggcgtttcctaagtacgaaaaggtttttaagtcttcgaacagtctcctttcatgactttaacaggattctgccccctgaggtgtaatttttttgttctatttttttccacgtactccacagccaacatcacgaggtgtaatttttaatttgatcagaactgttaccaaaaaacaactgtcagttttattgagatgggaaaaatgtaaacctatttttattacttaagactttatgggagagattagacactggaggtttttaacagaacgtgtatttattaatgttcaaaacactggaattacaaatgagaagagtctacaataaattaagatttttgaatttgta

SEQ ID NO: 420927 - DNA, 1262 bp, Homo sapiens
  misc_feature (6)..(7): n is a, c, g, or t
  misc_feature (16)..(16): n is a, c, g, or t
  misc_feature (23)..(23): n is a, c, g, or t
attacnngctaggtangaggctnggtttaaattcggccgaggcctctgctgccatctgccccggctgtgtgaattcaagacagggcagtgcagcactaggcaggtgtgaggagccctgctgaggtcactgtggggcacggttgccacacggctgtcatttttcacctggtcattctgtgaccaccaccccctcccctcaccgcctcccaggtggcccgggagctgcaggtggggatggctttgtcctttgctcctgctccccgtgggacctgggaccttaaagcgttgcaggttcctgatttggacagaggtgtggggccttccaggccgttacatacctcctgccaattctctaactctctgagactgcgaggatctccaggcagggttctcccctctggagtctgaccaattacttcattttgcttcaaatggccaattgtgcagagggacaaagccacagccacactcttcaacggttaccaaactgtttttggaaattcacaccaaggtcgggcccactgcaggcagctggcacagcgtggcccgaggggctgtggaacgggtcccggaactgtcagacatgtttgattttagcgtttcctttgttcttcaaatcaggtgcccaaataagtgatcagcacagctgcttccaaataggagaaaccataaaataggatgaaaatcaagtaaaatgcaaagatgtccacactgttttaaacttgaccctgatgaaaatgtgagcactgttagcagatgcctatgggagaggaaaagcgtatctgaaaatggtccaggacaggaggatgaaatgagatcccagagtcctcacacctgaatgaattatacatgtgccttaccaggtgagtggtctttcgaagataaaaaactctagtccctttaaacgtttgcccctggcgtttcctaagtacgaaaaggtttttaagtcttcgaacagtctcctttcatgactttaacaggattctgccccctgaggtgtaatttttttgttctatttttttccacgtactccacagccaacatcacgaggtgtaatttttaatttgatcagaactgttaccaaaaaacaactgtcagttttattgagatgggaaaaatgtaaacctatttttattacttaagactttatgggagagattagacactggaggtttttaacagaacgtgtatttattaatgttcaaaacactggaattacaaatgagaagagtctacaataaattaagatttttgaatttgta

SEQ ID NO: 420928 - DNA, 1185 bp, Homo sapiens
  misc_feature (6)..(7): n is a, c, g, or t
  misc_feature (16)..(16): n is a, c, g, or t
  misc_feature (23)..(23): n is a, c, g, or t
attacnngctaggtangaggctnggtttaaattcggccgaggtgaggtcactgtggggcacggttgccacacggctgtcatttttcacctggtcattctgtgaccaccaccccctcccctcaccgcctcccaggtggcccgggagctgcaggtggggatggctttgtcctttgctcctgctccccgtgggacctgggaccttaaagcgttgcaggttcctgatttggacagaggtgtggggccttccaggccgttacatacctcctgccaattctctaactctctgagactgcgaggatctccaggcagggttctcccctctggagtctgaccaattacttcattttgcttcaaatggccaattgtgcagagggacaaagccacagccacactcttcaacggttaccaaactgtttttggaaattcacaccaaggtcgggcccactgcaggcagctggcacagcgtggcccgaggggctgtggaacgggtcccggaactgtcagacatgtttgattttagcgtttcctttgttcttcaaatcaggtgcccaaataagtgatcagcacagctgcttccaaataggagaaaccataaaataggatgaaaatcaagtaaaatgcaaagatgtccacactgttttaaacttgaccctgatgaaaatgtgagcactgttagcagatgcctatgggagaggaaaagcgtatctgaaaatggtccaggacaggaggatgaaatgagatcccagagtcctcacacctgaatgaattatacatgtgccttaccaggtgagtggtctttcgaagataaaaaactctagtccctttaaacgtttgcccctggcgtttcctaagtacgaaaaggtttttaagtcttcgaacagtctcctttcatgactttaacaggattctgccccctgaggtgtaatttttttgttctatttttttccacgtactccacagccaacatcacgaggtgtaatttttaatttgatcagaactgttaccaaaaaacaactgtcagttttattgagatgggaaaaatgtaaacctatttttattacttaagactttatgggagagattagacactggaggtttttaacagaacgtgtatttattaatgttcaaaacactggaattacaaatgagaagagtctacaataaattaagatttttgaatttgta

SEQ ID NO: 420929 - DNA, 396 bp, Homo sapiens
acgtgcggcggacgtacctgcggcccttcgtcatcgtcaccgccaacatgagtaaggcgctggctgcgttgggggtggaaccctgctaccatcaggggtgtgccccagagctaggcccccatggggtgaagcaggtgggctcccggcccccccttggccatgctcttagaaaaatgattgtgaggccgggcacagtggctcatacctgtaatcccagcactttgggagatcgggacaggcagaccacatgaggtcaggagttggagaccagcctgggcaaaatggtgaaaccccatctctactaaaaatacaaaaagtagccaggtgtggtggtgcatgcctgtaatcccagctactcaggaggctgaggaaggagaatcacttgaacctgggagg

SEQ ID NO: 420930 - DNA, 331 bp, Homo sapiens
tctactgagcctgctagcatagtaaacagttttgaatgagggatattattgaaacagattatgaaatgagttggtttgttttgcgtgtttatggttaacatagtagtttcatgttttctgtttcatttcaaggtatcaatgctgtagatggatggaagaggcttcccacaggaaggtgccaccagtcagttgtgcctatgtccctttggctggaaatgcagaatatgaattgattagttctctccaagccattgcttaaaatataacatgttttggatccaatacacacattgttacaactaacacaaattcctattaaatattaaaagta

SEQ ID NO: 420931 - DNA, 4466 bp, Homo sapiens
cttcttcctcgctctccacagcccctcccatgccagacgccggctcggcaccccctcttcgctgtgcatttctgcttcccccgaaagcccgagtagtaaagggaggctccttgcggcccccgcgggctcccagggacccgcaagttgaagcgcgagggttccacgcgggctgcggggacgcgggcctcggtgctgcagactttctcagggcgcctgggtcgcggcaggcgcggagtcccgagcgcagcagctgctccgccggcctcgcctccgacccccgccctgcgccaagcgcggaagcgctcgcgacctaactgccccgggtgccgggcgcctagggaggggccgccaccgcccgctccgccccgggggcctgcgcccagcagcccccgcctccccggaatccagaggccgagccggaggcggcggggccacggtgggagcccgcgaggtggcccgagcgagggccccgcatccccgcagagcccgcccgagggcgcagcctgccacgccaggggaggcggccgggcggcggggaacggcgggggcggagcgcagcctcccgacgccgccgcctcaccgcccccctccgcctcctcggcctccgctcgcagccgccgcctccgcctccgccgggctgaggagccgggagtccgccgcgccggctcggggctgcgggatggggagttagcgccacggcggcggcagtggccgcagcgcaccccgccgccgcccaggagcccgtccagccaggggtgccgggcccgcccagcccgccccggagccaggcccgcgggcggcggcggagctgggcaggtggatgcggctggaagatggcgccctcgggcccgggcagcagcgccaggcggcggtgccggcgggtgctgtactggatcccggtggtgttcatcaccctcctgctcggctggtcctactacgcctacgccatccagctgtgcatagtgtccatggaaaacactggcgaacaagttgtgtgcctgatggcctatcatctactttttgcaatgtttgtctggtcatactggaaaactatctttacattaccaatgaatccttcaaaagaattccatctctcttatgcagagaaagatttgttggagagagagccaagaggagaagcccatcaggaagttcttaggcgagcagccaaggatcttcccatctataccaggaccatgtctggagccatccgatactgtgacagatgccaacttataaaaccagatcgctgccatcactgctccgtctgtgataaatgtattttgaagatggatcatcattgtccatgggtgaacaattgtgttggattttcaaattataagttctttctccttttcttggcttattctctgctctactgcctttttattgcggcaacagatttacagtattttatcaaattttggacaaatggcctacctgatactcaagccaagttccatattatgtttttattctttgctgcagctatgttttctgtcagcttgtcttctctgtttggctatcattgttggctagtcagcaaaaataaatctacattagaggcattcagaagtccagtatttcgacatggaacagataagaatggattcagcttgggtttcagtaaaaacatgcgacaagtttttggtgatgagaagaagtactggttgctacccattttttcaagtctaggtgatggctgctcctttccaacttgccttgttaaccaggatcctgaacaagcatctactcctgcagggctgaattccacagctaaaaatctcgaaaaccatcagtttcctgcaaagccattgagagagtcccagagccaccttcttactgattctcagtcttggacggagagcagcataaacccaggaaaatgcaaagctggtatgagcaatcctgcattaaccatggaaaatgagacttaactcttcaagcaagataaattcatactttataaaagtatcaatgctgtagatggatggaagaggcttcccacaggaaggtgccaccagtcagttgtgcctatgtccctttggctggaaatgcagaatatgaattgattagttctctccaagccattgcttaaaatataacatgttttggatccaatacacacattgttacaactaacacaaattcctattaaatattaaaagtagttctggtttattaatcaacggggaaaacatcttctccaaaaaacttggaataaatccaaggaccagtttttacccaaatatatgggtagcacagtttatcacatagaaactccattaatcatctgattttccgaatctgaaaattgagactattaagatattaagatttcagagatttcaagtcacattataatgataagcattattcataaaacttgttacctttaagaaggtggaagtggcaaaccatacttcttttttttcctctgatgtgaatccagcctcagactgagtgaactgtaataattatgaattcattacagagtccaggtggcctgcagttgaagatcatcaaccatttttgcctcacttaattccagccttttgttttctgctggaaaataagtgtggacattgaagcttgagctctcaaagcagttggctggaatacttttgtcagaatacggtacatttctattacatcagaaatatattttcatctcttcttgttaaattgggaggaaatttatgatagcaattatgaagattgttttatgacattcttttgtcagtttggctttctaaaaatctctttttagattatttctcctgttgaacatagtaaaactattgaatttctcttaagaattcctaataggtcaatagatttaccctccagtgatatctatattatttctttctcgtctcatcaaaatgatgacaggtaaactatatttttccttaaacacctattacagttaaattatgcaaatcattaaataaaaatcatacaacttttggaaagttagttcaacatgaactaaaatggcatgctatttggaaatttagtttgagataaactaaagtgtgttgatgccagaatgttcagcttcagtaaatataataagctcttgtgccttgtatgcactatttaaaaaaagttttttttatttgagtccagtataattcatgtaaatgttaacaattagaataatactctgtatgcttttttgatactgattttgagaatttaaagcagattaccttttaaaactggaccaactaagtaattggtatttaatcaaagagaaaatggtaataaacttttcaaaatctttgttaaaccaaacattcaacacaaaataaactagaaggccagaggataatggaataaaagatcattgcaattacttatccttcctaaaaatatagttttatattaattgtgcttatggaagaaacaatgtcagccaagtccattttatagtttgagtgcaattctttgaacaatagaaatatctgcagtctttcacagatttgtattatgctgaagagtttcatctgacaatctgcttcaagaaatctcagaaaatatgataacattttaactttcattttagagcacgttttggtcatttttaaaaatacctaaagtgccagaccggaacctatagctactgctagaagtcttaaaaaaaccaacagcagcacaggatgtattaagaattatatgaagtcaggtttgttttttttttttttttttttttcaaagcacagtactgttagctgtttttgtggacaggattcgattaagtattccctcttgtcaaactggaagctaggggaaaaagagggatttttatcctttactcttctagagtactgttaatgcccctttcccacagtcttttatataattaaatatatgtcaatacacattagaatcagatttgaaaaagttaaaacaatttcattgttgtaattgttccctttctgttttcatatagtgaataacctttaaagggttgttttgttttgttttgaattataggagttataatctttggagatgattgcatatctcattagatatgcaatataaatttatctgagtgaacaaagtgctaaataaatagatctacattttgtacatatttatataaaatttacctttaagtatttactttaaaaaatttaatggcttaactcgaacttgaagacacatacttcaactgtccttattgtccattaaactgataattttgatttttcttgcttttatagattttactatataggaatcaagatttaagaaattttgcattaaaaatagtgtaccaatgcttcatatacgttagttatttgctattatgtagggaagaggattgttatttcaaagatatattaaagaacagttgcatctgaatataatcatgatgcattcaatgaagttcatatccatgaattcactcctaatataccctaataaagtggttgaaactgcaaaaaaaaaaa

SEQ ID NO: 420932 - DNA, 4362 bp, Homo sapiens
cttcttcctcgctctccacagcccctcccatgccagacgccggctcggcaccccctcttcgctgtgcatttctgcttcccccgaaagcccgagtagtaaagggaggctccttgcggcccccgcgggctcccagggacccgcaagttgaagcgcgagggttccacgcgggctgcggggacgcgggcctcggtgctgcagactttctcagggcgcctgggtcgcggcaggcgcggagtcccgagcgcagcagctgctccgccggcctcgcctccgacccccgccctgcgccaagcgcggaagcgctcgcgacctaactgccccgggtgccgggcgcctagggaggggccgccaccgcccgctccgccccgggggcctgcgcccagcagcccccgcctccccggaatccagaggccgagccggaggcggcggggccacggtgggagcccgcgaggtggcccgagcgagggccccgcatccccgcagagcccgcccgagggcgcagcctgccacgccaggggaggcggccgggcggcggggaacggcgggggcggagcgcagcctcccgacgccgccgcctcaccgcccccctccgcctcctcggcctccgctcgcagccgccgcctccgcctccgccgggctgaggagccgggagtccgccgcgccggctcggggctgcgggatggggagttagcgccacggcggcgctgggcaggtggatgcggctggaagatggcgccctcgggcccgggcagcagcgccaggcggcggtgccggcgggtgctgtactggatcccggtggtgttcatcaccctcctgctcggctggtcctactacgcctacgccatccagctgtgcatagtgtccatggaaaacactggcgaacaagttgtgtgcctgatggcctatcatctactttttgcaatgtttgtctggtcatactggaaaactatctttacattaccaatgaatccttcaaaagaattccatctctcttatgcagagaaagatttgttggagagagagccaagaggagaagcccatcaggaagttcttaggcgagcagccaaggatcttcccatctataccaggaccatgtctggagccatccgatactgtgacagatgccaacttataaaaccagatcgctgccatcactgctccgtctgtgataaatgtattttgaagatggatcatcattgtccatgggtgaacaattgtgttggattttcaaattataagttctttctccttttcttggcttattctctgctctactgcctttttattgcggcaacagatttacagtattttatcaaattttggacaaatggcctacctgatactcaagccaagttccatattatgtttttattctttgctgcagctatgttttctgtcagcttgtcttctctgtttggctatcattgttggctagtcagcaaaaataaatctacattagaggcattcagaagtccagtatttcgacatggaacagataagaatggattcagcttgggtttcagtaaaaacatgcgacaagtttttggtgatgagaagaagtactggttgctacccattttttcaagtctaggtgatggctgctcctttccaacttgccttgttaaccaggatcctgaacaagcatctactcctgcagggctgaattccacagctaaaaatctcgaaaaccatcagtttcctgcaaagccattgagagagtcccagagccaccttcttactgattctcagtcttggacggagagcagcataaacccaggaaaatgcaaagctggtatgagcaatcctgcattaaccatggaaaatgagacttaactcttcaagcaagataaattcatactttataaaagtatcaatgctgtagatggatggaagaggcttcccacaggaaggtgccaccagtcagttgtgcctatgtccctttggctggaaatgcagaatatgaattgattagttctctccaagccattgcttaaaatataacatgttttggatccaatacacacattgttacaactaacacaaattcctattaaatattaaaagtagttctggtttattaatcaacggggaaaacatcttctccaaaaaacttggaataaatccaaggaccagtttttacccaaatatatgggtagcacagtttatcacatagaaactccattaatcatctgattttccgaatctgaaaattgagactattaagatattaagatttcagagatttcaagtcacattataatgataagcattattcataaaacttgttacctttaagaaggtggaagtggcaaaccatacttcttttttttcctctgatgtgaatccagcctcagactgagtgaactgtaataattatgaattcattacagagtccaggtggcctgcagttgaagatcatcaaccatttttgcctcacttaattccagccttttgttttctgctggaaaataagtgtggacattgaagcttgagctctcaaagcagttggctggaatacttttgtcagaatacggtacatttctattacatcagaaatatattttcatctcttcttgttaaattgggaggaaatttatgatagcaattatgaagattgttttatgacattcttttgtcagtttggctttctaaaaatctctttttagattatttctcctgttgaacatagtaaaactattgaatttctcttaagaattcctaataggtcaatagatttaccctccagtgatatctatattatttctttctcgtctcatcaaaatgatgacaggtaaactatatttttccttaaacacctattacagttaaattatgcaaatcattaaataaaaatcatacaacttttggaaagttagttcaacatgaactaaaatggcatgctatttggaaatttagtttgagataaactaaagtgtgttgatgccagaatgttcagcttcagtaaatataataagctcttgtgccttgtatgcactatttaaaaaaagttttttttatttgagtccagtataattcatgtaaatgttaacaattagaataatactctgtatgcttttttgatactgattttgagaatttaaagcagattaccttttaaaactggaccaactaagtaattggtatttaatcaaagagaaaatggtaataaacttttcaaaatctttgttaaaccaaacattcaacacaaaataaactagaaggccagaggataatggaataaaagatcattgcaattacttatccttcctaaaaatatagttttatattaattgtgcttatggaagaaacaatgtcagccaagtccattttatagtttgagtgcaattctttgaacaatagaaatatctgcagtctttcacagatttgtattatgctgaagagtttcatctgacaatctgcttcaagaaatctcagaaaatatgataacattttaactttcattttagagcacgttttggtcatttttaaaaatacctaaagtgccagaccggaacctatagctactgctagaagtcttaaaaaaaccaacagcagcacaggatgtattaagaattatatgaagtcaggtttgttttttttttttttttttttttcaaagcacagtactgttagctgtttttgtggacaggattcgattaagtattccctcttgtcaaactggaagctaggggaaaaagagggatttttatcctttactcttctagagtactgttaatgcccctttcccacagtcttttatataattaaatatatgtcaatacacattagaatcagatttgaaaaagttaaaacaatttcattgttgtaattgttccctttctgttttcatatagtgaataacctttaaagggttgttttgttttgttttgaattataggagttataatctttggagatgattgcatatctcattagatatgcaatataaatttatctgagtgaacaaagtgctaaataaatagatctacattttgtacatatttatataaaatttacctttaagtatttactttaaaaaatttaatggcttaactcgaacttgaagacacatacttcaactgtccttattgtccattaaactgataattttgatttttcttgcttttatagattttactatataggaatcaagatttaagaaattttgcattaaaaatagtgtaccaatgcttcatatacgttagttatttgctattatgtagggaagaggattgttatttcaaagatatattaaagaacagttgcatctgaatataatcatgatgcattcaatgaagttcatatccatgaattcactcctaatataccctaataaagtggttgaaactgcaaaaaaaaaaa

SEQ ID NO: 420933 - DNA, 2170 bp, Homo sapiens
cttcttcctcgctctccacagcccctcccatgccagacgccggctcggcaccccctcttcgctgtgcatttctgcttcccccgaaagcccgagtagtaaagggaggctccttgcggcccccgcgggctcccagggacccgcaagttgaagcgcgagggttccacgcgggctgcggggacgcgggcctcggtgctgcagactttctcagggcgcctgggtcgcggcaggcgcggagtcccgagcgcagcagctgctccgccggcctcgcctccgacccccgccctgcgccaagcgcggaagcgctcgcgacctaactgccccgggtgccgggcgcctagggaggggccgccaccgcccgctccgccccgggggcctgcgcccagcagcccccgcctccccggaatccagaggccgagccggaggcggcggggccacggtgggagcccgcgaggtggcccgagcgagggccccgcatccccgcagagcccgcccgagggcgcagcctgccacgccaggggaggcggccgggcggcggggaacggcgggggcggagcgcagcctcccgacgccgccgcctcaccgcccccctccgcctcctcggcctccgctcgcagccgccgcctccgcctccgccgggctgaggagccgggagtccgccgcgccggctcggggctgcgggatggggagttagcgccacggcggcggcagtggccgcagcgcaccccgccgccgcccaggagcccgtccagccaggggtgccgggcccgcccagcccgccccggagccaggcccgcgggcggcggcggagctgggcaggtggatgcggctggaagatggcgccctcgggcccgggcagcagcgccaggcggcggtgccggcgggtgctgtactggatcccggtggtgttcatcaccctcctgctcggctggtcctactacgcctacgccatccagctgtgcatagtgtccatggaaaacactggcgaacaagttgtgtgcctgatggcctatcatctactttttgcaatgtttgtctggtcatactggaaaactatctttacattaccaatgaatccttcaaaagaattccatctctcttatgcagagaaagatttgttggagagagagccaagaggagaagcccatcaggaagttcttaggcgagcagccaaggatcttcccatctataccaggaccatgtctggagccatccgatactgtgacagatgccaacttataaaaccagatcgctgccatcactgctccgtctgtgataaatgtattttgaagatggatcatcattgtccatgggtgaacaattgtgttggattttcaaattataagttctttctccttttcttggcttattctctgctctactgcctttttattgcggcaacagatttacagtattttatcaaattttggacaaatggcctacctgatactcaagccaagttccatattatgtttttattctttgctgcagctatgttttctgtcagcttgtcttctctgtttggctatcattgttggctagtcagcaaaaataaatctacattagaggcattcagaagtccagtatttcgacatggaacagataagaatggattcagcttgggtttcagtaaaaacatgcgacaagtttttggtgatgagaagaagtactggttgctacccattttttcaagtctaggtgatggctgctcctttccaacttgccttgttaaccaggatcctgaacaagcatctactcctgcagggctgaattccacagctaaaaatctcgaaaaccatcagtttcctgcaaagccattgagagagtcccagagccaccttcttactgattctcagtcttggacggagagcagcataaacccaggaaaatgcaaagctggtatgagcaatcctgcattaaccatggaaaatgagacttaactcttcaagcaagataaattcatactttataaaagtatcaatgctgtagatggatggaagaggcttcccacaggaaggtgccaccagtcagttgtgcctatgtccctttggctggaaatgcagaatatgaattgattagttctctccaagccattgcttaaaatataacatgttttggatccaatacacacattgttacaactaacacaaattcctattaaatattaaaagta

SEQ ID NO: 420934 - DNA, 483 bp, Homo sapiens
gcctggcctgatacggtttctcgcaggctctgtgctttgagggatgtgcatacttgcgtaatttgagatgacatgcagttacattgtttgtgattgactaaagcaatattaaatatcatgttttaaaaatagaagcagattttttagtgaaatggatttttacatgattgtatgcataaagaaatcttatgagttatatttaaagaaatgccaataaattagaagtgagaggaagctaaacacttgcttgagcatatgcacatgtaggttgaagatgtaaaactcactggaaatgtttttgttttgttaacagggtgaacaattgtgttggattttcaaattataagttctttctccttttcttggcttattctctgctctactgcctttttattgcggcaacagatttacagtattttatcaaattttggacagtaagtcattaacttggtaactctttttttggtatacaataatagataa

SEQ ID NO: 420935 - DNA, 758 bp, Homo sapiens
acaaggcacctttggaagtctaccaagggattccttattcatagatgaataagaagtttctgcctatttgttcaaaagcaaccaaaaatgctaacttatgtgctttcattaaggtatgagcaatcctgcattaaccatggaaaatgagacttaactcttcaagcaagataaattcatactttataaaagtacgataattttccctttattgttttatatttttaacagtcttctaattttattagggcaaatagtttccataaacatttttaataatttgtgagtgattcatatagaagatcttttacctgacttgtgagattgcattagccatgctggggcttctgagtgcagacctagcttcagtattagctggtatttgtgttaacttgattaattatataaataagttgatgaacaagagtcattttatattaatgcattaagtggtagggatcaatcctaaaatactgaactatatgtaaaaattatcttgtcattttataggaagttagaataattatttttaatttttcttcatctttcagaatatacagtggtcatatccttgaccatccattaggaaactctaagtcgaagtgcaatataattatatctcattaatgtactcattagcacactgtcattcccatttttgggtcatagtagggccttatagcatgtgttaaccttaaaataataggtgttccaaatcattttctttaagccttatttttttttaaacctgcagttccaaa

SEQ ID NO: 420936 - DNA, 7662 bp, Homo sapiens
tgtgttcaagaccaggctttctacaattgtcagtgggaccttcattatgcccaaatccttaagtaaaccctatgtgtgatgctgatatatttgtggaagccctttcttaatggcgaatatatcagatttaaccatatgaaattgccattttgtaggtgataataaacagttgactatcatcaatttcataggcctgatgtcaatttcatatttcattctttaaagaccgccactcattgttggaaataaaaggacaaaggtaggctggcatagcctctccaagagagcagatcgctgcacttacaaagggttttggggatgtgtggagttcaaggactggtgaggttttggaggcatacatgggttgatggcatctgtataggtggttacttgaaaagcctgttattcatcagttgcccctcaagtctgcagtgagtcggctaactctcagaagccaggggttgtcatggactggctgccttacaaaagctgtgcactgaggggtgtttacatgatggaataggttcaaagctggttctagtggccacttgttaccatggctgcagatgatccgagaactttcattctcatggttcaacctaagaaaggtctataagagtataccccactcttgaaagcaggtggtggagacgttgactactcaccaccatttcctgaaatcaatttgaagagaaagatacctttgtggacactgttctcaagttctgaaagtgggtagcattacattggcagtttaaacacttgcttttttttttttgagtcttgctctgtcacccagtttggagtgcagtggtgcagtctcggctcactgcgacctcggcctcctggattcaagttcagcctcccgggtggctgggattgtaggagtgtgccaccacgcatggctaatctttttgtgtttttggtggagatggagtttcacactgtttgcggactggtaccaagttcctgacttcaaatgctctgcctgcctcggcctccctaggtgttgggattacaggcgtgagccaccgtgctcagcctaaatacttgctttgattttgcagatctggtgctccaaattgattaagacacaagaccgttctctccaaatcagagagctactcatctctcccttccatgtgtttcttgtactgctccctctatctcttatcatgagactcctctcttcctgcagtgtggtaaaactacagcaatcgtcttaacctgtgagatctgtcacctttgcattttccactcatgcagctggttctataaaccaactcttctgcttggggggatctaatcatgaccttttacccttttgtggcctcttctagtacaaggcgagtggataattccaacacaagactggcagtccaaattgaaagagatccagggaatgatgacaacaatctcaattccattttttatgaacacttgacaaggaccctccaggagtccctctgtggagacttagttcttggacgttggggcaactacagctctggcgattgctttattttggcttcagatgacctcaatgcctttgttcacctgattgaaattggaaatggtcttgtcacctttcaacttcgaggactggaattccgaggaacctactgccagcagagggaggtagaagccatcatggagggcgacgaggaggacagaggctgctgctgctgcaaaccaggccacttgcctcacctgctgtcctgcaacgctgcctttcacctccgctggctcacctgggaaatcacgcagacccagtacatcctggagggctacagcatcctggacaacaacgcggccaccatgctgcaggtgtttgacctccgaaggatcctcatccgctactacatcaagagtataatatactatatggtaacgtctcccaaactcctctcctggatcaaaaatgaatcacttctgaagtccctgcagccctttgccaagtggcattacattgagcgtgaccttgcaatgttcaacattaacattgatgatgactacgtcccgtgtctccaggggatcacacgagctagcttctgcaatgtttatctagaatggattcaacactgtgcacggaaaagacaagagccttcaacgaccctggacagtgacgaggactctcccttggtgactctgtccttcgccctgtgcaccctggggaggagagctctgggaacagccgctcacaatatggccatcagcctggattctttcctgtatggcctccatgtcctcttcaaaggtgacttcagaataacagcacgtgacgagtgggtatttgctgacatggacctactgcataaagttgtagctccagctatcaggatgtccctgaaacttcaccaggaccagttcacttgccctgacgagtatgaagacccagcagtcctctacgaggccatccagtccttcgagaagaaggtggtcatctgccacgagggcgacccggcctggcggggcgcagtgctgtccaacaaggaagagctgctcaccctgcggcacgtggtggacgagggtgccgacgagtacaaggtcatcatgctccacagaagcttcctgagcttcaaggtgatcaaggttaacaaagaatgcgtccgaggactttgggccgggcagcagcaggagcttatatttcttcgcaaccgcaatccggagcgcggcagtatccagaacaataagcaggtcctgcggaacttgattaactcctcctgcgatcagcccctggggtaccccatgtatgtctccccactaaccacatcctacctagggacacacaggcagctgaagaacatctggggtggacccatcactttggacagaattaggacctggttctggaccaagtgggtaaggatgcggaaggattgcaatgcccgccagcacagtggcggcaacattgaagacgtggacggaggaggggccccgacgacaggtggcaacaatgccccgagtggtggcagccaggagagcagcgcagaacagcccagaaaaggcggtgctcagcacggggtgtcatcctgtgaagggacacagagaacaggcaggaggaaaggcaggagccagtccgtgcaggcacactcagcgctaagccaaaggccgcccatgctgagctcatctggccccatcttagagagccgccaaacattcctccagacgtccacctcagtgcacgagctggcccagaggctctcgggcagccggctctccttgcacgcctcggccacgtccctgcactctcagcccccgcccgtcaccaccaccggccacctgagtgtccgtgagcgggccgaggcgctcatcaggtccagcctgggctcctccaccagctccaccctgagcttcctcttcggcaagaggagcttttccagcgcgctcgtcatttccggactctctgctgcggaggggggcaataccagtgacacccagtcatccagcagcgtcaacatcgtgatgggcccctcagccagggctgccagccaggccactcgggtaaggggctgggcagggctcaccaggacaggctgggatggtggcacgggctcctggcctgagcgtggcacctgccttgcgttcccacccttctgcctgcagaaccccatccccttctctatggggctcccagagtgacaaaggacagtgattagacacgaagtggcttagctgctcttgaaagcagacaagatacagagcagatatcctgtaaacgataatgcccaggcaggcactgaaaggagtcaccggatacagaggttctgcagaactgtggccatctgccctacaccggggcatgacggagaatgccctccacccattcacacagcaggactcttctcacatgattctggcctgagggagaggaaaggacacctgtcaatgctggagttagagcttcactgcttctcagccaatcgatttgactttaaagctgctgagatggcccactgcttttaggtatttaaatactagacaaggagagttctaaggacttcacccaaataagctgttacttgtccagaatcccaaaccagctgagatgaaatgaatacttgagcttcttcagtgagaaaaaagtaaataaatacccagcagtgctcctatgtgacctggtagacagggaaaatcgatggtgtcaaggcaaaaatgggtcaggtttggagagttcccccactccttttgagtgttcaggttttccttaccatggctcatgctttccatcaagcaccagagttgcagtggcttggcctctggttctgggtgaggttatttgcaggtggagacggggggctgcacctgaacatttctagtgtcaccctccctctccttcatgggaaacagctctccagggaagtaccttcctgccaggggaagccaaggctgggccggccgccctacaaggagccacaggattgcagccatgggtgccacctttcatggaaggggagatttatgggctttcctggaacccccaggctgtcctggccaagaggaaagaggtggttacttcaggagtttgaccttagttagataactaaaagaatacatttcccctcccttttctttatttcctcaataaaaatgtacaaagtatcacccttctccatgccccaatctgtgttaaagtcacaatctatgggtgtagttctgggattctgtcaaattctccttcctgctctccaaaatggacaattgtcgtagggaccacatgcccccagaatacaatggcctctgtgttctactggggtcaagcctgctagaactcagcattcatgacaggggctaagtgtgcatgaagtgacactgactacagctagaaagccaggcgcacaaatgccccttccccccagggccgctctttccagcgcagtcatccagaaaggcccacgtgcagagcccctgtgtctcagatgctgcttcagttgcccgtcctgtcctcagaggccactgtgctggccctctatcatttgacctgactttagaacctgacctcaaggatatggcagcgctagcctttagctcccacagcacggatgggggtgatgccagttagaagtgggtagtgaacgtttgctgagctgttcactgtttctctcttctctttggaagcacctctccgagccatgtgagccccctgatgccaccgagcaggggcagcttcatgaccgatgtctggctgaggctgtggcggacactctcggggttgtctgcaggagagcaagccaggaggacatgggcctggacgacacggcctcgcagcaaagtgtgtcagacgagcagtgacgggcgtgcggccgggcggggaggctggctcccccacacctcccacctgcattgctctccctcgtgctccccaaatcaccacaaccaaccaataccgcgatccatgagggactcctcctgtggaaaaggagagctgttccagaacacagaactgatctcaggtttttgaaaaaaaaaaaaaaaaaaaaaaaaaatcaaacaacaacaacaaaaaaacctcacatgatggggaaacaaaaaaaagcaacaaagaagccacaccacacctccctggccaggcacagcgctgcccagagcggcacaccgcggacagcaccacacatgttccagaatctgaaatctcaaaagccattcactaacttaaaacaactcaacagagccatgaaacaaatgccctgatgaaaataagacaactgcatgttacatcatcggcactttatacattactgttaccatgaaaaagaaatgaacagcagcacgtctgataccatcagctgggcagatgcattaaggttaaatctaagtgtcaagaaaaccctatttctttataatatttatgcagctgttaagcgtaacatggtggcagcttcacaacaagaaccgtgatcatgcatgcagtcatgtctccagtattctgtgaaaagccaggatacgttaggatgtgagtttagaaactgagtccattcggtgcatggaaatccaccgcggagtcacacaatgctcctcactgtagtccaggcgattggtgggccgccagcaccctgcgggcttcacagggacgcgtgcttgttctccaagccccgcaacccttactgtgcacacaacatcgcacacacctttgtttttgaaattaaaatgtttatagttattgctgcgtccagtgttttgagttatactgaagcttctcatttctacaagtatatcttttatggtgagaacgacatttgggtaaattctgagacaacttttcccatcttcaagaccccaggaacctgtatccttgctggggtagaggtcccaaaatgcagtccatagagtatcactggcctggtgaaccatcccttttcaaaagacaatagttagaaggaaatactcaattttaaacagtcacacaaatttcttcaaagtatttaggatttggaaatttgaggagagggttgggggaagggtattgtagagaatctcttgccccttggaaagtaaatggtaatgcttttctaatttttttttttgtaaactaagaatcagcaattaataaaagcaagtgtactctataatcacagacagaaggttcttattttcaggtcagcactccctagaggtgcaaactttatttaatttaaatgcagttgtttgtctaatgggaagctgatagggccttgctgcagttctctaaggtggccaaattaaacttggctggcagctcctgtaatcctcttgggcaactttacagccaagccccaagggctaaatggcaggcctggagctgtgagtgtggcctccccacggagggtgactccttgagttcagtgaggaaaaccacggtgcctggcagtggtcagccaggagtatgactggccactccttaggcatccagaagtaggaaacacagaaagcattccacaaaacggggaatctccccaaagagctagaaacccaggctggaaggaaatggcagcgcaggcaagagagcaagagcaccctgggtgctcctccatcccgtttctctggggaggttcatgaggtgcttcttcaacagttattctgttcattgcttatcacagttcacgagttctcgtggcatcttttgtggggaggagggaggatgaaagtgacacagtgtatctacaacactaaggtcacattaatcagataggaatgcagtgacgctctgcaccgtctatgagagcgggcatctcgagtgtgcataccgaggcacagatgtgcacacacatccgcaggcaactgcacccacagagaaaaggtggcagtattggagtcaccccaggattcttgggggctgtttgaccagccatcaacagtgcagccatacttctttttcttttttatcgtggtacacaacttttatatttacaactcatgaacttgttaatctggtccttcatctagtcagctatgtatcagaaaggacttcctgcaaaatgttatattctaagcccccatttagaggaggcatccctaaactgacatttcttgctagagttgttcaaatattctgccagtatatagctaaagagttattttccagttcaagagttatttgggggctcctcacccgccacatgcccgacttgtccacagttagagagaaggcacactgctgcttataccagtgggtttgtagccaat

SEQ ID NO: 420937 - DNA, 7774 bp, Homo sapiens
tgtgttcaagaccaggctttctacaattgtcagtgggaccttcattatgcccaaatccttaagtaaaccctatgtgtgatgctgatatatttgtggaagccctttcttaatggcgaatatatcagatttaaccatatgaaattgccattttgtaggtgataataaacagttgactatcatcaatttcataggcctgatgtcaatttcatatttcattctttaaagaccgccactcattgttggaaataaaaggacaaaggtaggctggcatagcctctccaagagagcagatcgctgcacttacaaagggttttggggatgtgtggagttcaaggactggtgaggttttggaggcatacatgggttgatggcatctgtataggtggttacttgaaaagcctgttattcatcagttgcccctcaagtctgcagtgagtcggctaactctcagaagccaggggttgtcatggactggctgccttacaaaagctgtgcactgaggggtgtttacatgatggaataggttcaaagctggttctagtggccacttgttaccatggctgcagatgatccgagaactttcattctcatggttcaacctaagaaaggtctataagagtataccccactcttgaaagcaggtggtggagacgttgactactcaccaccatttcctgaaatcaatttgaagagaaagatacctttgtggacactgttctcaagttctgaaagtgggtagcattacattggcagtttaaacacttgcttttttttttttgagtcttgctctgtcacccagtttggagtgcagtggtgcagtctcggctcactgcgacctcggcctcctggattcaagttcagcctcccgggtggctgggattgtaggagtgtgccaccacgcatggctaatctttttgtgtttttggtggagatggagtttcacactgtttgcggactggtaccaagttcctgacttcaaatgctctgcctgcctcggcctccctaggtgttgggattacaggcgtgagccaccgtgctcagcctaaatacttgctttgattttgcagatctggtgctccaaattgattaagacacaagaccgttctctccaaatcagagagctactcatctctcccttccatgtgtttcttgtactgctccctctatctcttatcatgagactcctctcttcctgcagtgtggtaaaactacagcaatcgtcttaacctgtgagatctgtcacctttgcattttccactcatgcagctggttctataaaccaactcttctgcttggggggatctaatcatgaccttttacccttttgtggcctcttctagtacaaggcgagtggataattccaacacaagactggcagtccaaattgaaagagatccagggaatgatgacaacaatctcaattccattttttatgaacacttgacaaggaccctccaggagtccctctgtggagacttagttcttggacgttggggcaactacagctctggcgattgctttattttggcttcagatgacctcaatgcctttgttcacctgattgaaattggaaatggtcttgtcacctttcaacttcgaggactggaattccgaggaacctactgccagcagagggaggtagaagccatcatggagggcgacgaggaggacagaggctgctgctgctgcaaaccaggccacttgcctcacctgctgtcctgcaacgctgcctttcacctccgctggctcacctgggaaatcacgcagacccagtacatcctggagggctacagcatcctggacaacaacgcggccaccatgctgcaggtgtttgacctccgaaggatcctcatccgctactacatcaagagtataatatactatatggtaacgtctcccaaactcctctcctggatcaaaaatgaatcacttctgaagtccctgcagccctttgccaagtggcattacattgagcgtgaccttgcaatgttcaacattaacattgatgatgactacgtcccgtgtctccaggggatcacacgagctagcttctgcaatgtttatctagaatggattcaacactgtgcacggaaaagacaagagccttcaacgaccctggacagtgacgaggactctcccttggtgactctgtccttcgccctgtgcaccctggggaggagagctctgggaacagccgctcacaatatggccatcagcctggattctttcctgtatggcctccatgtcctcttcaaaggtgacttcagaataacagcacgtgacgagtgggtatttgctgacatggacctactgcataaagttgtagctccagctatcaggatgtccctgaaacttcaccaggaccagttcacttgccctgacgagtatgaagacccagcagtcctctacgaggccatccagtccttcgagaagaaggtggtcatctgccacgagggcgacccggcctggcggggcgcagtgctgtccaacaaggaagagctgctcaccctgcggcacgtggtggacgagggtgccgacgagtacaaggtcatcatgctccacagaagcttcctgagcttcaaggtgatcaaggttaacaaagaatgcgtccgaggactttgggccgggcagcagcaggagcttatatttcttcgcaaccgcaatccggagcgcggcagtatccagaacaataagcaggtcctgcggaacttgattaactcctcctgcgatcagcccctggggtaccccatgtatgtctccccactaaccacatcctacctagggacacacaggcagctgaagaacatctggggtggacccatcactttggacagaattaggacctggttctggaccaagtgggtaaggatgcggaaggattgcaatgcccgccagcacagtggcggcaacattgaagacgtggacggaggaggggccccgacgacaggtggcaacaatgccccgagtggtggcagccaggagagcagcgcagaacagcccagaaaaggcggtgctcagcacggggtgtcatcctgtgaagggacacagagaacaggcaggaggaaaggcaggagccagtccgtgcaggcacactcagcgctaagccaaaggccgcccatgctgagctcatctggccccatcttagagagccgccaaacattcctccagacgtccacctcagtgcacgagctggcccagaggctctcgggcagccggctctccttgcacgcctcggccacgtccctgcactctcagcccccgcccgtcaccaccaccggccacctgagtgtccgtgagcgggccgaggcgctcatcaggtccagcctgggctcctccaccagctccaccctgagcttcctcttcggcaagaggagcttttccagcgcgctcgtcatttccggactctctgctgcggaggggggcaataccagtgacacccagtcatccagcagcgtcaacatcgtgatgggcccctcagccagggctgccagccaggccactcgggtaaggggctgggcagggctcaccaggacaggctgggatggtggcacgggctcctggcctgagcgtggcacctgccttgcgttcccacccttctgcctgcagaaccccatccccttctctatggggctcccagagtgacaaaggacagtgattagacacgaagtggcttagctgctcttgaaagcagacaagatacagagcagatatcctgtaaacgataatgcccaggcaggcactgaaaggagtcaccggatacagaggttctgcagaactgtggccatctgccctacaccggggcatgacggagaatgccctccacccattcacacagcaggactcttctcacatgattctggcctgagggagaggaaaggacacctgtcaatgctggagttagagcttcactgcttctcagccaatcgatttgactttaaagctgctgagatggcccactgcttttaggtatttaaatactagacaaggagagttctaaggacttcacccaaataagctgttacttgtccagaatcccaaaccagctgagatgaaatgaatacttgagcttcttcagtgagaaaaaagtaaataaatacccagcagtgctcctatgtgacctggtagacagggaaaatcgatggtgtcaaggcaaaaatgggtcaggtttggagagttcccccactccttttgagtgttcaggttttccttaccatggctcatgctttccatcaagcaccagagttgcagtggcttggcctctggttctgggtgaggttatttgcaggtggagacggggggctgcacctgaacatttctagtgtcaccctccctctccttcatgggaaacagctctccagggaagtaccttcctgccaggggaagccaaggctgggccggccgccctacaaggagccacaggattgcagccatgggtgccacctttcatggaaggggagatttatgggctttcctggaacccccaggctgtcctggccaagaggaaagaggtggttacttcaggagtttgaccttagttagataactaaaagaatacatttcccctcccttttctttatttcctcaataaaaatgtacaaagtatcacccttctccatgccccaatctgtgttaaagtcacaatctatgggtgtagttctgggattctgtcaaattctccttcctgctctccaaaatggacaattgtcgtagggaccacatgcccccagaatacaatggcctctgtgttctactggggtcaagcctgctagaactcagcattcatgacaggggctaagtgtgcatgaagtgacactgactacagctagaaagccaggcgcacaaatgccccttccccccagggccgctctttccagcgcagtcatccagaaaggcccacgtgcagagcccctgtgtctcagatgctgcttcagttgcccgtcctgtcctcagaggccactgtgctggccctctatcatttgacctgactttagaacctgacctcaaggatatggcagcgctagcctttagctcccacagcacggatgggggtgatgccagttagaagtgggtagtgaacgtttgctgagctgttcactgtttctctcttctctttggaagcacctctccgagccatgtgagccccctgatgccaccgagcaggggcagcttcatgaccgatgtctggctgaggctgtggcggacactctcggggttgtctgcaggagagcaagccaggaggacatgggcctggacgacacggcctcgcagcaaagtgtgtcagacgagcagtgacgggcgtgcggccgggcggggaggctggctcccccacacctcccacctgcattgctctccctcgtgctccccaaatcaccacaaccaaccaataccgcgatccatgagggactcctcctgtggaaaaggagagctgttccagaacacagaactgatctcaggtttttgaaaaaaaaaaaaaaaaaaaaaaaaaatcaaacaacaacaacaaaaaaacctcacatgatggggaaacaaaaaaaagcaacaaagaagccacaccacacctccctggccaggcacagcgctgcccagagcggcacaccgcggacagcaccacacatgttccagaatctgaaatctcaaaagccattcactaacttaaaacaactcaacagagccatgaaacaaatgccctgatgaaaataagacaactgcatgttacatcatcggcactttatacattactgttaccatgaaaaagaaatgaacagcagcacgtctgataccatcagctgggcagatgcattaaggttaaatctaagtgtcaagaaaaccctatttctttataatatttatgcagctgttaagcgtaacatggtggcagcttcacaacaagaaccgtgatcatgcatgcagtcatgtctccagtattctgtgaaaagccaggatacgttaggatgtgagtttagaaactgagtccattcggtgcatggaaatccaccgcggagtcacacaatgctcctcactgtagtccaggcgattggtgggccgccagcaccctgcgggcttcacagggacgcgtgcttgttctccaagccccgcaacccttactgtgcacacaacatcgcacacacctttgtttttgaaattaaaatgtttatagttattgctgcgtccagtgttttgagttatactgaagcttctcatttctacaagtatatcttttatggtgagaacgacatttgggtaaattctgagacaacttttcccatcttcaagaccccaggaacctgtatccttgctggggtagaggtcccaaaatgcagtccatagagtatcactggcctggtgaaccatcccttttcaaaagacaatagttagaaggaaatactcaattttaaacagtcacacaaatttcttcaaagtatttaggatttggaaatttgaggagagggttgggggaagggtattgtagagaatctcttgccccttggaaagtaaatggtaatgcttttctaatttttttttttgtaaactaagaatcagcaattaataaaagcaagtgtactctataatcacagacagaaggttcttattttcaggtcagcactccctagaggtgcaaactttatttaatttaaatgcagttgtttgtctaatgggaagctgatagggccttgctgcagttctctaaggtggccaaattaaacttggctggcagctcctgtaatcctcttgggcaactttacagccaagccccaagggctaaatggcaggcctggagctgtgagtgtggcctccccacggagggtgactccttgagttcagtgaggaaaaccacggtgcctggcagtggtcagccaggagtatgactggccactccttaggcatccagaagtaggaaacacagaaagcattccacaaaacggggaatctccccaaagagctagaaacccaggctggaaggaaatggcagcgcaggcaagagagcaagagcaccctgggtgctcctccatcccgtttctctggggaggttcatgaggtgcttcttcaacagttattctgttcattgcttatcacagttcacgagttctcgtggcatcttttgtggggaggagggaggatgaaagtgacacagtgtatctacaacactaaggtcacattaatcagataggaatgcagtgacgctctgcaccgtctatgagagcgggcatctcgagtgtgcataccgaggcacagatgtgcacacacatccgcaggcaactgcacccacagagaaaaggtggcagtattggagtcaccccaggattcttgggggctgtttgaccagccatcaacagtgcagccatacttctttttcttttttatcgtggtacacaacttttatatttacaactcatgaacttgttaatctggtccttcatctagtcagctatgtatcagaaaggacttcctgcaaaatgttatattctaagcccccatttagaggaggcatccctaaactgacatttcttgctagagttgttcaaatattctgccagtatatagctaaagagttattttccagttcaagagttatttggggctgggcacggtggctcacgcctgtaatcccagcacttttgtaggctgaggcaggcaaatcatgaggtcaggagttcgagaccagcttggccaacatggtgaaaccccgtctctactaaaaatacaaaaaattagctgggcgtggtggcgggtgcctgtaatcccagctactcaggaggttgaggcaggagaatcg

SEQ ID NO: 420938 - DNA, 6160 bp, Homo sapiens
tgtgttcaagaccaggctttctacaattgtcagtgggaccttcattatgcccaaatccttaagtaaaccctatgtgtgatgctgatatatttgtggaagccctttcttaatggcgaatatatcagatttaaccatatgaaattgccattttgtaggtgataataaacagttgactatcatcaatttcataggcctgatgtcaatttcatatttcattctttaaagaccgccactcattgttggaaataaaaggacaaaggtaggctggcatagcctctccaagagagcagatcgctgcacttacaaagggttttggggatgtgtggagttcaaggactggtgaggttttggaggcatacatgggttgatggcatctgtataggtggttacttgaaaagcctgttattcatcagttgcccctcaagtctgcagtgagtcggctaactctcagaagccaggggttgtcatggactggctgccttacaaaagctgtgcactgaggggtgtttacatgatggaataggttcaaagctggttctagtggccacttgttaccatggctgcagatgatccgagaactttcattctcatggttcaacctaagaaaggtctataagagtataccccactcttgaaagcaggtggtggagacgttgactactcaccaccatttcctgaaatcaatttgaagagaaagatacctttgtggacactgttctcaagttctgaaagtgggtagcattacattggcagtttaaacacttgcttttttttttttgagtcttgctctgtcacccagtttggagtgcagtggtgcagtctcggctcactgcgacctcggcctcctggattcaagttcagcctcccgggtggctgggattgtaggagtgtgccaccacgcatggctaatctttttgtgtttttggtggagatggagtttcacactgtttgcggactggtaccaagttcctgacttcaaatgctctgcctgcctcggcctccctaggtgttgggattacaggcgtgagccaccgtgctcagcctaaatacttgctttgattttgcagatctggtgctccaaattgattaagacacaagaccgttctctccaaatcagagagctactcatctctcccttccatgtgtttcttgtactgctccctctatctcttatcatgagactcctctcttcctgcagtgtggtaaaactacagcaatcgtcttaacctgtgagatctgtcacctttgcattttccactcatgcagctggttctataaaccaactcttctgcttggggggatctaatcatgaccttttacccttttgtggcctcttctagtacaaggcgagtggataattccaacacaagactggcagtccaaattgaaagagatccagggaatgatgacaacaatctcaattccattttttatgaacacttgacaaggaccctccaggagtccctctgtggagacttagttcttggacgttggggcaactacagctctggcgattgctttattttggcttcagatgacctcaatgcctttgttcacctgattgaaattggaaatggtcttgtcacctttcaacttcgaggactggaattccgaggaacctactgccagcagagggaggtagaagccatcatggagggcgacgaggaggacagaggctgctgctgctgcaaaccaggccacttgcctcacctgctgtcctgcaacgctgcctttcacctccgctggctcacctgggaaatcacgcagacccagtacatcctggagggctacagcatcctggacaacaacgcggccaccatgctgcaggtgtttgacctccgaaggatcctcatccgctactacatcaagagtataatatactatatggtaacgtctcccaaactcctctcctggatcaaaaatgaatcacttctgaagtccctgcagccctttgccaagtggcattacattgagcgtgaccttgcaatgttcaacattaacattgatgatgactacgtcccgtgtctccaggggatcacacgagctagcttctgcaatgtttatctagaatggattcaacactgtgcacggaaaagacaagagccttcaacgaccctggacagtgacgaggactctcccttggtgactctgtccttcgccctgtgcaccctggggaggagagctctgggaacagccgctcacaatatggccatcagcctggattctttcctgtatggcctccatgtcctcttcaaaggtgacttcagaataacagcacgtgacgagtgggtatttgctgacatggacctactgcataaagttgtagctccagctatcaggatgtccctgaaacttcaccaggaccagttcacttgccctgacgagtatgaagacccagcagtcctctacgaggccatccagtccttcgagaagaaggtggtcatctgccacgagggcgacccggcctggcggggcgcagtgctgtccaacaaggaagagctgctcaccctgcggcacgtggtggacgagggtgccgacgagtacaaggtcatcatgctccacagaagcttcctgagcttcaaggtgatcaaggttaacaaagaatgcgtccgaggactttgggccgggcagcagcaggagcttatatttcttcgcaaccgcaatccggagcgcggcagtatccagaacaataagcaggtcctgcggaacttgattaactcctcctgcgatcagcccctggggtaccccatgtatgtctccccactaaccacatcctacctagggacacacaggcagctgaagaacatctggggtggacccatcactttggacagaattaggacctggttctggaccaagtgggtaaggatgcggaaggattgcaatgcccgccagcacagtggcggcaacattgaagacgtggacggaggaggggccccgacgacaggtggcaacaatgccccgagtggtggcagccaggagagcagcgcagaacagcccagaaaaggcggtgctcagcacggggtgtcatcctgtgaagggacacagagaacaggcaggaggaaaggcaggagccagtccgtgcaggcacactcagcgctaagccaaaggccgcccatgctgagctcatctggccccatcttagagagccgccaaacattcctccagacgtccacctcagtgcacgagctggcccagaggctctcgggcagccggctctccttgcacgcctcggccacgtccctgcactctcagcccccgcccgtcaccaccaccggccacctgagtgtccgtgagcgggccgaggcgctcatcaggtccagcctgggctcctccaccagctccaccctgagcttcctcttcggcaagaggagcttttccagcgcgctcgtcatttccggactctctgctgcggaggggggcaataccagtgacacccagtcatccagcagcgtcaacatcgtgatgggcccctcagccagggctgccagccaggccactcgggtaaggggctgggcagggctcaccaggacaggctgggatggtggcacgggctcctggcctgagcgtggcacctgccttgcgttcccacccttctgcctgcagaaccccatccccttctctatggggctcccagagtgacaaaggacagtgattagacacgaagtggcttagctgctcttgaaagcagacaagatacagagcagatatcctgtaaacgataatgcccaggcaggcactgaaaggagtcaccggatacagaggttctgcagaactgtggccatctgccctacaccggggcatgacggagaatgccctccacccattcacacagcaggactcttctcacatgattctggcctgagggagaggaaaggacacctgtcaatgctggagttagagcttcactgcttctcagccaatcgatttgactttaaagctgctgagatggcccactgcttttaggtatttaaatactagacaaggagagttctaaggacttcacccaaataagctgttacttgtccagaatcccaaaccagctgagatgaaatgaatacttgagcttcttcagtgagaaaaaagtaaataaatacccagcagtgctcctatgtgacctggtagacagggaaaatcgatggtgtcaaggcaaaaatgggtcaggtttggagagttcccccactccttttgagtgttcaggttttccttaccatggctcatgctttccatcaagcaccagagttgcagtggcttggcctctggttctgggtgaggttatttgcaggtggagacggggggctgcacctgaacatttctagtgtcaccctccctctccttcatgggaaacagctctccagggaagtaccttcctgccaggggaagccaaggctgggccggccgccctacaaggagccacaggattgcagccatgggtgccacctttcatggaaggggagatttatgggctttcctggaacccccaggctgtcctggccaagaggaaagaggtggttacttcaggagtttgaccttagttagataactaaaagaatacatttcccctcccttttctttatttcctcaataaaaatgtacaaagtatcacccttctccatgccccaatctgtgttaaagtcacaatctatgggtgtagttctgggattctgtcaaattctccttcctgctctccaaaatggacaattgtcgtagggaccacatgcccccagaatacaatggcctctgtgttctactggggtcaagcctgctagaactcagcattcatgacaggggctaagtgtgcatgaagtgacactgactacagctagaaagccaggcgcacaaatgccccttccccccagggccgctctttccagcgcagtcatccagaaaggcccacgtgcagagcccctgtgtctcagatgctgcttcagttgcccgtcctgtcctcagaggccactgtgctggccctctatcatttgacctgactttagaacctgacctcaaggatatggcagcgctagcctttagctcccacagcacggatgggggtgatgccagttagaagtgggtagtgaacgtttgctgagctgttcactgtttctctcttctctttggaagcacctctccgagccatgtgagccccctgatgccaccgagcaggggcagcttcatgaccgatgtctggctgaggctgtggcggacactctcggggttgtctgcaggagagcaagccaggaggacatgggcctggacgacacggcctcgcagcaaagtgtgtcagacgagcagtgacgggcgtgcggccgggcggggaggctggctcccccacacctcccacctgcattgctctccctcgtgctccccaaatcaccacaaccaaccaataccgcgatccatgagggactcctcctgtggaaaaggagagctgttccagaacacagaactgatctcaggtttttgaaaaaaaaaaaaaaaaaaaaaaaaaatcaaacaacaacaacaaaaaaacctcacatgatggggaaacaaaaaaaagcaacaaagaagccacaccacacctccctggccaggcacagcgctgcccagagcggcacaccgcggacagcaccacacatgttccagaatctgaaatctcaaaagccattcactaacttaaaacaactcaacagagccatgaaacaaatgccctgatgaaaataagacaactgcatgttacatcatcggcactttatacattactgttaccatgaaaaagaaatgaacagcagcacgtctgataccatcagctgggcagatgcattaaggttaaatctaagtgtcaagaaaaccctatttctttataatatttatgcagctgttaagcgtaacatggtggcagcttcacaacaagaaccgtgatcatgcatgcagtcatgtctccagtattctgtgaaaagccaggatacgttaggatgtgagtttagaaactgagtccattcggtgcatggaaatccaccgcggagtcacacaatgctcctcactgtagtccaggcgattggtgggccgccagcaccctgcgggcttcacagggacgcgtgcttgttctccaagccccgcaacccttactgtgcacacaacatcgcacacacctttgtttttgaaattaaaatgtttatagtta

SEQ ID NO: 420939 - DNA, 6048 bp, Homo sapiens
tgtgttcaagaccaggctttctacaattgtcagtgggaccttcattatgcccaaatccttaagtaaaccctatgtgtgatgctgatatatttgtggaagccctttcttaatggcgaatatatcagatttaaccatatgaaattgccattttgtaggtgataataaacagttgactatcatcaatttcataggcctgatgtcaatttcatatttcattctttaaagaccgccactcattgttggaaataaaaggacaaaggtaggctggcatagcctctccaagagagcagatcgctgcacttacaaagggttttggggatgtgtggagttcaaggactggtgaggttttggaggcatacatgggttgatggcatctgtataggtggttacttgaaaagcctgttattcatcagttgcccctcaagtctgcagtgagtcggctaactctcagaagccaggggttgtcatggactggctgccttacaaaagctgtgcactgaggggtgtttacatgatggaataggttcaaagctggttctagtggccacttgttaccatggctgcagatgatccgagaactttcattctcatggttcaacctaagaaaggtctataagagtataccccactcttgaaagcaggtggtggagacgttgactactcaccaccatttcctgaaatcaatttgaagagaaagatacctttgtggacactgttctcaagttctgaaagtgggtagcattacattggcagtttaaacacttgcttttttttttttgagtcttgctctgtcacccagtttggagtgcagtggtgcagtctcggctcactgcgacctcggcctcctggattcaagttcagcctcccgggtggctgggattgtaggagtgtgccaccacgcatggctaatctttttgtgtttttggtggagatggagtttcacactgtttgcggactggtaccaagttcctgacttcaaatgctctgcctgcctcggcctccctaggtgttgggattacaggcgtgagccaccgtgctcagcctaaatacttgctttgattttgcagatctggtgctccaaattgattaagacacaagaccgttctctccaaatcagagagctactcatctctcccttccatgtgtttcttgtactgctccctctatctcttatcatgagactcctctcttcctgcagtgtggtaaaactacagcaatcgtcttaacctgtgagatctgtcacctttgcattttccactcatgcagctggttctataaaccaactcttctgcttggggggatctaatcatgaccttttacccttttgtggcctcttctagtacaaggcgagtggataattccaacacaagactggcagtccaaattgaaagagatccagggaatgatgacaacaatctcaattccattttttatgaacacttgacaaggaccctccaggagtccctctgtggagacttagttcttggacgttggggcaactacagctctggcgattgctttattttggcttcagatgacctcaatgcctttgttcacctgattgaaattggaaatggtcttgtcacctttcaacttcgaggactggaattccgaggaacctactgccagcagagggaggtagaagccatcatggagggcgacgaggaggacagaggctgctgctgctgcaaaccaggccacttgcctcacctgctgtcctgcaacgctgcctttcacctccgctggctcacctgggaaatcacgcagacccagtacatcctggagggctacagcatcctggacaacaacgcggccaccatgctgcaggtgtttgacctccgaaggatcctcatccgctactacatcaagagtataatatactatatggtaacgtctcccaaactcctctcctggatcaaaaatgaatcacttctgaagtccctgcagccctttgccaagtggcattacattgagcgtgaccttgcaatgttcaacattaacattgatgatgactacgtcccgtgtctccaggggatcacacgagctagcttctgcaatgtttatctagaatggattcaacactgtgcacggaaaagacaagagccttcaacgaccctggacagtgacgaggactctcccttggtgactctgtccttcgccctgtgcaccctggggaggagagctctgggaacagccgctcacaatatggccatcagcctggattctttcctgtatggcctccatgtcctcttcaaaggtgacttcagaataacagcacgtgacgagtgggtatttgctgacatggacctactgcataaagttgtagctccagctatcaggatgtccctgaaacttcaccaggaccagttcacttgccctgacgagtatgaagacccagcagtcctctacgaggccatccagtccttcgagaagaaggtggtcatctgccacgagggcgacccggcctggcggggcgcagtgctgtccaacaaggaagagctgctcaccctgcggcacgtggtggacgagggtgccgacgagtacaaggtcatcatgctccacagaagcttcctgagcttcaaggtgatcaaggttaacaaagaatgcgtccgaggactttgggccgggcagcagcaggagcttatatttcttcgcaaccgcaatccggagcgcggcagtatccagaacaataagcaggtcctgcggaacttgattaactcctcctgcgatcagcccctggggtaccccatgtatgtctccccactaaccacatcctacctagggacacacaggcagctgaagaacatctggggtggacccatcactttggacagaattaggacctggttctggaccaagtgggtaaggatgcggaaggattgcaatgcccgccagcacagtggcggcaacattgaagacgtggacggaggaggggccccgacgacaggtggcaacaatgccccgagtggtggcagccaggagagcagcgcagaacagcccagaaaaggcggtgctcagcacggggtgtcatcctgtgaagggacacagagaacaggcaggaggaaaggcaggagccagtccgtgcaggcacactcagcgctaagccaaaggccgcccatgctgagctcatctggccccatcttagagagccgccaaacattcctccagacgtccacctcagtgcacgagctggcccagaggctctcgggcagccggctctccttgcacgcctcggccacgtccctgcactctcagcccccgcccgtcaccaccaccggccacctgagtgtccgtgagcgggccgaggcgctcatcaggtccagcctgggctcctccaccagctccaccctgagcttcctcttcggcaagaggagcttttccagcgcgctcgtcatttccggactctctgctgcggaggggggcaataccagtgacacccagtcatccagcagcgtcaacatcgtgatgggcccctcagccagggctgccagccaggccactcggcacctctccgagccatgtgagccccctgatgccaccgagcaggggcagcttcatgaccgatgtctggctgaggctgtggcggacactctcggggttgtctgcaggagagcaagccaggaggacatgggcctggacgacacggcctcgcagcaaagtgtgtcagacgagcagtgacgggcgtgcggccgggcggggaggctggctcccccacacctcccacctgcattgctctccctcgtgctccccaaatcaccacaaccaaccaataccgcgatccatgagggactcctcctgtggaaaaggagagctgttccagaacacagaactgatctcaggtttttgaaaaaaaaaaaaaaaaaaaaaaaaaatcaaacaacaacaacaaaaaaacctcacatgatggggaaacaaaaaaaagcaacaaagaagccacaccacacctccctggccaggcacagcgctgcccagagcggcacaccgcggacagcaccacacatgttccagaatctgaaatctcaaaagccattcactaacttaaaacaactcaacagagccatgaaacaaatgccctgatgaaaataagacaactgcatgttacatcatcggcactttatacattactgttaccatgaaaaagaaatgaacagcagcacgtctgataccatcagctgggcagatgcattaaggttaaatctaagtgtcaagaaaaccctatttctttataatatttatgcagctgttaagcgtaacatggtggcagcttcacaacaagaaccgtgatcatgcatgcagtcatgtctccagtattctgtgaaaagccaggatacgttaggatgtgagtttagaaactgagtccattcggtgcatggaaatccaccgcggagtcacacaatgctcctcactgtagtccaggcgattggtgggccgccagcaccctgcgggcttcacagggacgcgtgcttgttctccaagccccgcaacccttactgtgcacacaacatcgcacacacctttgtttttgaaattaaaatgtttatagttattgctgcgtccagtgttttgagttatactgaagcttctcatttctacaagtatatcttttatggtgagaacgacatttgggtaaattctgagacaacttttcccatcttcaagaccccaggaacctgtatccttgctggggtagaggtcccaaaatgcagtccatagagtatcactggcctggtgaaccatcccttttcaaaagacaatagttagaaggaaatactcaattttaaacagtcacacaaatttcttcaaagtatttaggatttggaaatttgaggagagggttgggggaagggtattgtagagaatctcttgccccttggaaagtaaatggtaatgcttttctaatttttttttttgtaaactaagaatcagcaattaataaaagcaagtgtactctataatcacagacagaaggttcttattttcaggtcagcactccctagaggtgcaaactttatttaatttaaatgcagttgtttgtctaatgggaagctgatagggccttgctgcagttctctaaggtggccaaattaaacttggctggcagctcctgtaatcctcttgggcaactttacagccaagccccaagggctaaatggcaggcctggagctgtgagtgtggcctccccacggagggtgactccttgagttcagtgaggaaaaccacggtgcctggcagtggtcagccaggagtatgactggccactccttaggcatccagaagtaggaaacacagaaagcattccacaaaacggggaatctccccaaagagctagaaacccaggctggaaggaaatggcagcgcaggcaagagagcaagagcaccctgggtgctcctccatcccgtttctctggggaggttcatgaggtgcttcttcaacagttattctgttcattgcttatcacagttcacgagttctcgtggcatcttttgtggggaggagggaggatgaaagtgacacagtgtatctacaacactaaggtcacattaatcagataggaatgcagtgacgctctgcaccgtctatgagagcgggcatctcgagtgtgcataccgaggcacagatgtgcacacacatccgcaggcaactgcacccacagagaaaaggtggcagtattggagtcaccccaggattcttgggggctgtttgaccagccatcaacagtgcagccatacttctttttcttttttatcgtggtacacaacttttatatttacaactcatgaacttgttaatctggtccttcatctagtcagctatgtatcagaaaggacttcctgcaaaatgttatattctaagcccccatttagaggaggcatccctaaactgacatttcttgctagagttgttcaaatattctgccagtatatagctaaagagttattttccagttcaagagttatttgggggctcctcacccgccacatgcccgacttgtccacagttagagagaaggcacactgctgcttataccagtgggtttgtagccaat

SEQ ID NO: 420940 - DNA, 6510 bp, Homo sapiens
tgtgttcaagaccaggctttctacaattgtcagtgggaccttcattatgcccaaatccttaagtaaaccctatgtgtgatgctgatatatttgtggaagccctttcttaatggcgaatatatcagatttaaccatatgaaattgccattttgtaggtgataataaacagttgactatcatcaatttcataggcctgatgtcaatttcatatttcattctttaaagaccgccactcattgttggaaataaaaggacaaaggtaggctggcatagcctctccaagagagcagatcgctgcacttacaaagggttttggggatgtgtggagttcaaggactggtgaggttttggaggcatacatgggttgatggcatctgtataggtggttacttgaaaagcctgttattcatcagttgcccctcaagtctgcagtgagtcggctaactctcagaagccaggggttgtcatggactggctgccttacaaaagctgtgcactgaggggtgtttacatgatggaataggttcaaagctggttctagtggccacttgttaccatggctgcagatgatccgagaactttcattctcatggttcaacctaagaaaggtctataagagtataccccactcttgaaagcaggtggtggagacgttgactactcaccaccatttcctgaaatcaatttgaagagaaagatacctttgtggacactgttctcaagttctgaaagtgggtagcattacattggcagtttaaacacttgcttttttttttttgagtcttgctctgtcacccagtttggagtgcagtggtgcagtctcggctcactgcgacctcggcctcctggattcaagttcagcctcccgggtggctgggattgtaggagtgtgccaccacgcatggctaatctttttgtgtttttggtggagatggagtttcacactgtttgcggactggtaccaagttcctgacttcaaatgctctgcctgcctcggcctccctaggtgttgggattacaggcgtgagccaccgtgctcagcctaaatacttgctttgattttgcagatctggtgctccaaattgattaagacacaagaccgttctctccaaatcagagagctactcatctctcccttccatgtgtttcttgtactgctccctctatctcttatcatgagactcctctcttcctgcagtgtggtaaaactacagcaatcgtcttaacctgtgagatctgtcacctttgcattttccactcatgcagctggttctataaaccaactcttctgcttggggggatctaatcatgaccttttacccttttgtggcctcttctagtacaaggcgagtggataattccaacacaagactggcagtccaaattgaaagagatccagggaatgatgacaacaatctcaattccattttttatgaacacttgacaaggaccctccaggagtccctctgtggagacttagttcttggacgttggggcaactacagctctggcgattgctttattttggcttcagatgacctcaatgcctttgttcacctgattgaaattggaaatggtcttgtcacctttcaacttcgaggactggaattccgaggaacctactgccagcagagggaggtagaagccatcatggagggcgacgaggaggacagaggctgctgctgctgcaaaccaggccacttgcctcacctgctgtcctgcaacgctgcctttcacctccgctggctcacctgggaaatcacgcagacccagtacatcctggagggctacagcatcctggacaacaacgcggccaccatgctgcaggtgtttgacctccgaaggatcctcatccgctactacatcaagagtataatatactatatggtaacgtctcccaaactcctctcctggatcaaaaatgaatcacttctgaagtccctgcagccctttgccaagtggcattacattgagcgtgaccttgcaatgttcaacattaacattgatgatgactacgtcccgtgtctccaggggatcacacgagctagcttctgcaatgtttatctagaatggattcaacactgtgcacggaaaagacaagagccttcaacgaccctggacagtgacgaggactctcccttggtgactctgtccttcgccctgtgcaccctggggaggagagctctgggaacagccgctcacaatatggccatcagcctggattctttcctgtatggcctccatgtcctcttcaaaggtgacttcagaataacagcacgtgacgagtgggtatttgctgacatggacctactgcataaagttgtagctccagctatcaggatgtccctgaaacttcaccaggaccagttcacttgccctgacgagtatgaagacccagcagtcctctacgaggccatccagtccttcgagaagaaggtggtcatctgccacgagggcgacccggcctggcggggcgcagtgctgtccaacaaggaagagctgctcaccctgcggcacgtggtggacgagggtgccgacgagtacaaggtcatcatgctccacagaagcttcctgagcttcaaggtgatcaaggttaacaaagaatgcgtccgaggactttgggccgggcagcagcaggagcttatatttcttcgcaaccgcaatccggagcgcggcagtatccagaacaataagcaggtcctgcggaacttgattaactcctcctgcgatcagcccctggggtaccccatgtatgtctccccactaaccacatcctacctagggacacacaggcagctgaagaacatctggggtggacccatcactttggacagaattaggacctggttctggaccaagtgggtaaggatgcggaaggattgcaatgcccgccagcacagtggcggcaacattgaagacgtggacggaggaggggccccgacgacaggtggcaacaatgccccgagtggtggcagccaggagagcagcgcagaacagcccagaaaaggcggtgctcagcacggggtgtcatcctgtgaagggacacagagaacaggcaggaggaaaggcaggagccagtccgtgcaggcacactcagcgctaagccaaaggccgcccatgctgagctcatctggccccatcttagagagccgccaaacattcctccagacgtccacctcagtgcacgagctggcccagaggctctcgggcagccggctctccttgcacgcctcggccacgtccctgcactctcagcccccgcccgtcaccaccaccggccacctgagtgtccgtgagcgggccgaggcgctcatcaggtccagcctgggctcctccaccagctccaccctgagcttcctcttcggcaagaggagcttttccagcgcgctcgtcatttccggactctctgctgcggaggggggcaataccagtgacacccagtcatccagcagcgtcaacatcgtgatgggcccctcagccagggctgccagccaggccactcgggtaaggggctgggcagggctcaccaggacaggctgggatggtggcacgggctcctggcctgagcgtggcacctgccttgcgttcccacccttctgcctgcagaaccccatccccttctctatggggctcccagagtgacaaaggacagtgattagacacgaagtggcttagctgctcttgaaagcagacaagatacagagcagatatcctgtaaacgataatgcccaggcaggcactgaaaggagtcaccggatacagaggttctgcagaactgtggccatctgccctacaccggggcatgacggagaatgccctccacccattcacacagcaggactcttctcacatgattctggcctgagggagaggaaaggacacctgtcaatgctggagttagagcttcactgcttctcagccaatcgatttgactttaaagctgctgagatggcccactgcttttagcacctctccgagccatgtgagccccctgatgccaccgagcaggggcagcttcatgaccgatgtctggctgaggctgtggcggacactctcggggttgtctgcaggagagcaagccaggaggacatgggcctggacgacacggcctcgcagcaaagtgtgtcagacgagcagtgacgggcgtgcggccgggcggggaggctggctcccccacacctcccacctgcattgctctccctcgtgctccccaaatcaccacaaccaaccaataccgcgatccatgagggactcctcctgtggaaaaggagagctgttccagaacacagaactgatctcaggtttttgaaaaaaaaaaaaaaaaaaaaaaaaaatcaaacaacaacaacaaaaaaacctcacatgatggggaaacaaaaaaaagcaacaaagaagccacaccacacctccctggccaggcacagcgctgcccagagcggcacaccgcggacagcaccacacatgttccagaatctgaaatctcaaaagccattcactaacttaaaacaactcaacagagccatgaaacaaatgccctgatgaaaataagacaactgcatgttacatcatcggcactttatacattactgttaccatgaaaaagaaatgaacagcagcacgtctgataccatcagctgggcagatgcattaaggttaaatctaagtgtcaagaaaaccctatttctttataatatttatgcagctgttaagcgtaacatggtggcagcttcacaacaagaaccgtgatcatgcatgcagtcatgtctccagtattctgtgaaaagccaggatacgttaggatgtgagtttagaaactgagtccattcggtgcatggaaatccaccgcggagtcacacaatgctcctcactgtagtccaggcgattggtgggccgccagcaccctgcgggcttcacagggacgcgtgcttgttctccaagccccgcaacccttactgtgcacacaacatcgcacacacctttgtttttgaaattaaaatgtttatagttattgctgcgtccagtgttttgagttatactgaagcttctcatttctacaagtatatcttttatggtgagaacgacatttgggtaaattctgagacaacttttcccatcttcaagaccccaggaacctgtatccttgctggggtagaggtcccaaaatgcagtccatagagtatcactggcctggtgaaccatcccttttcaaaagacaatagttagaaggaaatactcaattttaaacagtcacacaaatttcttcaaagtatttaggatttggaaatttgaggagagggttgggggaagggtattgtagagaatctcttgccccttggaaagtaaatggtaatgcttttctaatttttttttttgtaaactaagaatcagcaattaataaaagcaagtgtactctataatcacagacagaaggttcttattttcaggtcagcactccctagaggtgcaaactttatttaatttaaatgcagttgtttgtctaatgggaagctgatagggccttgctgcagttctctaaggtggccaaattaaacttggctggcagctcctgtaatcctcttgggcaactttacagccaagccccaagggctaaatggcaggcctggagctgtgagtgtggcctccccacggagggtgactccttgagttcagtgaggaaaaccacggtgcctggcagtggtcagccaggagtatgactggccactccttaggcatccagaagtaggaaacacagaaagcattccacaaaacggggaatctccccaaagagctagaaacccaggctggaaggaaatggcagcgcaggcaagagagcaagagcaccctgggtgctcctccatcccgtttctctggggaggttcatgaggtgcttcttcaacagttattctgttcattgcttatcacagttcacgagttctcgtggcatcttttgtggggaggagggaggatgaaagtgacacagtgtatctacaacactaaggtcacattaatcagataggaatgcagtgacgctctgcaccgtctatgagagcgggcatctcgagtgtgcataccgaggcacagatgtgcacacacatccgcaggcaactgcacccacagagaaaaggtggcagtattggagtcaccccaggattcttgggggctgtttgaccagccatcaacagtgcagccatacttctttttcttttttatcgtggtacacaacttttatatttacaactcatgaacttgttaatctggtccttcatctagtcagctatgtatcagaaaggacttcctgcaaaatgttatattctaagcccccatttagaggaggcatccctaaactgacatttcttgctagagttgttcaaatattctgccagtatatagctaaagagttattttccagttcaagagttatttgggggctcctcacccgccacatgcccgacttgtccacagttagagagaaggcacactgctgcttataccagtgggtttgtagccaat

SEQ ID NO: 420941 - DNA, 3704 bp, Homo sapiens
tacaaaattagccaggtgtgttggcacatgcctgtaattccagctactcgggaggctgaggcaagagaattgcttgaatccgggaggcggaggttgcagtgagctgagattgcaccattgcactccagcctgggcaacaagagcgaaactctatctcaaaaaaaaaaaaaaaaaagaaaaagaaaaaaccaatagactggaaaacacaggccttctgcctttcttcccgttccctctctgacctgcaggttaacaaagaatgcgtccgaggactttgggccgggcagcagcaggagcttatatttcttcgcaaccgcaatccggagcgcggcagtatccagaacaataagcaggtcctgcggaacttgattaactcctcctgcgatcagcccctggggtaccccatgtatgtctccccactaaccacatcctacctagggacacacaggcagctgaagaacatctggggtggacccatcactttggacagaattaggacctggttctggaccaagtgggtaaggatgcggaaggattgcaatgcccgccagcacagtggcggcaacattgaagacgtggacggaggaggggccccgacgacaggtggcaacaatgccccgagtggtggcagccaggagagcagcgcagaacagcccagaaaaggcggtgctcagcacggggtgtcatcctgtgaagggacacagagaacaggcaggaggaaaggcaggagccagtccgtgcaggcacactcagcgctaagccaaaggccgcccatgctgagctcatctggccccatcttagagagccgccaaacattcctccagacgtccacctcagtgcacgagctggcccagaggctctcgggcagccggctctccttgcacgcctcggccacgtccctgcactctcagcccccgcccgtcaccaccaccggccacctgagtgtccgtgagcgggccgaggcgctcatcaggtccagcctgggctcctccaccagctccaccctgagcttcctcttcggcaagaggagcttttccagcgcgctcgtcatttccggactctctgctgcggaggggggcaataccagtgacacccagtcatccagcagcgtcaacatcgtgatgggcccctcagccagggctgccagccaggccactcggcacctctccgagccatgtgagccccctgatgccaccgagcaggggcagcttcatgaccgatgtctggctgaggctgtggcggacactctcggggttgtctgcaggagagcaagccaggaggacatgggcctggacgacacggcctcgcagcaaagtgtgtcagacgagcagtgacgggcgtgcggccgggcggggaggctggctcccccacacctcccacctgcattgctctccctcgtgctccccaaatcaccacaaccaaccaataccgcgatccatgagggactcctcctgtggaaaaggagagctgttccagaacacagaactgatctcaggtttttgaaaaaaaaaaaaaaaaaaaaaaaaaatcaaacaacaacaacaaaaaaacctcacatgatggggaaacaaaaaaaagcaacaaagaagccacaccacacctccctggccaggcacagcgctgcccagagcggcacaccgcggacagcaccacacatgttccagaatctgaaatctcaaaagccattcactaacttaaaacaactcaacagagccatgaaacaaatgccctgatgaaaataagacaactgcatgttacatcatcggcactttatacattactgttaccatgaaaaagaaatgaacagcagcacgtctgataccatcagctgggcagatgcattaaggttaaatctaagtgtcaagaaaaccctatttctttataatatttatgcagctgttaagcgtaacatggtggcagcttcacaacaagaaccgtgatcatgcatgcagtcatgtctccagtattctgtgaaaagccaggatacgttaggatgtgagtttagaaactgagtccattcggtgcatggaaatccaccgcggagtcacacaatgctcctcactgtagtccaggcgattggtgggccgccagcaccctgcgggcttcacagggacgcgtgcttgttctccaagccccgcaacccttactgtgcacacaacatcgcacacacctttgtttttgaaattaaaatgtttatagttattgctgcgtccagtgttttgagttatactgaagcttctcatttctacaagtatatcttttatggtgagaacgacatttgggtaaattctgagacaacttttcccatcttcaagaccccaggaacctgtatccttgctggggtagaggtcccaaaatgcagtccatagagtatcactggcctggtgaaccatcccttttcaaaagacaatagttagaaggaaatactcaattttaaacagtcacacaaatttcttcaaagtatttaggatttggaaatttgaggagagggttgggggaagggtattgtagagaatctcttgccccttggaaagtaaatggtaatgcttttctaatttttttttttgtaaactaagaatcagcaattaataaaagcaagtgtactctataatcacagacagaaggttcttattttcaggtcagcactccctagaggtgcaaactttatttaatttaaatgcagttgtttgtctaatgggaagctgatagggccttgctgcagttctctaaggtggccaaattaaacttggctggcagctcctgtaatcctcttgggcaactttacagccaagccccaagggctaaatggcaggcctggagctgtgagtgtggcctccccacggagggtgactccttgagttcagtgaggaaaaccacggtgcctggcagtggtcagccaggagtatgactggccactccttaggcatccagaagtaggaaacacagaaagcattccacaaaacggggaatctccccaaagagctagaaacccaggctggaaggaaatggcagcgcaggcaagagagcaagagcaccctgggtgctcctccatcccgtttctctggggaggttcatgaggtgcttcttcaacagttattctgttcattgcttatcacagttcacgagttctcgtggcatcttttgtggggaggagggaggatgaaagtgacacagtgtatctacaacactaaggtcacattaatcagataggaatgcagtgacgctctgcaccgtctatgagagcgggcatctcgagtgtgcataccgaggcacagatgtgcacacacatccgcaggcaactgcacccacagagaaaaggtggcagtattggagtcaccccaggattcttgggggctgtttgaccagccatcaacagtgcagccatacttctttttcttttttatcgtggtacacaacttttatatttacaactcatgaacttgttaatctggtccttcatctagtcagctatgtatcagaaaggacttcctgcaaaatgttatattctaagcccccatttagaggaggcatccctaaactgacatttcttgctagagttgttcaaatattctgccagtatatagctaaagagttattttccagttcaagagttatttgggggctcctcacccgccacatgcccgacttgtccacagttagagagaaggcacactgctgcttataccagtgggtttgtagccaat

SEQ ID NO: 420942 - DNA, 6050 bp, Homo sapiens
tgtgttcaagaccaggctttctacaattgtcagtgggaccttcattatgcccaaatccttaagtaaaccctatgtgtgatgctgatatatttgtggaagccctttcttaatggcgaatatatcagatttaaccatatgaaattgccattttgtaggtgataataaacagttgactatcatcaatttcataggcctgatgtcaatttcatatttcattctttaaagaccgccactcattgttggaaataaaaggacaaaggtaggctggcatagcctctccaagagagcagatcgctgcacttacaaagggttttggggatgtgtggagttcaaggactggtgaggttttggaggcatacatgggttgatggcatctgtataggtggttacttgaaaagcctgttattcatcagttgcccctcaagtctgcagtgagtcggctaactctcagaagccaggggttgtcatggactggctgccttacaaaagctgtgcactgaggggtgtttacatgatggaataggttcaaagctggttctagtggccacttgttaccatggctgcagatgatccgagaactttcattctcatggttcaacctaagaaaggtctataagagtataccccactcttgaaagcaggtggtggagacgttgactactcaccaccatttcctgaaatcaatttgaagagaaagatacctttgtggacactgttctcaagttctgaaagtgggtagcattacattggcagtttaaacacttgcttttttttttttgagtcttgctctgtcacccagtttggagtgcagtggtgcagtctcggctcactgcgacctcggcctcctggattcaagttcagcctcccgggtggctgggattgtaggagtgtgccaccacgcatggctaatctttttgtgtttttggtggagatggagtttcacactgtttgcggactggtaccaagttcctgacttcaaatgctctgcctgcctcggcctccctaggtgttgggattacaggcgtgagccaccgtgctcagcctaaatacttgctttgattttgcagatctggtgctccaaattgattaagacacaagaccgttctctccaaatcagagagctactcatctctcccttccatgtgtttcttgtactgctccctctatctcttatcatgagactcctctcttcctgcagtgtggtaaaactacagcaatcgtcttaacctgtgagatctgtcacctttgcattttccactcatgcagctggttctataaaccaactcttctgcttggggggatctaatcatgaccttttacccttttgtggcctcttctagtacaaggcgagtggataattccaacacaagactggcagtccaaattgaaagagatccagggaatgatgacaacaatctcaattccattttttatgaacacttgacaaggaccctccaggagtccctctgtggagacttagttcttggacgttggggcaactacagctctggcgattgctttattttggcttcagatgacctcaatgcctttgttcacctgattgaaattggaaatggtcttgtcacctttcaacttcgaggactggaattccgaggaacctactgccagcagagggaggtagaagccatcatggagggcgacgaggaggacagaggctgctgctgctgcaaaccaggccacttgcctcacctgctgtcctgcaacgctgcctttcacctccgctggctcacctgggaaatcacgcagacccagtacatcctggagggctacagcatcctggacaacaacgcggccaccatgctgcaggtgtttgacctccgaaggatcctcatccgctactacatcaagagtataatatactatatggtaacgtctcccaaactcctctcctggatcaaaaatgaatcacttctgaagtccctgcagccctttgccaagtggcattacattgagcgtgaccttgcaatgttcaacattaacattgatgatgactacgtcccgtgtctccaggggatcacacgagctagcttctgcaatgtttatctagaatggattcaacactgtgcacggaaaagacaagagccttcaacgaccctggacagtgacgaggactctcccttggtgactctgtccttcgccctgtgcaccctggggaggagagctctgggaacagccgctcacaatatggccatcagcctggattctttcctgtatggcctccatgtcctcttcaaaggtgacttcagaataacagcacgtgacgagtgggtatttgctgacatggacctactgcataaagttgtagctccagctatcaggatgtccctgaaacttcaccaggaccagttcacttgccctgacgagtatgaagacccagcagtcctctacgaggccatccagtccttcgagaagaaggtggtcatctgccacgagggcgacccggcctggcggggcgcagtgctgtccaacaaggaagagctgctcaccctgcggcacgtggtggacgagggtgccgacgagtacaaggtcatcatgctccacagaagcttcctgagcttcaaggtgatcaaggttaacaaagaatgcgtccgaggactttgggccgggcagcagcaggagcttatatttcttcgcaaccgcaatccggagcgcggcagtatccagaacaataagcaggtcctgcggaacttgattaactcctcctgcgatcagcccctggggtaccccatgtatgtctccccactaaccacatcctacctagggacacacaggcagctgaagaacatctggggtggacccatcactttggacagaattaggacctggttctggaccaagtgggtaaggatgcggaaggattgcaatgcccgccagcacagtggcggcaacattgaagacgtggacggaggaggggccccgacgacaggtggcaacaatgccccgagtggtggcagccaggagagcagcgcagaacagcccagaaaaggcggtgctcagcacggggtgtcatcctgtgaagggacacagagaacaggcaggaggaaaggcaggagccagtccgtgcaggcacactcagcgctaagccaaaggccgcccatgctgagctcatctggccccatcttagagagccgccaaacattcctccagacgtccacctcagtgcacgagctggcccagaggctctcgggcagccggctctccttgcacgcctcggccacgtccctgcactctcagcccccgcccgtcaccaccaccggccacctgagtgtccgtgagcgggccgaggcgctcatcaggtccagcctgggctcctccaccagctccaccctgagcttcctcttcggcaagaggagcttttccagcgcgctcgtcatttccggactctctgctgcggaggggggcaataccagtgacacccagtcatccagcagcgtcaacatcgtgatgggcccctcagccagggctgccagccaggccactcggatctccctccccccaccccgataggaacaggatttggccttaggttttgggccaaatgggtggccttcctagtacttcccaccacattttctgccttcttttgagctctgttgggcttggggatattagttttcttttgtttatttcccaggtcatttttttcttatggtcagttttttgaagggggggggttggggttttttgttcccccacacctcccacctgcattgctctccctcgtgctccccaaatcaccacaaccaaccaataccgcgatccatgagggactcctcctgtggaaaaggagagctgttccagaacacagaactgatctcaggtttttgaaaaaaaaaaaaaaaaaaaaaaaaaatcaaacaacaacaacaaaaaaacctcacatgatggggaaacaaaaaaaagcaacaaagaagccacaccacacctccctggccaggcacagcgctgcccagagcggcacaccgcggacagcaccacacatgttccagaatctgaaatctcaaaagccattcactaacttaaaacaactcaacagagccatgaaacaaatgccctgatgaaaataagacaactgcatgttacatcatcggcactttatacattactgttaccatgaaaaagaaatgaacagcagcacgtctgataccatcagctgggcagatgcattaaggttaaatctaagtgtcaagaaaaccctatttctttataatatttatgcagctgttaagcgtaacatggtggcagcttcacaacaagaaccgtgatcatgcatgcagtcatgtctccagtattctgtgaaaagccaggatacgttaggatgtgagtttagaaactgagtccattcggtgcatggaaatccaccgcggagtcacacaatgctcctcactgtagtccaggcgattggtgggccgccagcaccctgcgggcttcacagggacgcgtgcttgttctccaagccccgcaacccttactgtgcacacaacatcgcacacacctttgtttttgaaattaaaatgtttatagttattgctgcgtccagtgttttgagttatactgaagcttctcatttctacaagtatatcttttatggtgagaacgacatttgggtaaattctgagacaacttttcccatcttcaagaccccaggaacctgtatccttgctggggtagaggtcccaaaatgcagtccatagagtatcactggcctggtgaaccatcccttttcaaaagacaatagttagaaggaaatactcaattttaaacagtcacacaaatttcttcaaagtatttaggatttggaaatttgaggagagggttgggggaagggtattgtagagaatctcttgccccttggaaagtaaatggtaatgcttttctaatttttttttttgtaaactaagaatcagcaattaataaaagcaagtgtactctataatcacagacagaaggttcttattttcaggtcagcactccctagaggtgcaaactttatttaatttaaatgcagttgtttgtctaatgggaagctgatagggccttgctgcagttctctaaggtggccaaattaaacttggctggcagctcctgtaatcctcttgggcaactttacagccaagccccaagggctaaatggcaggcctggagctgtgagtgtggcctccccacggagggtgactccttgagttcagtgaggaaaaccacggtgcctggcagtggtcagccaggagtatgactggccactccttaggcatccagaagtaggaaacacagaaagcattccacaaaacggggaatctccccaaagagctagaaacccaggctggaaggaaatggcagcgcaggcaagagagcaagagcaccctgggtgctcctccatcccgtttctctggggaggttcatgaggtgcttcttcaacagttattctgttcattgcttatcacagttcacgagttctcgtggcatcttttgtggggaggagggaggatgaaagtgacacagtgtatctacaacactaaggtcacattaatcagataggaatgcagtgacgctctgcaccgtctatgagagcgggcatctcgagtgtgcataccgaggcacagatgtgcacacacatccgcaggcaactgcacccacagagaaaaggtggcagtattggagtcaccccaggattcttgggggctgtttgaccagccatcaacagtgcagccatacttctttttcttttttatcgtggtacacaacttttatatttacaactcatgaacttgttaatctggtccttcatctagtcagctatgtatcagaaaggacttcctgcaaaatgttatattctaagcccccatttagaggaggcatccctaaactgacatttcttgctagagttgttcaaatattctgccagtatatagctaaagagttattttccagttcaagagttatttgggggctcctcacccgccacatgcccgacttgtccacagttagagagaaggcacactgctgcttataccagtgggtttgtagccaat

SEQ ID NO: 420943 - DNA, 3037 bp, Homo sapiens
gtgccgctcacggacatcaggtgcgtggtggtgacgggcgggggctgagagtgcagggacgtggccgaggcgtgcaaggagagccggctgcccgagagcctctgggccagctcgtgcacacttagcccctgtcaagcctgctagaactcagcattcatgacaggggctaagtgtgcatgaagtgacactgactacagctagaaagccaggcgcacaaatgccccttccccccagggccgctctttccagcgcagtcatccagaaaggcccacgtgcagagcccctgtgtctcagatgctgcttcagttgcccgtcctgtcctcagaggccactgtgctggccctctatcatttgacctgactttagaacctgacctcaaggatatggcagcgctagcctttagctcccacagcacggatgggggtgatgccagttagaagtgggtagtgaacgtttgctgagctgttcactgtttctctcttctctttggaagcacctctccgagccatgtgagccccctgatgccaccgagcaggggcagcttcatgaccgatgtctggctgaggctgtggcggacactctcggggttgtctgcaggagagcaagccaggaggacatgggcctggacgacacggcctcgcagcaaagtgtgtcagacgagcagtgacgggcgtgcggccgggcggggaggctggctcccccacacctcccacctgcattgctctccctcgtgctccccaaatcaccacaaccaaccaataccgcgatccatgagggactcctcctgtggaaaaggagagctgttccagaacacagaactgatctcaggtttttgaaaaaaaaaaaaaaaaaaaaaaaaaatcaaacaacaacaacaaaaaaacctcacatgatggggaaacaaaaaaaagcaacaaagaagccacaccacacctccctggccaggcacagcgctgcccagagcggcacaccgcggacagcaccacacatgttccagaatctgaaatctcaaaagccattcactaacttaaaacaactcaacagagccatgaaacaaatgccctgatgaaaataagacaactgcatgttacatcatcggcactttatacattactgttaccatgaaaaagaaatgaacagcagcacgtctgataccatcagctgggcagatgcattaaggttaaatctaagtgtcaagaaaaccctatttctttataatatttatgcagctgttaagcgtaacatggtggcagcttcacaacaagaaccgtgatcatgcatgcagtcatgtctccagtattctgtgaaaagccaggatacgttaggatgtgagtttagaaactgagtccattcggtgcatggaaatccaccgcggagtcacacaatgctcctcactgtagtccaggcgattggtgggccgccagcaccctgcgggcttcacagggacgcgtgcttgttctccaagccccgcaacccttactgtgcacacaacatcgcacacacctttgtttttgaaattaaaatgtttatagttattgctgcgtccagtgttttgagttatactgaagcttctcatttctacaagtatatcttttatggtgagaacgacatttgggtaaattctgagacaacttttcccatcttcaagaccccaggaacctgtatccttgctggggtagaggtcccaaaatgcagtccatagagtatcactggcctggtgaaccatcccttttcaaaagacaatagttagaaggaaatactcaattttaaacagtcacacaaatttcttcaaagtatttaggatttggaaatttgaggagagggttgggggaagggtattgtagagaatctcttgccccttggaaagtaaatggtaatgcttttctaatttttttttttgtaaactaagaatcagcaattaataaaagcaagtgtactctataatcacagacagaaggttcttattttcaggtcagcactccctagaggtgcaaactttatttaatttaaatgcagttgtttgtctaatgggaagctgatagggccttgctgcagttctctaaggtggccaaattaaacttggctggcagctcctgtaatcctcttgggcaactttacagccaagccccaagggctaaatggcaggcctggagctgtgagtgtggcctccccacggagggtgactccttgagttcagtgaggaaaaccacggtgcctggcagtggtcagccaggagtatgactggccactccttaggcatccagaagtaggaaacacagaaagcattccacaaaacggggaatctccccaaagagctagaaacccaggctggaaggaaatggcagcgcaggcaagagagcaagagcaccctgggtgctcctccatcccgtttctctggggaggttcatgaggtgcttcttcaacagttattctgttcattgcttatcacagttcacgagttctcgtggcatcttttgtggggaggagggaggatgaaagtgacacagtgtatctacaacactaaggtcacattaatcagataggaatgcagtgacgctctgcaccgtctatgagagcgggcatctcgagtgtgcataccgaggcacagatgtgcacacacatccgcaggcaactgcacccacagagaaaaggtggcagtattggagtcaccccaggattcttgggggctgtttgaccagccatcaacagtgcagccatacttctttttcttttttatcgtggtacacaacttttatatttacaactcatgaacttgttaatctggtccttcatctagtcagctatgtatcagaaaggacttcctgcaaaatgttatattctaagcccccatttagaggaggcatccctaaactgacatttcttgctagagttgttcaaatattctgccagtatatagctaaagagttattttccagttcaagagttatttgggggctcctcacccgccacatgcccgacttgtccacagttagagagaaggcacactgctgcttataccagtgggtttgtagccaat

SEQ ID NO: 420944 - DNA, 3972 bp, Homo sapiens
tgtgttcaagaccaggctttctacaattgtcagtgggaccttcattatgcccaaatccttaagtaaaccctatgtgtgatgctgatatatttgtggaagccctttcttaatggcgaatatatcagatttaaccatatgaaattgccattttgtaggtgataataaacagttgactatcatcaatttcataggcctgatgtcaatttcatatttcattctttaaagaccgccactcattgttggaaataaaaggacaaaggtaggctggcatagcctctccaagagagcagatcgctgcacttacaaagggttttggggatgtgtggagttcaaggactggtgaggttttggaggcatacatgggttgatggcatctgtataggtggttacttgaaaagcctgttattcatcagttgcccctcaagtctgcagtgagtcggctaactctcagaagccaggggttgtcatggactggctgccttacaaaagctgtgcactgaggggtgtttacatgatggaataggttcaaagctggttctagtggccacttgttaccatggctgcagatgatccgagaactttcattctcatggttcaacctaagaaaggtctataagagtataccccactcttgaaagcaggtggtggagacgttgactactcaccaccatttcctgaaatcaatttgaagagaaagatacctttgtggacactgttctcaagttctgaaagtgggtagcattacattggcagtttaaacacttgcttttttttttttgagtcttgctctgtcacccagtttggagtgcagtggtgcagtctcggctcactgcgacctcggcctcctggattcaagttcagcctcccgggtggctgggattgtaggagtgtgccaccacgcatggctaatctttttgtgtttttggtggagatggagtttcacactgtttgcggactggtaccaagttcctgacttcaaatgctctgcctgcctcggcctccctaggtgttgggattacaggcgtgagccaccgtgctcagcctaaatacttgctttgattttgcagatctggtgctccaaattgattaagacacaagaccgttctctccaaatcagagagctactcatctctcccttccatgtgtttcttgtactgctccctctatctcttatcatgagactcctctcttcctgcagtgtggtaaaactacagcaatcgtcttaacctgtgagatctgtcacctttgcattttccactcatgcagctggttctataaaccaactcttctgcttggggggatctaatcatgaccttttacccttttgtggcctcttctagtacaaggcgagtggataattccaacacaagactggcagtccaaattgaaagagatccagggaatgatgacaacaatctcaattccattttttatgaacacttgacaaggaccctccaggagtccctctgtggagacttagttcttggacgttggggcaactacagctctggcgattgctttattttggcttcagatgacctcaatgcctttgttcacctgattgaaattggaaatggtcttgtcacctttcaacttcgaggactggaattccgaggaacctactgccagcagagggaggtagaagccatcatggagggcgacgaggaggacagaggctgctgctgctgcaaaccaggccacttgcctcacctgctgtcctgcaacgctgcctttcacctccgctggctcacctgggaaatcacgcagacccagtacatcctggagggctacagcatcctggacaacaacgcggccaccatgctgcaggtgtttgacctccgaaggatcctcatccgctactacatcaagagtataatatactatatggtaacgtctcccaaactcctctcctggatcaaaaatgaatcacttctgaagtccctgcagccctttgccaagtggcattacattgagcgtgaccttgcaatgttcaacattaacattgatgatgactacgtcccgtgtctccaggggatcacacgagctagcttctgcaatgtttatctagaatggattcaacactgtgcacggaaaagacaagagccttcaacgaccctggacagtgacgaggactctcccttggtgactctgtccttcgccctgtgcaccctggggaggagagctctgggaacagccgctcacaatatggccatcagcctggattctttcctgtatggcctccatgtcctcttcaaaggtgacttcagaataacagcacgtgacgagtgggtatttgctgacatggacctactgcataaagttgtagctccagctatcaggatgtccctgaaacttcaccaggaccagttcacttgccctgacgagtatgaagacccagcagtcctctacgaggccatccagtccttcgagaagaaggtggtcatctgccacgagggcgacccggcctggcggggcgcagtgctgtccaacaaggaagagctgctcaccctgcggcacgtggtggacgagggtgccgacgagtacaaggtcatcatgctccacagaagcttcctgagcttcaaggtgatcaaggttaacaaagaatgcgtccgaggactttgggccgggcagcagcaggagcttatatttcttcgcaaccgcaatccggagcgcggcagtatccagaacaataagcaggtcctgcggaacttgattaactcctcctgcgatcagcccctggggtaccccatgtatgtctccccactaaccacatcctacctagggacacacaggcagctgaagaacatctggggtggacccatcactttggacagaattaggacctggttctggaccaagtgggtaaggatgcggaaggattgcaatgcccgccagcacagtggcggcaacattgaagacgtggacggaggaggggccccgacgacaggtggcaacaatgccccgagtggtggcagccaggagagcagcgcagaacagcccagaaaaggcggtgctcagcacggggtgtcatcctgtgaagggacacagagaacaggcaggaggaaaggcaggagccagtccgtgcaggcacactcagcgctaagccaaaggccgcccatgctgagctcatctggccccatcttagagagccgccaaacattcctccagacgtccacctcagtgcacgagctggcccagaggctctcgggcagccggctctccttgcacgcctcggccacgtccctgcactctcagcccccgcccgtcaccaccaccggccacctgagtgtccgtgagcgggccgaggcgctcatcaggtccagcctgggctcctccaccagctccaccctgagcttcctcttcggcaagaggagcttttccagcgcgctcgtcatttccggactctctgctgcggaggggggcaataccagtgacacccagtcatccagcagcgtcaacatcgtgatgggcccctcagccagggctgccagccaggccactcggcacctctccgagccatgtgagccccctgatgccaccgagcaggggcagcttcatgaccgatgtctggctgaggctgtggcggacactctcggggttgtctgcaggagagcaagccaggaggacatgggcctggacgacacggcctcgcagcaaagtgtgtcagacgagcagtgacgggcgtgcggccgggcggggaggctggctcccccacacctcccacctgcattgctctccctcgtgctccccaaatcaccacaaccaaccaataccgcgatccatgagggactcctcctgtggaaaaggagagctgttccagaacacagaactgatctcaggtttttgaaaaaaaaaattttatacaatgaataaaacttcgagggggggggccccggtacccccaattccgcccctaatagtggaagtggttttaacaaatttcacatgggcccggccgttttttaacaaagt

SEQ ID NO: 420945 - DNA, 5002 bp, Homo sapiens
tgtgttcaagaccaggctttctacaattgtcagtgggaccttcattatgcccaaatccttaagtaaaccctatgtgtgatgctgatatatttgtggaagccctttcttaatggcgaatatatcagatttaaccatatgaaattgccattttgtaggtgataataaacagttgactatcatcaatttcataggcctgatgtcaatttcatatttcattctttaaagaccgccactcattgttggaaataaaaggacaaaggtaggctggcatagcctctccaagagagcagatcgctgcacttacaaagggttttggggatgtgtggagttcaaggactggtgaggttttggaggcatacatgggttgatggcatctgtataggtggttacttgaaaagcctgttattcatcagttgcccctcaagtctgcagtgagtcggctaactctcagaagccaggggttgtcatggactggctgccttacaaaagctgtgcactgaggggtgtttacatgatggaataggttcaaagctggttctagtggccacttgttaccatggctgcagatgatccgagaactttcattctcatggttcaacctaagaaaggtctataagagtataccccactcttgaaagcaggtggtggagacgttgactactcaccaccatttcctgaaatcaatttgaagagaaagatacctttgtggacactgttctcaagttctgaaagtgggtagcattacattggcagtttaaacacttgcttttttttttttgagtcttgctctgtcacccagtttggagtgcagtggtgcagtctcggctcactgcgacctcggcctcctggattcaagttcagcctcccgggtggctgggattgtaggagtgtgccaccacgcatggctaatctttttgtgtttttggtggagatggagtttcacactgtttgcggactggtaccaagttcctgacttcaaatgctctgcctgcctcggcctccctaggtgttgggattacaggcgtgagccaccgtgctcagcctaaatacttgctttgattttgcagatctggtgctccaaattgattaagacacaagaccgttctctccaaatcagagagctactcatctctcccttccatgtgtttcttgtactgctccctctatctcttatcatgagactcctctcttcctgcagtgtggtaaaactacagcaatcgtcttaacctgtgagatctgtcacctttgcattttccactcatgcagctggttctataaaccaactcttctgcttggggggatctaatcatgaccttttacccttttgtggcctcttctagtacaaggcgagtggataattccaacacaagactggcagtccaaattgaaagagatccagggaatgatgacaacaatctcaattccattttttatgaacacttgacaaggaccctccaggagtccctctgtggagacttagttcttggacgttggggcaactacagctctggcgattgctttattttggcttcagatgacctcaatgcctttgttcacctgattgaaattggaaatggtcttgtcacctttcaacttcgaggactggaattccgaggaacctactgccagcagagggaggtagaagccatcatggagggcgacgaggaggacagaggctgctgctgctgcaaaccaggccacttgcctcacctgctgtcctgcaacgctgcctttcacctccgctggctcacctgggaaatcacgcagacccagtacatcctggagggctacagcatcctggacaacaacgcggccaccatgctgcaggtgtttgacctccgaaggatcctcatccgctactacatcaagagtataatatactatatggtaacgtctcccaaactcctctcctggatcaaaaatgaatcacttctgaagtccctgcagccctttgccaagtggcattacattgagcgtgaccttgcaatgttcaacattaacattgatgatgactacgtcccgtgtctccaggggatcacacgagctagcttctgcaatgtttatctagaatggattcaacactgtgcacggaaaagacaagagccttcaacgaccctggacagtgacgaggactctcccttggtgactctgtccttcgccctgtgcaccctggggaggagagctctgggaacagccgctcacaatatggccatcagcctggattctttcctgtatggcctccatgtcctcttcaaaggtgacttcagaataacagcacgtgacgagtgggtatttgctgacatggacctactgcataaagttgtagctccagctatcaggatgtccctgaaacttcaccaggaccagttcacttgccctgacgagtatgaagacccagcagtcctctacgaggccatccagtccttcgagaagaaggtggtcatctgccacgagggcgacccggcctggcggggcgcagtgctgtccaacaaggaagagctgctcaccctgcggcacgtggtggacgagggtgccgacgagtacaaggtcatcatgctccacagaagcttcctgagcttcaaggtgatcaaggttaacaaagaatgcgtccgaggactttgggccgggcagcagcaggagcttatatttcttcgcaaccgcaatccggagcgcggcagtatccagaacaataagcaggtcctgcggaacttgattaactcctcctgcgatcagcccctggggtaccccatgtatgtctccccactaaccacatcctacctagggacacacaggcagctgaagaacatctggggtggacccatcactttggacagaattaggacctggttctggaccaagtgggtaaggatgcggaaggattgcaatgcccgccagcacagtggcggcaacattgaagacgtggacggaggaggggccccgacgacaggtggcaacaatgccccgagtggtggcagccaggagagcagcgcagaacagcccagaaaaggcggtgctcagcacggggtgtcatcctgtgaagggacacagagaacaggcaggaggaaaggcaggagccagtccgtgcaggcacactcagcgctaagccaaaggccgcccatgctgagctcatctggccccatcttagagagccgccaaacattcctccagacgtccacctcagtgcacgagctggcccagaggctctcgggcagccggctctccttgcacgcctcggccacgtccctgcactctcagcccccgcccgtcaccaccaccggccacctgagtgtccgtgagcgggccgaggcgctcatcaggtccagcctgggctcctccaccagctccaccctgagcttcctcttcggcaagaggagcttttccagcgcgctcgtcatttccggactctctgctgcggaggggggcaataccagtgacacccagtcatccagcagcgtcaacatcgtgatgggcccctcagccagggctgccagccaggccactcgggtaaggggctgggcagggctcaccaggacaggctgggatggtggcacgggctcctggcctgagcgtggcacctgccttgcgttcccacccttctgcctgcagaaccccatccccttctctatggggctcccagagtgacaaaggacagtgattagacacgaagtggcttagctgctcttgaaagcagacaagatacagagcagatatcctgtaaacgataatgcccaggcaggcactgaaaggagtcaccggatacagaggttctgcagaactgtggccatctgccctacaccggggcatgacggagaatgccctccacccattcacacagcaggactcttctcacatgattctggcctgagggagaggaaaggacacctgtcaatgctggagttagagcttcactgcttctcagccaatcgatttgactttaaagctgctgagatggcccactgcttttaggtatttaaatactagacaaggagagttctaaggacttcacccaaataagctgttacttgtccagaatcccaaaccagctgagatgaaatgaatacttgagcttcttcagtgagaaaaaagtaaataaatacccagcagtgctcctatgtgacctggtagacagggaaaatcgatggtgtcaaggcaaaaatgggtcaggtttggagagttcccccactccttttgagtgttcaggttttccttaccatggctcatgctttccatcaagcaccagagttgcagtggcttggcctctggttctgggtgaggttatttgcaggtggagacggggggctgcacctgaacatttctagtgtcaccctccctctccttcatgggaaacagctctccagggaagtaccttcctgccaggggaagccaaggctgggccggccgccctacaaggagccacaggattgcagccatgggtgccacctttcatggaaggggagatttatgggctttcctggaacccccaggctgtcctggccaagaggaaagaggtggttacttcaggagtttgaccttagttagataactaaaagaatacatttcccctcccttttctttatttcctcaataaaaatgtacaaagtatcacccttaaaaaaaaaaaaaaaaaaaaaaaaaaaaaaaaaaaaaaaaaaaaaaaaaaaaaactaaaaactaaatatcactagagccaaattacacgtttttgactggatcaaagcaggaagtgctgacaacccggggtacatctggggccactttctgggcactggcgtggcaacaaatttgttgcggcccctctgggagccatagaggcctccagatgcccttatatggggagctccattcactattatccgctaagaaactaacagccctccattttcagcgttatattgatacttccctgggttagactggatcttaatttgttcctactccaagttgtggaattaaatttgcaaattgcggataacttgaaccgcatttcctggccccttgtcat

SEQ ID NO: 420946 - DNA, 3459 bp, Homo sapiens
tgtgttcaagaccaggctttctacaattgtcagtgggaccttcattatgcccaaatccttaagtaaaccctatgtgtgatgctgatatatttgtggaagccctttcttaatggcgaatatatcagatttaaccatatgaaattgccattttgtaggtgataataaacagttgactatcatcaatttcataggcctgatgtcaatttcatatttcattctttaaagaccgccactcattgttggaaataaaaggacaaaggtaggctggcatagcctctccaagagagcagatcgctgcacttacaaagggttttggggatgtgtggagttcaaggactggtgaggttttggaggcatacatgggttgatggcatctgtataggtggttacttgaaaagcctgttattcatcagttgcccctcaagtctgcagtgagtcggctaactctcagaagccaggggttgtcatggactggctgccttacaaaagctgtgcactgaggggtgtttacatgatggaataggttcaaagctggttctagtggccacttgttaccatggctgcagatgatccgagaactttcattctcatggttcaacctaagaaaggtctataagagtataccccactcttgaaagcaggtggtggagacgttgactactcaccaccatttcctgaaatcaatttgaagagaaagatacctttgtggacactgttctcaagttctgaaagtgggtagcattacattggcagtttaaacacttgcttttttttttttgagtcttgctctgtcacccagtttggagtgcagtggtgcagtctcggctcactgcgacctcggcctcctggattcaagttcagcctcccgggtggctgggattgtaggagtgtgccaccacgcatggctaatctttttgtgtttttggtggagatggagtttcacactgtttgcggactggtaccaagttcctgacttcaaatgctctgcctgcctcggcctccctaggtgttgggattacaggcgtgagccaccgtgctcagcctaaatacttgctttgattttgcagatctggtgctccaaattgattaagacacaagaccgttctctccaaatcagagagctactcatctctcccttccatgtgtttcttgtactgctccctctatctcttatcatgagactcctctcttcctgcagtgtggtaaaactacagcaatcgtcttaacctgtgagatctgtcacctttgcattttccactcatgcagctggttctataaaccaactcttctgcttggggggatctaatcatgaccttttacccttttgtggcctcttctagtacaaggcgagtggataattccaacacaagactggcagtccaaattgaaagagatccagggaatgatgacaacaatctcaattccattttttatgaacacttgacaaggaccctccaggagtccctctgtggagacttagttcttggacgttggggcaactacagctctggcgattgctttattttggcttcagatgacctcaatgcctttgttcacctgattgaaattggaaatggtcttgtcacctttcaacttcgaggactggaattccgaggaacctactgccagcagagggaggtagaagccatcatggagggcgacgaggaggacagaggctgctgctgctgcaaaccaggccacttgcctcacctgctgtcctgcaacgctgcctttcacctccgctggctcacctgggaaatcacgcagacccagtacatcctggagggctacagcatcctggacaacaacgcggccaccatgctgcaggtgtttgacctccgaaggatcctcatccgctactacatcaagagtataatatactatatggtaacgtctcccaaactcctctcctggatcaaaaatgaatcacttctgaagtccctgcagccctttgccaagtggcattacattgagcgtgaccttgcaatgttcaacattaacattgatgatgactacgtcccgtgtctccaggggatcacacgagctagcttctgcaatgtttatctagaatggattcaacactgtgcacggaaaagacaagagccttcaacgaccctggacagtgacgaggactctcccttggtgactctgtccttcgccctgtgcaccctggggaggagagctctgggaacagccgctcacaatatggccatcagcctggattctttcctgtatggcctccatgtcctcttcaaaggtgacttcagaataacagcacgtgacgagtgggtatttgctgacatggacctactgcataaagttgtagctccagctatcaggatgtccctgaaacttcaccaggaccagttcacttgccctgacgagtatgaagacccagcagtcctctacgaggccatccagtccttcgagaagaaggtggtcatctgccacgagggcgacccggcctggcggggcgcagtgctgtccaacaaggaagagctgctcaccctgcggcacgtggtggacgagggtgccgacgagtacaaggtcatcatgctccacagaagcttcctgagcttcaaggtgatcaaggttaacaaagaatgcgtccgaggactttgggccgggcagcagcaggagcttatatttcttcgcaaccgcaatccggagcgcggcagtatccagaacaataagcaggtcctgcggaacttgattaactcctcctgcgatcagcccctggggtaccccatgtatgtctccccactaaccacatcctacctagggacacacaggcagctgaagaacatctggggtggacccatcactttggacagaattaggacctggttctggaccaagtgggtaaggatgcggaaggattgcaatgcccgccagcacagtggcggcaacattgaagacgtggacggaggaggggccccgacgacaggtggcaacaatgccccgagtggtggcagccaggagagcagcgcagaacagcccagaaaaggcggtgctcagcacggggtgtcatcctgtgaagggacacagagaacaggcaggaggaaaggcaggagccagtccgtgcaggcacactcagcgctaagccaaaggccgcccatgctgagctcatctggccccatcttagagagccgccaaacattcctccagacgtccacctcagtgcacgagctggcccagaggctctcgggcagccggctctccttgcacgcctcggccacgtccctgcactctcagcccccgcccgtcaccaccaccggccacctgagtgtccgtgagcgggccgaggcgctcatcaggtccagcctgggctcctccaccagctccaccctgagcttcctcttcggcaagaggagcttttccagcgcgctcgtcatttccggactctctagacaaccccgagagtgtccgccacagcctcagccagacatcggtcatgaa

SEQ ID NO: 420947 - DNA, 3132 bp, Homo sapiens
tgtgttcaagaccaggctttctacaattgtcagtgggaccttcattatgcccaaatccttaagtaaaccctatgtgtgatgctgatatatttgtggaagccctttcttaatggcgaatatatcagatttaaccatatgaaattgccattttgtaggtgataataaacagttgactatcatcaatttcataggcctgatgtcaatttcatatttcattctttaaagaccgccactcattgttggaaataaaaggacaaaggtaggctggcatagcctctccaagagagcagatcgctgcacttacaaagggttttggggatgtgtggagttcaaggactggtgaggttttggaggcatacatgggttgatggcatctgtataggtggttacttgaaaagcctgttattcatcagttgcccctcaagtctgcagtgagtcggctaactctcagaagccaggggttgtcatggactggctgccttacaaaagctgtgcactgaggggtgtttacatgatggaataggttcaaagctggttctagtggccacttgttaccatggctgcagatgatccgagaactttcattctcatggttcaacctaagaaaggtctataagagtataccccactcttgaaagcaggtggtggagacgttgactactcaccaccatttcctgaaatcaatttgaagagaaagatacctttgtggacactgttctcaagttctgaaagtgggtagcattacattggcagtttaaacacttgcttttttttttttgagtcttgctctgtcacccagtttggagtgcagtggtgcagtctcggctcactgcgacctcggcctcctggattcaagttcagcctcccgggtggctgggattgtaggagtgtgccaccacgcatggctaatctttttgtgtttttggtggagatggagtttcacactgtttgcggactggtaccaagttcctgacttcaaatgctctgcctgcctcggcctccctaggtgttgggattacaggcgtgagccaccgtgctcagcctaaatacttgctttgattttgcagatctggtgctccaaattgattaagacacaagaccgttctctccaaatcagagagctactcatctctcccttccatgtgtttcttgtactgctccctctatctcttatcatgagactcctctcttcctgcagtgtggtaaaactacagcaatcgtcttaacctgtgagatctgtcacctttgcattttccactcatgcagctggttctataaaccaactcttctgcttggggggatctaatcatgaccttttacccttttgtggcctcttctagtacaaggcgagtggataattccaacacaagactggcagtccaaattgaaagagatccagggaatgatgacaacaatctcaattccattttttatgaacacttgacaaggaccctccaggagtccctctgtggagacttagttcttggacgttggggcaactacagctctggcgattgctttattttggcttcagatgacctcaatgcctttgttcacctgattgaaattggaaatggtcttgtcacctttcaacttcgaggactggaattccgaggaacctactgccagcagagggaggtagaagccatcatggagggcgacgaggaggacagaggctgctgctgctgcaaaccaggccacttgcctcacctgctgtcctgcaacgctgcctttcacctccgctggctcacctgggaaatcacgcagacccagtacatcctggagggctacagcatcctggacaacaacgcggccaccatgctgcaggtgtttgacctccgaaggatcctcatccgctactacatcaagagtataatatactatatggtaacgtctcccaaactcctctcctggatcaaaaatgaatcacttctgaagtccctgcagccctttgccaagtggcattacattgagcgtgaccttgcaatgttcaacattaacattgatgatgactacgtcccgtgtctccaggggatcacacgagctagcttctgcaatgtttatctagaatggattcaacactgtgcacggaaaagacaagagccttcaacgaccctggacagtgacgaggactctcccttggtgactctgtccttcgccctgtgcaccctggggaggagagctctgggaacagccgctcacaatatggccatcagcctggattctttcctgtatggcctccatgtcctcttcaaaggtgacttcagaataacagcacgtgacgagtgggtatttgctgacatggacctactgcataaagttgtagctccagctatcaggatgtccctgaaacttcaccaggaccagttcacttgccctgacgagtatgaagacccagcagtcctctacgaggccatccagtccttcgagaagaaggtggtcatctgccacgagggcgacccggcctggcggggcgcagtgctgtccaacaaggaagagctgctcaccctgcggcacgtggtggacgagggtgccgacgagtacaaggtcatcatgctccacagaagcttcctgagcttcaaggtgatcaaggttaacaaagaatgcgtccgaggactttgggccgggcagcagcaggagcttatatttcttcgcaaccgcaatccggagcgcggcagtatccagaacaataagcaggtcctgcggaacttgattaactcctcctgcgatcagcccctggggtaccccatgtatgtctccccactaaccacatcctacctagggacacacaggcagctgaagaacatctggggtggacccatcactttggacagaattaggacctggttctggaccaagtgggtaaggatgcggaaggattgcaatgcccgccagcacagtggcggcaacattgaaccggatagcttgccggcaagctatccggttcaatttccaaagagaaccggtactggttaatctctgttccctgatatcttcattctccctagtaatcatttactgttccctgtctcctgactcccctctgaaaagaggaaatgtgtggccgggcgcagtagctcacacttgtaatcccagatctttgggaggccgaggcgggtggatcacctgagg

SEQ ID NO: 420948 - DNA, 371 bp, Homo sapiens
gggatctaatcatgaccttttacccttttgtggcctcttctagtacaaggcgagtggataattccaacacaagactggcagtccaaattgaaagagatccaggtaagaagatctcttctctctttttcaactatttattgttgtatggatggattctcaaaaggaagaattaaatactcactctgtactcattgtggagacaatgcacatcttagttaatctgctgaatgtggaataaaactgtgcaggtagagtgatcaagcaacctgatttggtttgacaatgcattgctccgctatttagaattgattaggaccttgctcagtattgcatacccctgttaatcaagacattttagttcgtgtgcagta

SEQ ID NO: 420949 - DNA, 421 bp, Homo sapiens
gtaatcactgcccatctttatgacctgaagtgccatatttcaaatcccagaaaagcagatcatcagcccacattgtaggcccttttctctcctaaaataacttttccacttttatttttttttccgtgtccaaccacaggagaaactgcttcaggaagctgagcattccctgtctgtggggtcatcttagaggggactggatgaccacgtggctgacttacaaagccaatgtcactctacatttatgcctgtgtgttggtacatattggaatctgtgtgaaagctgagttaacttcttgctctttcagccttcaacgaccctggacagtgacgaggactctcccttggtgactctgtccttcgccctgtgcaccctggggaggagagctctgggaacagccgctcacaatatggccatcag

SEQ ID NO: 420950 - DNA, 598 bp, Homo sapiens
ctatggtaggagtattgagtttattagaaagcagacaacatgatataggagttagactggagtcctaggaaaagtatttctcatctgtggttggtctgaaaaggtgtcttcaatgcatagtgtgagctagtatgaagagatgagaaatgggcttctcaaggaaacgtgtattgctctgcggtgaagccctgaggggcagcgggatggacctggccatcttctgaggggcccttcgtgataacgggctgctcagcaggaggaggtcctgcaggtggtgctgcaaggggtcggctggccgcagggggactgcacagacacaggctggcagcaggtggtggctcagcaggaggaggtcctgcaggtggtgctgcaaggggtcggctggccgcaggggggccggcagcagggggactgcacagacacaggctggcagcaggtggtggcccagcagcagggcctgcacaccacagccgtgcacgacgaggggcagcaggtgatggggcggcagcagccttcctgcagggagcaggggtcgcagcacaccgggcggcggcagggctcgcagatggggcgcgtgcagcggggcacgcaggtcacg

SEQ ID NO: 420951 - DNA, 688 bp, Homo sapiens
ctatggtaggagtattgagtttattagaaagcagacaacatgatataggagttagactggagtcctaggaaaagtatttctcatctgtggttggtctgaaaaggtgtcttcaatgcatagtgtgagctagtatgaagagatgagaaatgggcttctcaaggaaacgtgtattgctctgcggtgaagccctgaggggcagcgggatggacctggccatcttctgaggggcccttcgtgataacgggctgctcagcaggaggaggtcctgcaggtggtgctgcaaggggtcggctggccgcagggggactgcacagacacaggctggcagcaggtggtggctcagcaggaggaggtcctgcaggtggtgctgcaaggggtcggctggccgcagggggactgcacagacacaggctggcagcaggtggtggctcagcaggaggaggtcctgcaggtggtgctgcaaggggtcggctggccgcaggggggccggcagcagggggactgcacagacacaggctggcagcaggtggtggcccagcagcagggcctgcacaccacagccgtgcacgacgaggggcagcaggtgatggggcggcagcagccttcctgcagggagcaggggtcgcagcacaccgggcggcggcagggctcgcagatggggcgcgtgcagcggggcacgcaggtcacg

SEQ ID NO: 420952 - DNA, 2064 bp, Homo sapiens
aagaacaaacgcgcactcaaaacaaaggaagaccgtcctcgactgcagaggaagcaggaagctgtcggcccagctctgagcccagctgctggagccccgagcagcggcatggagtccgtggccctgtacagctttcaggctacagagagcgacgagctggccttcaacaagggagacacactcaagatcctgaacatggaggatgaccagaactggtacaaggccgagctccggggtgtcgagggatttattcccaagaactacatccgcgtcaagccccatccgtggtactcgggcaggatttcccggcagctggccgaagagattctgatgaagcggaaccatctgggagccttcctgatccgggagagtgagagctccccaggggagttctctgtgtctgtgaactatggagaccaggtgcagcacttcaaggtgctgcgtgaggcctcggggaagtacttcctgtgggaggagaagttcaactccctcaacgagctggtcgacttctaccgcaccaccaccatcgccaagaagcggcagatcttcctgcgcgacgaggagcccttgctcaagtcacctggggcctgctttgcccaggcccagtttgacttctcagcccaggacccctcgcagctcagcttccgccgtggcgacatcattgaggtcctggagcgcccagacccccactggtggcggggccggtcctgcgggcgcgttggcttcttcccacggagttacgtgcagcccgtgcacctgtgagcagcccggcggccgatctggccaacgggcctttttacaggaactgaggtccagagaggacatggacacccccagctctgtcagagtcacacggggctcagtggacggccttggactgaacgtgggctcctaactgcctccggccgctctgcacaaactgggatggcccaggtcccccagcaagggtacccagcaagggtagctccggggcttcctggctggttgctttccattggctgccagctgtgtgacaccacagggcggagtctgtggaggccccgcccacctcctcttgtcaatggccccatctgccaggaaggttgaggactcccaggtttcacccactggaggctcaacctaaggaaccctggccatggtgggtgggttcaccttgggctgaccacccactgggcctgcctgcccctccctcaaaaggcccctggagttgttcaggctgttgggaggtggctcagcctcgaaggacagactgcacacctgttgacctaaactcactggacagactccaggtggacaccaactcctcaacagccccatgacttcagctccacctggggcacccagcaccccaccacagggctagaggccctaagaccctgaaaaaggggcgggcagtagggaaggtggaggcacactcctcttctgttggacaggtgagctctgagggcaagccctgggcccagccacgcagagaccctggctgccctggctcttgtttgtttaggcccaggttctgcccagaccggggcccagcagagctctcaggaggctgagaaacctccagggcagacagaaagttggggccagagctaggttttagagatcctacaggatcccacatgggacggctacctaggtggggcacggcccctacccgagaacaggagggtcctccagagaatgtgccatgatcagggatatgagcagggcctgcccagagcctgggcacctttgggagagggaaaagtgaggtgggacttggaaaggctttgaacgccaggctgatggttgagggatggtgggcagggagggagggcgaagaggctccctctggcatttgggagccggtgggtggagggaggagcccttggaggtggctgcagtcccttaatggggggccttgctctgggcatgtggggctcttcctccatccagagctggcccaagacccttagaaccctgagtgctggcaaatctcactgctcctgacccagcctgtgtattcaaaacgaaaacagtaaaaccaacatcaggatgtccgtcagaaatctaattttccttcca

SEQ ID NO: 420953 - DNA, 1941 bp, Homo sapiens
caagggcaagagcaataaacacgactcttagctgcacgtcactttacagtttataaggcccattctcatggctttgtggcctggagtcaaaagctaccatggctgctgcagagtcgggtaaataagatcccaagagaagcagggacctaaccaaaatcccaccctaaggaccaggactcaggtcccctgacccaccagccctattgtcccagctgggcggctgggaaagccgtgttctatgtagatgcagcatctgcacagcagacaggcaggggtgtgggcagcaggaggcccagtggtggcactaccattgatctggacttaaagttcaactccggtgctgcccgagacccctcctcacctgtggcaaatcacttctcttgggtgcctctgagggagggtgggttgcagggcttctgaaggcaccctactaaccacctcctcttcttgcagtcacctggggcctgctttgcccaggcccagtttgacttctcagcccaggacccctcgcagctcagcttccgccgtggcgacatcattgaggtcctggagcgcccagacccccactggtggcggggccggtcctgcgggcgcgttggcttcttcccacggagttacgtgcagcccgtgcacctgtgagcagcccggcggccgatctggccaacgggcctttttacaggaactgaggtccagagaggacatggacacccccagctctgtcagagtcacacggggctcagtggacggccttggactgaacgtgggctcctaactgcctccggccgctctgcacaaactgggatggcccaggtcccccagcaagggtacccagcaagggtagctccggggcttcctggctggttgctttccattggctgccagctgtgtgacaccacagggcggagtctgtggaggccccgcccacctcctcttgtcaatggccccatctgccaggaaggttgaggactcccaggtttcacccactggaggctcaacctaaggaaccctggccatggtgggtgggttcaccttgggctgaccacccactgggcctgcctgcccctccctcaaaaggcccctggagttgttcaggctgttgggaggtggctcagcctcgaaggacagactgcacacctgttgacctaaactcactggacagactccaggtggacaccaactcctcaacagccccatgacttcagctccacctggggcacccagcaccccaccacagggctagaggccctaagaccctgaaaaaggggcgggcagtagggaaggtggaggcacactcctcttctgttggacaggtgagctctgagggcaagccctgggcccagccacgcagagaccctggctgccctggctcttgtttgtttaggcccaggttctgcccagaccggggcccagcagagctctcaggaggctgagaaacctccagggcagacagaaagttggggccagagctaggttttagagatcctacaggatcccacatgggacggctacctaggtggggcacggcccctacccgagaacaggagggtcctccagagaatgtgccatgatcagggatatgagcagggcctgcccagagcctgggcacctttgggagagggaaaagtgaggtgggacttggaaaggctttgaacgccaggctgatggttgagggatggtgggcagggagggagggcgaagaggctccctctggcatttgggagccggtgggtggagggaggagcccttggaggtggctgcagtcccttaatggggggccttgctctgggcatgtggggctcttcctccatccagagctggcccaagacccttagaaccctgagtgctggcaaatctcactgctcctgacccagcctgtgtattcaaaacgaaaacagtaaaaccaacatcaggatgtccgtcagaaatctaattttccttcca

SEQ ID NO: 420954 - DNA, 2132 bp, Homo sapiens
aagaacaaacgcgcactcaaaacaaaggaagaccgtcctcgactgcagaggaagcaggaagctgtcggcccagctctgagcccagctgctggagccccgagcagcggcatggagtccgtggccctgtacagctttcaggctacagagagcgacgagctggccttcaacaagggagacacactcaagatcctgaacatggaggatgaccagaactggtacaaggccgagctccggggtgtcgagggatttattcccaagaactacatccgcgtcaagccccatccgtggtactcgggcaggatttcccggcagctggccgaagagattctgatgaagcggaaccatctgggagccttcctgatccgggagagtgagagctccccaggggagttctctgtgtctgtgaaatgggcaaactgaggccagagaggggccatgcctgatggagatcgcccagcgggcagttagcacccagctatggagaccaggtgcagcacttcaaggtgctgcgtgaggcctcggggaagtacttcctgtgggaggagaagttcaactccctcaacgagctggtcgacttctaccgcaccaccaccatcgccaagaagcggcagatcttcctgcgcgacgaggagcccttgctcaagtcacctggggcctgctttgcccaggcccagtttgacttctcagcccaggacccctcgcagctcagcttccgccgtggcgacatcattgaggtcctggagcgcccagacccccactggtggcggggccggtcctgcgggcgcgttggcttcttcccacggagttacgtgcagcccgtgcacctgtgagcagcccggcggccgatctggccaacgggcctttttacaggaactgaggtccagagaggacatggacacccccagctctgtcagagtcacacggggctcagtggacggccttggactgaacgtgggctcctaactgcctccggccgctctgcacaaactgggatggcccaggtcccccagcaagggtacccagcaagggtagctccggggcttcctggctggttgctttccattggctgccagctgtgtgacaccacagggcggagtctgtggaggccccgcccacctcctcttgtcaatggccccatctgccaggaaggttgaggactcccaggtttcacccactggaggctcaacctaaggaaccctggccatggtgggtgggttcaccttgggctgaccacccactgggcctgcctgcccctccctcaaaaggcccctggagttgttcaggctgttgggaggtggctcagcctcgaaggacagactgcacacctgttgacctaaactcactggacagactccaggtggacaccaactcctcaacagccccatgacttcagctccacctggggcacccagcaccccaccacagggctagaggccctaagaccctgaaaaaggggcgggcagtagggaaggtggaggcacactcctcttctgttggacaggtgagctctgagggcaagccctgggcccagccacgcagagaccctggctgccctggctcttgtttgtttaggcccaggttctgcccagaccggggcccagcagagctctcaggaggctgagaaacctccagggcagacagaaagttggggccagagctaggttttagagatcctacaggatcccacatgggacggctacctaggtggggcacggcccctacccgagaacaggagggtcctccagagaatgtgccatgatcagggatatgagcagggcctgcccagagcctgggcacctttgggagagggaaaagtgaggtgggacttggaaaggctttgaacgccaggctgatggttgagggatggtgggcagggagggagggcgaagaggctccctctggcatttgggagccggtgggtggagggaggagcccttggaggtggctgcagtcccttaatggggggccttgctctgggcatgtggggctcttcctccatccagagctggcccaagacccttagaaccctgagtgctggcaaatctcactgctcctgacccagcctgtgtattcaaaacgaaaacagtaaaaccaacatcaggatgtccgtcagaaatctaattttccttcca

SEQ ID NO: 420955 - DNA, 1772 bp, Homo sapiens
aagaacaaacgcgcactcaaaacaaaggaagaccgtcctcgactgcagaggaagcaggaagctgtcggcccagctctgagcccagctgctggagccccgagcagcggcatggagtccgtggccctgtacagctttcaggctacagagagcgacgagctggccttcaacaagggagacacactcaagatcctgaacatggaggatgaccagaactggtacaaggccgagctccggggtgtcgagggatttattcccaagaactacatccgcgtcaagccccatcctcacctggggcctgctttgcccaggcccagtttgacttctcagcccaggacccctcgcagctcagcttccgccgtggcgacatcattgaggtcctggagcgcccagacccccactggtggcggggccggtcctgcgggcgcgttggcttcttcccacggagttacgtgcagcccgtgcacctgtgagcagcccggcggccgatctggccaacgggcctttttacaggaactgaggtccagagaggacatggacacccccagctctgtcagagtcacacggggctcagtggacggccttggactgaacgtgggctcctaactgcctccggccgctctgcacaaactgggatggcccaggtcccccagcaagggtacccagcaagggtagctccggggcttcctggctggttgctttccattggctgccagctgtgtgacaccacagggcggagtctgtggaggccccgcccacctcctcttgtcaatggccccatctgccaggaaggttgaggactcccaggtttcacccactggaggctcaacctaaggaaccctggccatggtgggtgggttcaccttgggctgaccacccactgggcctgcctgcccctccctcaaaaggcccctggagttgttcaggctgttgggaggtggctcagcctcgaaggacagactgcacacctgttgacctaaactcactggacagactccaggtggacaccaactcctcaacagccccatgacttcagctccacctggggcacccagcaccccaccacagggctagaggccctaagaccctgaaaaaggggcgggcagtagggaaggtggaggcacactcctcttctgttggacaggtgagctctgagggcaagccctgggcccagccacgcagagaccctggctgccctggctcttgtttgtttaggcccaggttctgcccagaccggggcccagcagagctctcaggaggctgagaaacctccagggcagacagaaagttggggccagagctaggttttagagatcctacaggatcccacatgggacggctacctaggtggggcacggcccctacccgagaacaggagggtcctccagagaatgtgccatgatcagggatatgagcagggcctgcccagagcctgggcacctttgggagagggaaaagtgaggtgggacttggaaaggctttgaacgccaggctgatggttgagggatggtgggcagggagggagggcgaagaggctccctctggcatttgggagccggtgggtggagggaggagcccttggaggtggctgcagtcccttaatggggggccttgctctgggcatgtggggctcttcctccatccagagctggcccaagacccttagaaccctgagtgctggcaaatctcactgctcctgacccagcctgtgtattcaaaacgaaaacagtaaaaccaacatcaggatgtccgtcagaaatctaattttccttcca

SEQ ID NO: 420956 - DNA, 1895 bp, Homo sapiens
aagaacaaacgcgcactcaaaacaaaggaagaccgtcctcgactgcagaggaagcaggaagctgtcggcccagctctgagcccagctgctggagccccgagcagcggcatggagtccgtggccctgtacagctttcaggctacagagagcgacgagctggccttcaacaagggagacacactcaagatcctgaacatggaggatgaccagaactggtacaaggccgagctccggggtgtcgagggatttattcccaagaactacatccgcgtcaagccccatccgtggtactcgggcaggatttcccggcagctggccgaagagattctgatgaagcggaaccatctgggagccttcctgatccgggagagtgagagctccccaggggagttctctgtgtctgtgaatcacctggggcctgctttgcccaggcccagtttgacttctcagcccaggacccctcgcagctcagcttccgccgtggcgacatcattgaggtcctggagcgcccagacccccactggtggcggggccggtcctgcgggcgcgttggcttcttcccacggagttacgtgcagcccgtgcacctgtgagcagcccggcggccgatctggccaacgggcctttttacaggaactgaggtccagagaggacatggacacccccagctctgtcagagtcacacggggctcagtggacggccttggactgaacgtgggctcctaactgcctccggccgctctgcacaaactgggatggcccaggtcccccagcaagggtacccagcaagggtagctccggggcttcctggctggttgctttccattggctgccagctgtgtgacaccacagggcggagtctgtggaggccccgcccacctcctcttgtcaatggccccatctgccaggaaggttgaggactcccaggtttcacccactggaggctcaacctaaggaaccctggccatggtgggtgggttcaccttgggctgaccacccactgggcctgcctgcccctccctcaaaaggcccctggagttgttcaggctgttgggaggtggctcagcctcgaaggacagactgcacacctgttgacctaaactcactggacagactccaggtggacaccaactcctcaacagccccatgacttcagctccacctggggcacccagcaccccaccacagggctagaggccctaagaccctgaaaaaggggcgggcagtagggaaggtggaggcacactcctcttctgttggacaggtgagctctgagggcaagccctgggcccagccacgcagagaccctggctgccctggctcttgtttgtttaggcccaggttctgcccagaccggggcccagcagagctctcaggaggctgagaaacctccagggcagacagaaagttggggccagagctaggttttagagatcctacaggatcccacatgggacggctacctaggtggggcacggcccctacccgagaacaggagggtcctccagagaatgtgccatgatcagggatatgagcagggcctgcccagagcctgggcacctttgggagagggaaaagtgaggtgggacttggaaaggctttgaacgccaggctgatggttgagggatggtgggcagggagggagggcgaagaggctccctctggcatttgggagccggtgggtggagggaggagcccttggaggtggctgcagtcccttaatggggggccttgctctgggcatgtggggctcttcctccatccagagctggcccaagacccttagaaccctgagtgctggcaaatctcactgctcctgacccagcctgtgtattcaaaacgaaaacagtaaaaccaacatcaggatgtccgtcagaaatctaattttccttcca

SEQ ID NO: 420957 - DNA, 1074 bp, Homo sapiens
  misc_feature (854)..(854): n is a, c, g, or t
aagaacaaacgcgcactcaaaacaaaggaagaccgtcctcgactgcagaggaagcaggaagctgtcggcccagctctgagcccagctgctggagccccgagcagcggcatggagtccgtggccctgtacagctttcaggctacagagagcgacgagctggccttcaacaagggagacacactcaagatcctgaacatggaggatgaccagaactggtacaaggccgagctccggggtgtcgagggatttattcccaagaactacatccgcgtcaagccccatccgtggtactcgggcaggatttcccggcagctggccgaagagattctgatgaagcggaaccatctgggagccttcctgatccgggagagtgagagctccccaggggagttctctgtgtctgtgaaagcccagaggggtccctgcctgggcccaaaatcacacagcagattggggtagagccggagaggacccgagactcctgtgccagcctgggcatcccctccactgccagggaaggactgcatccaagtcgcatccgtacccaggccgaggtgtccgaggcccaggctgaaatccggttgctgctgcagagaccaagtttccaaggccttgtcaagtgggctgtgccagacgatccccaggcctgtcattggctgctcttcggctcggacacaccaaacctcaccaagcacttccatttctgagggaatagaggttgtggcttccgtcaagcacccatttaccccaccctcctcctcctcttcctgcaaacttgagtcacagctgccctgctgggctcaggccccagggatgtctgagtcagcctggctggggttccagtcctgacaccngccttaccagctgggagactccgggaacctccaacctgctgagcctccattcgacatccgtgaaacagcatgaataagcaggtctcacaggtcgaatcctgtatgccaggacacagcatgcagtaggtgcccaatcataacagcagacccactgggagcccttatagaagccttctcctctgacttccacatggcatctcatttaaccttacaaaaccaa

SEQ ID NO: 420958 - DNA, 536 bp, Homo sapiens
tctgtctgcaccagtgtcctgcccctcccaagctcagcttgactctggttcctgtctgctgccgaacaggttgttccacccctccttttcacagatgggcaaactgaggccagagaggggccatgcctgatggagatcgcccagcgggcagttagcacccaggtgggtccacacgtccacaagccctggttggggtggtggagggggtgtcctagggctcctgcccccaccccagccttgtttttcctctctgggctgacactgttacctttgctgctgctgctgctgctgctgctgctgctgctgccgccaccaggccagaaaaactcgctgggcaggactggctgctgccagcattaggcctgacttggtccttggggcttttctgacagcccaggggtcagcctagccccttgttcccctgggtaggtggatgtaggggtcacacagagagacaaagatactcatgattgctcagtgagagactcacacataacagtcactccacacagtgggagacacacacagacacacac

SEQ ID NO: 420959 - DNA, 2440 bp, Homo sapiens
ttccgccgccgcagtcgccgcccgccccgctgctgtctggcgggggaggagctcgggaccgggagcagcggctctggcggtcgtggcggtcggagatccgagagctctgcttctctgaaaagcgtgtggctttctggacttgtttcaggccacccacgagccagcgggaaaggattgccagccagagaaagacgaactccgaagtcccaatgcacagatcagcccccagtcaaaccaccaagaggagccgatcgccattttccactactcgtcgtagttgggacgacagcgagagttcgggaaccaacctgaatattgataatgaggactattccaggtatccgccaagagagtacagagcttcgggtagcagaagaggaatggcctatggacatattgactcttatggggcagatgatagtgaggaggagggggctgggcctgttgagcgaccgccagtgagagggaaaactggcaagtttaaagatgataagctgtatgacccagagaaaggggcaaggtctttggctgggccacctccacatttctctagttttagccgtgatgtgagagaggagcgagacaagttagacccagtccctgcagcaagatgctcagctagcagagctgacttcctgccacaaagtagtgtggcctcacagtcgtcttctgaaggcaagctggctacaaaaggtgacagctcggagagggagagaagggagcaaaatttacctgcacgtcccagcagggctcctgtgagtatttgtggtggtggggaaaacacctcaaagagtgcagaggaacctgtggtcaggcccaaaatcagaaacctggcaagtccaaactgcgtgaaaccaaaaattttttttgatactgatgatgatgacgatatgccacacagtacttccaggtggagggataccgccaatgacaatgagggccactcggatggcctggcaagaagagggagaggcgagagttcaagtggctatcccgagccaaagtaccctgaagacaaacgggaagcgaggagtgaccaagtgaaaccagaaaaggtgccgagacgacgacgcaccatggccgaccctgacttctggacgcacagtgatgattactacaaatactgcgacgaagactctgacagtgacaaagagtggattgctgctctgcgtcggaaatatcgaagccgagagcaaaccctgtcctccagtggcgaaagctgggagactctgccggggaaagaagagcgggaacctccacaggctaaggtgagtgccagcactggcaccagccctggccccggtgctagtgccagtgccggggctggcgccggggccagtgctggcagcaatggcagcaattaccttgaagaagttcgagaaccatctcttcaggaagagcaggcatccctggaagaaggagaaattccttggctccagtaccatgagaatgacagtagcagtgagggggataatgattctggtcacgagttgatgcaacctggggtattcatgctggatggaaacaacaaccttgaagatgactccagtgtgagcgaagacctagaagtggattggagcctctttgatggatttgcagatgggttaggagtggctgaagccatttcctatgtggaccctcagttcctcacctacatggcacttgaagaacgcctggcccaggcaatggaaactgcccttgcgcacttggagtctctcgcagtggatgtagaggtggccaatccaccagcaagcaaggagagcattgacgctcttcccgagatcctggtcactgaagatcatggcgcagttggtcaggagatgtgctgccccatctgctgtagcgaatatgtgaagggggaggtggcaactgagctgccgtgccaccactatttccacaagccgtgtgtgtccatctggcttcagaagtcaggcacctgccccgtgtgccgctgcatgttccctcccccactctaaagaccaaggccgtttactcctggtctgattattttccccatctgaaatccacaatactgcaggagccctcttgaaattaacaatggaaataaaaccaatcagtcagttagcctaaacctattgattcctcgtgattatttccaatgtgaaaacagttgtgtatgattgcattaaaaatcatatcatcttttagaggttagaaaagggaaaactaaactttctaaatgctacttgagattgcagtaagaagatacgttttctaacctgaaagttaaatcgcatttgttttcttcagtagaatgggaatgtgttgctgttacttgtaatgtcaagtttatctgttaaatatgtccaaaaggcaaaatcatttttgttgcatgttatgggtcgatgttcctgtaattgcagtgccgtaaaagcttattaaagttgttcttttggttttacatggtaaaaaaaaattt

SEQ ID NO: 420960 - DNA, 2769 bp, Homo sapiens
ttccgccgccgcagtcgccgcccgccccgctgctgtctggcgggggaggagctcgggaccgggagcagcggctctggcggtcgtggcggtcggagatccgagagctctgcttctctgaaaagcgtgtggctttctggacttggtctacacctgacagtcactggaatgctactccaggccttagaagaaagtgaaactaattttaaaggccccttattctttctgttacctgcctgctgaagtgaaaataaatctccctgctcctttattctaaactgattttactttcccatctcaaaaacgtgtgcagggagcaggagccctcctacccgagccccagctgtattggaaaccctcctaagtcagagtgatgggtcaggaatctagcaagcctgtatggcccaatccaacaggagggtatcagtccaatacaggtaggaggtatggaagaaggcatgcttatgtcagttttttcaggccacccacgagccagcgggaaaggattgccagccagagaaagacgaactccgaagtcccaatgcacagatcagcccccagtcaaaccaccaagaggagccgatcgccattttccactactcgtcgtagttgggacgacagcgagagttcgggaaccaacctgaatattgataatgaggactattccaggtatccgccaagagagtacagagcttcgggtagcagaagaggaatggcctatggacatattgactcttatggggcagatgatagtgaggaggagggggctgggcctgttgagcgaccgccagtgagagggaaaactggcaagtttaaagatgataagctgtatgacccagagaaaggggcaaggtctttggctgggccacctccacatttctctagttttagccgtgatgtgagagaggagcgagacaagttagacccagtccctgcagcaagatgctcagctagcagagctgacttcctgccacaaagtagtgtggcctcacagtcgtcttctgaaggcaagctggctacaaaaggtgacagctcggagagggagagaagggagcaaaatttacctgcacgtcccagcagggctcctgtgagtatttgtggtggtggggaaaacacctcaaagagtgcagaggaacctgtggtcaggcccaaaatcagaaacctggcaagtccaaactgcgtgaaaccaaaaattttttttgatactgatgatgatgacgatatgccacacagtacttccaggtggagggataccgccaatgacaatgagggccactcggatggcctggcaagaagagggagaggcgagagttcaagtggctatcccgagccaaagtaccctgaagacaaacgggaagcgaggagtgaccaagtgaaaccagaaaaggtgccgagacgacgacgcaccatggccgaccctgacttctggacgcacagtgatgattactacaaatactgcgacgaagactctgacagtgacaaagagtggattgctgctctgcgtcggaaatatcgaagccgagagcaaaccctgtcctccagtggcgaaagctgggagactctgccggggaaagaagagcgggaacctccacaggctaaggtgagtgccagcactggcaccagccctggccccggtgctagtgccagtgccggggctggcgccggggccagtgctggcagcaatggcagcaattaccttgaagaagttcgagaaccatctcttcaggaagagcaggcatccctggaagaaggagaaattccttggctccagtaccatgagaatgacagtagcagtgagggggataatgattctggtcacgagttgatgcaacctggggtattcatgctggatggaaacaacaaccttgaagatgactccagtgtgagcgaagacctagaagtggattggagcctctttgatggatttgcagatgggttaggagtggctgaagccatttcctatgtggaccctcagttcctcacctacatggcacttgaagaacgcctggcccaggcaatggaaactgcccttgcgcacttggagtctctcgcagtggatgtagaggtggccaatccaccagcaagcaaggagagcattgacgctcttcccgagatcctggtcactgaagatcatggcgcagttggtcaggagatgtgctgccccatctgctgtagcgaatatgtgaagggggaggtggcaactgagctgccgtgccaccactatttccacaagccgtgtgtgtccatctggcttcagaagtcaggcacctgccccgtgtgccgctgcatgttccctcccccactctaaagaccaaggccgtttactcctggtctgattattttccccatctgaaatccacaatactgcaggagccctcttgaaattaacaatggaaataaaaccaatcagtcagttagcctaaacctattgattcctcgtgattatttccaatgtgaaaacagttgtgtatgattgcattaaaaatcatatcatcttttagaggttagaaaagggaaaactaaactttctaaatgctacttgagattgcagtaagaagatacgttttctaacctgaaagttaaatcgcatttgttttcttcagtagaatgggaatgtgttgctgttacttgtaatgtcaagtttatctgttaaatatgtccaaaaggcaaaatcatttttgttgcatgttatgggtcgatgttcctgtaattgcagtgccgtaaaagcttattaaagttgttcttttggttttacatggtaaaaaaaaattt

SEQ ID NO: 420961 - DNA, 2351 bp, Homo sapiens
gcaggcagggggctggctcagaggctgcacaggctgggtgacccagtccagcagcgacgcttacctgtgggcccagcatctgctggctcctgcgagagctgtactcgtcctcctcctccgagtcctcctcctctgagtcctcctcttcctcctctgagtcctcagcagcttgggctgggggcacatctctgggtctccctcacaccgtacctcagtctggctagatagatggtgatgagctggtacttcagcccaacccgcttgcctggaggtgactccagggaggctggacttagatcccttaagcttccgctgcagcagaccgaaactcgaggagataccggggctgggcctgttgagcgaccgccagtgagagggaaaactggcaagtttaaagatgataagctgtatgacccagagaaaggggcaaggtctttggctgggccacctccacatttctctagttttagccgtgatgtgagagaggagcgagacaagttagacccagtccctgcagcaagatgctcagctagcagagctgacttcctgccacaaagtagtgtggcctcacagtcgtcttctgaaggcaagctggctacaaaaggtgacagctcggagagggagagaagggagcaaaatttacctgcacgtcccagcagggctcctgtgagtatttgtggtggtggggaaaacacctcaaagagtgcagaggaacctgtggtcaggcccaaaatcagaaacctggcaagtccaaactgcgtgaaaccaaaaattttttttgatactgatgatgatgacgatatgccacacagtacttccaggtggagggataccgccaatgacaatgagggccactcggatggcctggcaagaagagggagaggcgagagttcaagtggctatcccgagccaaagtaccctgaagacaaacgggaagcgaggagtgaccaagtgaaaccagaaaaggtgccgagacgacgacgcaccatggccgaccctgacttctggacgcacagtgatgattactacaaatactgcgacgaagactctgacagtgacaaagagtggattgctgctctgcgtcggaaatatcgaagccgagagcaaaccctgtcctccagtggcgaaagctgggagactctgccggggaaagaagagcgggaacctccacaggctaaggtgagtgccagcactggcaccagccctggccccggtgctagtgccagtgccggggctggcgccggggccagtgctggcagcaatggcagcaattaccttgaagaagttcgagaaccatctcttcaggaagagcaggcatccctggaagaaggagaaattccttggctccagtaccatgagaatgacagtagcagtgagggggataatgattctggtcacgagttgatgcaacctggggtattcatgctggatggaaacaacaaccttgaagatgactccagtgtgagcgaagacctagaagtggattggagcctctttgatggatttgcagatgggttaggagtggctgaagccatttcctatgtggaccctcagttcctcacctacatggcacttgaagaacgcctggcccaggcaatggaaactgcccttgcgcacttggagtctctcgcagtggatgtagaggtggccaatccaccagcaagcaaggagagcattgacgctcttcccgagatcctggtcactgaagatcatggcgcagttggtcaggagatgtgctgccccatctgctgtagcgaatatgtgaagggggaggtggcaactgagctgccgtgccaccactatttccacaagccgtgtgtgtccatctggcttcagaagtcaggcacctgccccgtgtgccgctgcatgttccctcccccactctaaagaccaaggccgtttactcctggtctgattattttccccatctgaaatccacaatactgcaggagccctcttgaaattaacaatggaaataaaaccaatcagtcagttagcctaaacctattgattcctcgtgattatttccaatgtgaaaacagttgtgtatgattgcattaaaaatcatatcatcttttagaggttagaaaagggaaaactaaactttctaaatgctacttgagattgcagtaagaagatacgttttctaacctgaaagttaaatcgcatttgttttcttcagtagaatgggaatgtgttgctgttacttgtaatgtcaagtttatctgttaaatatgtccaaaaggcaaaatcatttttgttgcatgttatgggtcgatgttcctgtaattgcagtgccgtaaaagcttattaaagttgttcttttggttttacatggtaaaaaaaaattt

SEQ ID NO: 420962 - DNA, 2373 bp, Homo sapiens
ttccgccgccgcagtcgccgcccgccccgctgctgtctggcgggggaggagctcgggaccgggagcagcggctctggcggtcgtggcggtcggagatccgagagctctgcttctctgaaaagcgtgtggctttctggacttgtttcaggccacccacgagccagcgggaaaggattgccagccagagaaagacgaactccgaagtcccaatgcacagatcagcccccagtcaaaccaccaagaggagccgatcgccattttccactactcgtcgtagttgggacgacagcgagagttcgggaaccaacctgaatattgataatgaggactattccaggtatccgccaagagagtacagagcttcgggtagcagaagaggaatggcctatggacatattgactcttatggggcagatgatagtgaggaggagggggctgggcctgttgagcgaccgccagtgagagggaaaactggcaagtttaaagatgataagctgtatgacccagagaaaggggcaaggtctttggctgggccacctccacatttctctagttttagccgtgatgtgagagaggagcgagacaagttagacccagtccctgcagcaagatgctcagctagcagagctgacttcctgccacaaagtagtgtggcctcacagtcgtcttctgaaggcaagctggctacaaaaggtgacagctcggagagggagagaagggagcaaaatttacctgcacgtcccagcagggctcctgtgagtatttgtggtggtggggaaaacacctcaaagagtgcagaggaacctgtggtcaggcccaaaatcagaaacctggcaagtccaaactgcgtgaaaccaaaaattttttttgatactgatgatgatgacgatatgccacacagtacttccaggtggagggataccgccaatgacaatgagggccactcggatggcctggcaagaagagggagaggcgagagttcaagtggctatcccgagccaaagtaccctgaagacaaacgggaagcgaggagtgaccaagtgaaaccagaaaaggtgccgagacgacgacgcaccatggccgaccctgacttctggacgcacagtgatgattactacaaatactgcgacgaagactctgacagtgacaaagagtggattgctgctctgcgtcggaaatatcgaagccgagagcaaaccctgtcctccagtggcgaaagctgggagactctgccggggaaagaagagcgggaacctccacaggctaaggtgatgctggcagcaatggcagcaattaccttgaagaagttcgagaaccatctcttcaggaagagcaggcatccctggaagaaggagaaattccttggctccagtaccatgagaatgacagtagcagtgagggggataatgattctggtcacgagttgatgcaacctggggtattcatgctggatggaaacaacaaccttgaagatgactccagtgtgagcgaagacctagaagtggattggagcctctttgatggatttgcagatgggttaggagtggctgaagccatttcctatgtggaccctcagttcctcacctacatggcacttgaagaacgcctggcccaggcaatggaaactgcccttgcgcacttggagtctctcgcagtggatgtagaggtggccaatccaccagcaagcaaggagagcattgacgctcttcccgagatcctggtcactgaagatcatggcgcagttggtcaggagatgtgctgccccatctgctgtagcgaatatgtgaagggggaggtggcaactgagctgccgtgccaccactatttccacaagccgtgtgtgtccatctggcttcagaagtcaggcacctgccccgtgtgccgctgcatgttccctcccccactctaaagaccaaggccgtttactcctggtctgattattttccccatctgaaatccacaatactgcaggagccctcttgaaattaacaatggaaataaaaccaatcagtcagttagcctaaacctattgattcctcgtgattatttccaatgtgaaaacagttgtgtatgattgcattaaaaatcatatcatcttttagaggttagaaaagggaaaactaaactttctaaatgctacttgagattgcagtaagaagatacgttttctaacctgaaagttaaatcgcatttgttttcttcagtagaatgggaatgtgttgctgttacttgtaatgtcaagtttatctgttaaatatgtccaaaaggcaaaatcatttttgttgcatgttatgggtcgatgttcctgtaattgcagtgccgtaaaagcttattaaagttgttcttttggttttacatggtaaaaaaaaattt

SEQ ID NO: 420963 - DNA, 1140 bp, Homo sapiens
ttccgccgccgcagtcgccgcccgccccgctgctgtctggcgggggaggagctcgggaccgggagcagcggctctggcggtcgtggcggtcggagatccgagagctctgcttctctgaaaagcgtgtggctttctggacttgtttcaggccacccacgagccagcgggaaaggattgccagccagagaaagacgaactccgaagtcccaatgcacagatcagcccccagtcaaaccaccaagaggagccgatcgccattttccactactcgtcgtagttgggacgacagcgagagttcgggaaccaacctgaatattgataatgaggactattccaggtatccgccaagagagtacagagcttcgggtagcagaagaggaatggcctatggacatattgactcttatggggcagatgatagtgaggaggagggggctgggcctgttgagcgaccgccagtgagagggaaaactggcaagtttaaagatgataagctgtatgacccagagaaaggggcaaggtctttggctgggccacctccacatttctctagttttagccgtgatgtgagagaggagcgagacaagttagacccagtccctgcagcaagatgctcagctagcagagctgacttcctgccacaaagtagtgtggcctcacagtcgtcttctgaaggcaagctggctacaaaaggtgacagctcggagagggagagaagggagcaaaatttacctgcacgagccctcttgaaattaacaatggaaataaaaccaatcagtcagttagcctaaacctattgattcctcgtgattatttccaatgtgaaaacagttgtgtatgattgcattaaaaatcatatcatcttttagaggttagaaaagggaaaactaaactttctaaatgctacttgagattgcagtaagaagatacgttttctaacctgaaagttaaatcgcatttgttttcttcagtagaatgggaatgtgttgctgttacttgtaatgtcaagtttatctgttaaatatgtccaaaaggcaaaatcatttttgttgcatgttatgggtcgatgttcctgtaattgcagtgccgtaaaagcttattaaagttgttcttttggttttacatggtaaaaaaaaattt

SEQ ID NO: 420964 - DNA, 814 bp, Homo sapiens
ttccgccgccgcagtcgccgcccgccccgctgctgtctggcgggggaggagctcgggaccgggagcagcggctctggcggtcgtggcggtcggagatccgagagctctgcttctctgaaaagcgtgtggctttctggacttggtctacacctgacagtcactggaatgctactccaggccttagaagaaagtgaaactaattttaaaggccccttattctttctgttacctgcctgctgaagtgaaaataaatctccctgctcctttattctaaactgattttactttcccatctcaaaaacgtgtgcagggagcaggagccctcctacccgagccccagctgtattggaaaccctcctaagtcagagtgatgggtcaggaatctagcaagcctgtatggcccaatccaacaggagggtatcagtccaatacaggtaggaggtatggaagaaggcatgcttatgtcagttttttcaggccacccacgagccagcgggaaaggattgccagccagagaaagacgaactccgaagtcccaatgcacagatcagcccccagtcaaaccaccaagaggagccgatcgccattttccactactcgtcgtagttgggacgacagcgagagttcgggaaccaacctgaatattgataatgaggactattccaggtatccgccaagagagtacagagcttcgggtagcagaagaaggcaaaatcatttttgttgcatgttatgggtcgatgttcctgtaattgcagtgccgtaaaagcttattaaagttgttcttttggttttacatggtaaaaaaaaattt

SEQ ID NO: 420965 - DNA, 1022 bp, Homo sapiens
  misc_feature (6)..(6): n is a, c, g, or t
  misc_feature (32)..(32): n is a, c, g, or t
ttgaancccttttggaccatccccggtccgtngttcccgggtcccccacgcgtccgtgattctggtcacgagttgatgcaacctggggtattcatgctggatggaaacaacaaccttgaagatgactccagtgtgagcgaagacctagaagtggattggagcctctttgatggatttgcagatgggttaggagtggctgaagccatttcctatgtggaccctcagttcctcacctacatggcacttgaagaacgcctggcccaggcaatggaaactgcccttgcgcacttggagtctctcgcagtggatgtagaggtggccaatccaccagcaagcaaggagagcattgacgctcttcccgagatcctggtcactgaagatcatggcgcagttggtcaggagatgtgctgccccatctgctgtagcgaatatgtgaagggggaggtggcaactgagctgccgtgccaccactatttccacaagccgtgtgtgtccatctggcttcagaagtcaggcacctgccccgtgtgccgctgcatgttccctcccccactctaaagaccaaggccgtttactcctggtctgattattttccccatctgaaatccacaatactgcaggagccctcttgaaattaacaatggaaataaaaccaatcagtcagttagcctaaacctattgattcctcgtgattatttccaatgtgaaaacagttgtgtatgattgcattaaaaatcatatcatcttttagaggttagaaaagggaaaactaaactttctaaatgctacttgagattgcagtaagaagatacgttttctaacctgaaagttaaatcgcatttgttttcttcagtagaatgggaatgtgttgctgttacttgtaatgtcaagtttatctgttaaatatgtccaaaaggcaaaatcatttttgttgcatgttatgggtcgatgttcctgtaattgcagtgccgtaaaagcttattaaagttgttcttttggttttacatggtaaaaaaaaattt

SEQ ID NO: 420966 - DNA, 2271 bp, Homo sapiens
tccaggattgcgcaattctggatgctgtcggccctagaagtgcagttccaccgcgactcgcagcagcaggaggctgagacgccgccaacttcgtcctccggttgcgggggcggtgcgggcaaacctcgcgaggagaagaggacggccctgagcaaggtggtcatccgccgcctgcctccgggcctcaccaaggagcagctggaggagcagctgcgcccgctgccagcacacgactacttcgagttcttcgccgccgacctgagtctttatcctcatctctactcaagagcatacattaattttaggaatcctgatgacatccttctttttagagatcgttttgatggatatatcttccttgacagcaaaggcctagaatatcctgcagtggtagagtttgctccattccagaagatagccaaaaagaagctgagaaaaaaagatgccaagactggaagcatcgaagatgatccagaatataagaagtttttagaaacctactgtgtggaggaagagaagaccagtgccaaccctgagactctgctgggggagatggaggcgaagacaagagagctcattgctagaagaaccacacctcttttggaatatattaaaaatagaaaattagaaaagcagagaattcgagaagagaagcgagaagaacggaggaggagagagttagaaaagaaacgtttgcgggaagaggaaaaaagaagaagaagagaagaagaaagatgcaaaaaaaaagagacagataaacagaagaaaattgcagagaaagaagtaaggattaagcttcttaagaaaccagaaaagggagaggaaccaaccacagagaaaccaaaagaaagaggagaggagattgatactggaggtggcaagcaggaatcctgtgcccccggtgcagtcgtaaaagccaggcccatggaaggctcgctggaggagccccaggagacgtcacacagcggcagtgataaagagcacagggatgtggagagatctcaagaacaagaatctgaagcacaaagataccatgtggatgacggcaggaggcacagagctcaccacgagcctgaacggctttccagaaggagtgaggatgagcagagatgggggaaaggacctggccaagacagagggaagaaggggagccaggacagcggggctccgggggaggccatggagagactgggaagagcgcagaggtgtgacgacagtccagcacccagaaaagagcgactggcaaacaaggaccggccagccttgcagctgtatgatccaggagctcgcttccgagcgcgagagtgtggcggaaacaggaggatctgcaaggcagaaggttcggggactggtcctgagaagagggaagaggcagagtgagtcactgcacgcacctggcctccatggacgagcaagggcatcccagaaacgtgtaaatgaccccgagtgtgactgggaaggagaacttattccttaccaggaaactggaagctaaaaatacagagggtgacgtagaaacacgcagaaaccattctaaagaaagtagtgatcttgtattaaattgagcagaattctcacagattttaccattcctgttataaactagtatttgttgtttagccaaaacagaaaatgatttccactggacagtagaaaaatatgtgtaaaatagggaagaaagttagtattggatcagtgtgagtcctgaagcactttcagtgctgtgagaacgacatccactttgggtttcattcgtttgtaagcagaggagctgtcagtcactcgtgcttctcggtggcctctgagccatggtgtcgagtgaagagtagttcttgtttgttacaacctttgtgagtcagccatgcccgcaaagcgtgctgtgttttagtcctggtaggaatatttatcagagttcacactatataaaacccaacagcttcaactattgccctttcaacagttttgccactgaccggatagaaacggtttcagtctctggatggatgtgtttgtggtttgtaaccattacggtttaaaccatggtttaagaatttgcccaaataacagaaattttgttcgggaagggataaactagatatagcatacagagcctgtttttgagttttagatactttatttgtaaataacttaaaatagctttctgaaaccgtgcattctgtagtttcttcctttcagtgaaattgctaaatgtcaatgtatttttggcactgcgattttaaccatttattaaataaaaattttgttaaagaa

SEQ ID NO: 420967 - DNA, 516 bp, Homo sapiens
agctctcgcgaggtttcgtcgggggctggcggctgcggctcggcggagagtgcggcatgcgctcggaaaaggagggggccggaggccttcgggcggccgttgccgcgcggggcccgagcgggagggagaagctgtcggccctagaagtgcagttccaccgcgactcgcagcagcaggaggctgagacgccgccaacttcgtcctccggttgcgggggcggtgcgggcaaacctcgcgaggagaagaggacggccctgagcaaggtggtcatccgccgcctgcctccgggcctcaccaaggagcagctggaggagcagctgcgcccgctgccagcacacgactacttcgagttcttcgccgccgacctgaggtgaggcccgccccgaggggaggaagagagggcggaacccagagctcggcggcggtggccgtctcgttgccttacgttccttaccctgatttctcctatatgggagtcgtgtgagctttttgaataaatacatttcagtaaaacgt

SEQ ID NO: 420968 - DNA, 2211 bp, Homo sapiens
ggggcgggggccgggcctcccagcgcggtacgcggtgccttttgagctccttgtccacgctccgccccggtgggaacggccgcgcgctccccgcaggtggtcatccgccgcctgcctccgggcctcaccaaggagcagctggaggagcagctgcgcccgctgccagcacacgactacttcgagttcttcgccgccgacctgagtctttatcctcatctctactcaagagcatacattaattttaggaatcctgatgacatccttctttttagagatcgttttgatggatatatcttccttgacagcaaaggcctagaatatcctgcagtggtagagtttgctccattccagaagatagccaaaaagaagctgagaaaaaaagatgccaagactggaagcatcgaagatgatccagaatataagaagtttttagaaacctactgtgtggaggaagagaagaccagtgccaaccctgagactctgctgggggagatggaggcgaagacaagagagctcattgctagaagaaccacacctcttttggaatatattaaaaatagaaaattagaaaagcagagaattcgagaagagaagcgagaagaacggaggaggagagagttagaaaagaaacgtttgcgggaagaggaaaaaagaagaagaagagaagaagaaagatgcaaaaaaaaagagacagataaacagaagaaaattgcagagaaagaagtaaggattaagcttcttaagaaaccagaaaagggagaggaaccaaccacagagaaaccaaaagaaagaggagaggagattgatactggaggtggcaagcaggaatcctgtgcccccggtgcagtcgtaaaagccaggcccatggaaggctcgctggaggagccccaggagacgtcacacagcggcagtgataaagagcacagggatgtggagagatctcaagaacaagaatctgaagcacaaagataccatgtggatgacggcaggaggcacagagctcaccacgagcctgaacggctttccagaaggagtgaggatgagcagagatgggggaaaggacctggccaagacagagggaagaaggggagccaggacagcggggctccgggggaggccatggagagactgggaagagcgcagaggtgtgacgacagtccagcacccagaaaagagcgactggcaaacaaggaccggccagccttgcagctgtatgatccaggagctcgcttccgagcgcgagagtgtggcggaaacaggaggatctgcaaggcagaaggttcggggactggtcctgagaagagggaagaggcagagtgagtcactgcacgcacctggcctccatggacgagcaagggcatcccagaaacgtgtaaatgaccccgagtgtgactgggaaggagaacttattccttaccaggaaactggaagctaaaaatacagagggtgacgtagaaacacgcagaaaccattctaaagaaagtagtgatcttgtattaaattgagcagaattctcacagattttaccattcctgttataaactagtatttgttgtttagccaaaacagaaaatgatttccactggacagtagaaaaatatgtgtaaaatagggaagaaagttagtattggatcagtgtgagtcctgaagcactttcagtgctgtgagaacgacatccactttgggtttcattcgtttgtaagcagaggagctgtcagtcactcgtgcttctcggtggcctctgagccatggtgtcgagtgaagagtagttcttgtttgttacaacctttgtgagtcagccatgcccgcaaagcgtgctgtgttttagtcctggtaggaatatttatcagagttcacactatataaaacccaacagcttcaactattgccctttcaacagttttgccactgaccggatagaaacggtttcagtctctggatggatgtgtttgtggtttgtaaccattacggtttaaaccatggtttaagaatttgcccaaataacagaaattttgttcgggaagggataaactagatatagcatacagagcctgtttttgagttttagatactttatttgtaaataacttaaaatagctttctgaaaccgtgcattctgtagtttcttcctttcagtgaaattgctaaatgtcaatgtatttttggcactgcgattttaaccatttattaaataaaaattttgttaaagaa

SEQ ID NO: 420969 - DNA, 2254 bp, Homo sapiens
ggggcgggggccgggcctcccagcgcggtacgcggtgccttttgagctccttgtccacgctccgccccggtgggaacggccgcgcgctccccgcaggtggtcatccgccgcctgcctccgggcctcaccaaggagcagctggaggagcagctgcgcccgctgccagcacacgactacttcgagttcttcgccgccgacctgagtctttatcctcatctctactcaagagcatacattaattttaggaatcctgatgacatccttctttttagagatcgttttgatggatatatcttccttgacagcaaagtagaatttcagaatggcttctggaacatgtttcctgttaaaaggcctagaatatcctgcagtggtagagtttgctccattccagaagatagccaaaaagaagctgagaaaaaaagatgccaagactggaagcatcgaagatgatccagaatataagaagtttttagaaacctactgtgtggaggaagagaagaccagtgccaaccctgagactctgctgggggagatggaggcgaagacaagagagctcattgctagaagaaccacacctcttttggaatatattaaaaatagaaaattagaaaagcagagaattcgagaagagaagcgagaagaacggaggaggagagagttagaaaagaaacgtttgcgggaagaggaaaaaagaagaagaagagaagaagaaagatgcaaaaaaaaagagacagataaacagaagaaaattgcagagaaagaagtaaggattaagcttcttaagaaaccagaaaagggagaggaaccaaccacagagaaaccaaaagaaagaggagaggagattgatactggaggtggcaagcaggaatcctgtgcccccggtgcagtcgtaaaagccaggcccatggaaggctcgctggaggagccccaggagacgtcacacagcggcagtgataaagagcacagggatgtggagagatctcaagaacaagaatctgaagcacaaagataccatgtggatgacggcaggaggcacagagctcaccacgagcctgaacggctttccagaaggagtgaggatgagcagagatgggggaaaggacctggccaagacagagggaagaaggggagccaggacagcggggctccgggggaggccatggagagactgggaagagcgcagaggtgtgacgacagtccagcacccagaaaagagcgactggcaaacaaggaccggccagccttgcagctgtatgatccaggagctcgcttccgagcgcgagagtgtggcggaaacaggaggatctgcaaggcagaaggttcggggactggtcctgagaagagggaagaggcagagtgagtcactgcacgcacctggcctccatggacgagcaagggcatcccagaaacgtgtaaatgaccccgagtgtgactgggaaggagaacttattccttaccaggaaactggaagctaaaaatacagagggtgacgtagaaacacgcagaaaccattctaaagaaagtagtgatcttgtattaaattgagcagaattctcacagattttaccattcctgttataaactagtatttgttgtttagccaaaacagaaaatgatttccactggacagtagaaaaatatgtgtaaaatagggaagaaagttagtattggatcagtgtgagtcctgaagcactttcagtgctgtgagaacgacatccactttgggtttcattcgtttgtaagcagaggagctgtcagtcactcgtgcttctcggtggcctctgagccatggtgtcgagtgaagagtagttcttgtttgttacaacctttgtgagtcagccatgcccgcaaagcgtgctgtgttttagtcctggtaggaatatttatcagagttcacactatataaaacccaacagcttcaactattgccctttcaacagttttgccactgaccggatagaaacggtttcagtctctggatggatgtgtttgtggtttgtaaccattacggtttaaaccatggtttaagaatttgcccaaataacagaaattttgttcgggaagggataaactagatatagcatacagagcctgtttttgagttttagatactttatttgtaaataacttaaaatagctttctgaaaccgtgcattctgtagtttcttcctttcagtgaaattgctaaatgtcaatgtatttttggcactgcgattttaaccatttattaaataaaaattttgttaaagaa

SEQ ID NO: 420970 - DNA, 3510 bp, Homo sapiens
ctttgttgtcgttgttttgttttttagagatggggtctcactatgttgcccaggctggtgtcaaactcctgagctcaagcgattccccccacattggcctcccaaagtgctgggctacaggcgtgagccgctgccctgccgttgtttttatggtctctggcctaagcctgtgcttttgatgtcatatgcaacccattgccaaatccattgccatggagcttttcccctgtgtttttttccaagtgttttatggtttcaggtcttatatttaggtttgatccatatcgagttactttttgtatatggtgttaggtaagggtccagcttcattcttctggctgtggatatccagttttcccagcaccagttgttgaaaagactttcttttccccattgaatggtctgggcacccttttcaaaaatcagttgaccaagtattacaaaggtttatttctgtgctctctattttattcccttggtggatgtgtctgtctacatggcagtaccacactgattactttcagctttggaatcagggagtatgtcatctgccattgaatgagtatccactgtgtgctaggccttgtgggtggagcggtgacttggacatcgtccctgctggtccagtgccctgccgtccccctgagtcttgactttattctggatagtggaggttggcacaaaaatatctcccagttaaaggaattataattcagtcacctgactattactgacaagtcaaaaaaaaatgactcagtgggtttagtaccaaggtagcagtgttccatttgatgattcagcatatagcaggttctcttagtgaacatttctctttgtgtatttgtttttcccccacatagcaacgaagttagtttctaatgacttccattctctacttttatcagaagcagatttcacctggaatattctataaaccctttgaaaccctctattttagccatggtgtcttctaagcaaagtaattttcttgaacttaaataacaaattgatagttgaattaaccttttaaaataaaatgtaaagtgtagctaagaaatcattatttaaaggtattccaacgataaattatttgggatggggctggggaggtcaggtatattgaggtgtaagttacatatggtaaaagtcacccttttaaagtgaacaatttgatgaattttgaacaacttcagttatgcaaccaccacaacatgatggattgttttagtaaatgttcttcttaccaggagttcatccttgtttaagtctggagtttgccgtgttaaggttgcaggtgcttgaaagtgtaataaaattgtaggttttttaatcttttttttaatctcttactggaaggatgaattatagtttaaatagtaataatgcattgtcgttgttacacttactctttaagtaagttaggtcattattttccgaaatgaatgtagtagaatttcagaatggcttctggaacatgtttcctgttaaaaggcctagaatatcctgcagtggtagagtttgctccattccagaagatagccaaaaagaagctgagaaaaaaagatgccaagactggaagcatcgaagatggtgagccctttccaagtgctacgttatgaagctgccaaattaagaacactgagcaaatgtaattctcccgtagttgggaaagattatatttattttcttcctactttttaatgtctagatccagaatataagaagtttttagaaacctactgtgtggaggaagagaagaccagtgccaaccctgagactctgctgggggagatggaggcgaagacaagagagctcattgctagaagaaccacacctcttttggaatatattaaaaatagaaaattagaaaagcagagaattcgagaagagaagcgagaagaacggaggaggagagagttagaaaagaaacgtttgcgggaagaggaaaaaagaagaagaagagaagaagaaagatgcaaaaaaaaagagacagataaacagaagaaaattgcagagaaagaagtaaggattaagcttcttaagaaaccagaaaagggagaggaaccaaccacagagaaaccaaaagaaagaggagaggagattgatactggaggtggcaagcaggaatcctgtgcccccggtgcagtcgtaaaagccaggcccatggaaggctcgctggaggagccccaggagacgtcacacagcggcagtgataaagagcacagggatgtggagagatctcaagaacaagaatctgaagcacaaagataccatgtggatgacggcaggaggcacagagctcaccacgagcctgaacggctttccagaaggagtgaggatgagcagagatgggggaaaggacctggccaagacagagggaagaaggggagccaggacagcggggctccgggggaggccatggagagactgggaagagcgcagaggtgtgacgacagtccagcacccagaaaagagcgactggcaaacaaggaccggccagccttgcagctgtatgatccaggagctcgcttccgagcgcgagagtgtggcggaaacaggaggatctgcaaggcagaaggttcggggactggtcctgagaagagggaagaggcagagtgagtcactgcacgcacctggcctccatggacgagcaagggcatcccagaaacgtgtaaatgaccccgagtgtgactgggaaggagaacttattccttaccaggaaactggaagctaaaaatacagagggtgacgtagaaacacgcagaaaccattctaaagaaagtagtgatcttgtattaaattgagcagaattctcacagattttaccattcctgttataaactagtatttgttgtttagccaaaacagaaaatgatttccactggacagtagaaaaatatgtgtaaaatagggaagaaagttagtattggatcagtgtgagtcctgaagcactttcagtgctgtgagaacgacatccactttgggtttcattcgtttgtaagcagaggagctgtcagtcactcgtgcttctcggtggcctctgagccatggtgtcgagtgaagagtagttcttgtttgttacaacctttgtgagtcagccatgcccgcaaagcgtgctgtgttttagtcctggtaggaatatttatcagagttcacactatataaaacccaacagcttcaactattgccctttcaacagttttgccactgaccggatagaaacggtttcagtctctggatggatgtgtttgtggtttgtaaccattacggtttaaaccatggtttaagaatttgcccaaataacagaaattttgttcgggaagggataaactagatatagcatacagagcctgtttttgagttttagatactttatttgtaaataacttaaaatagctttctgaaaccgtgcattctgtagtttcttcctttcagtgaaattgctaaatgtcaatgtatttttggcactgcgattttaaccatttattaaataaaaattttgttaaagaa

SEQ ID NO: 420971 - DNA, 2279 bp, Homo sapiens
agctctcgcgaggtttcgtcgggggctggcggctgcggctcggcggagagtgcggcatgcgctcggaaaaggagggggccggaggccttcgggcggccgttgccgcgcggggcccgagcgggagggagaagctgtcggccctagaagtgcagttccaccgcgactcgcagcagcaggaggctgagacgccgccaacttcgtcctccggttgcgggggcggtgcgggcaaacctcgcgaggagaagaggacggccctgagcaaggtggtcatccgccgcctgcctccgggcctcaccaaggagcagctggaggagcagctgcgcccgctgccagcacacgactacttcgagttcttcgccgccgacctgagtctttatcctcatctctactcaagagcatacattaattttaggaatcctgatgacatccttctttttagagatcgttttgatggatatatcttccttgacagcaaagatccagaatataagaagtttttagaaacctactgtgtggaggaagagaagaccagtgccaaccctgagactctgctgggggagatggaggcgaagacaagagagctcattgctagaagaaccacacctcttttggaatatattaaaaatagaaaattagaaaagcagagaattcgagaagagaagcgagaagaacggaggaggagagagttagaaaagaaacgtttgcgggaagaggaaaaaagaagaagaagagaagaagaaagatgcaaaaaaaaagagacagataaacagaagaaaattgcagagaaagaagtaaggattaagcttcttaagaaaccagaaaagggagaggaaccaaccacagagaaaccaaaagaaagaggagaggagattgatactggaggtggcaagcaggaatcctgtgcccccggtgcagtcgtaaaagccaggcccatggaaggctcgctggaggagccccaggagacgtcacacagcggcagtgataaagagcacagggatgtggagagatctcaagaacaagaatctgaagcacaaagataccatgtggatgacggcaggaggcacagagctcaccacgagcctgaacggctttccagaaggagtgaggatgagcagagatgggggaaaggacctggccaagacagagggaagaaggggagccaggacagcggggctccgggggaggccatggagagactgggaagagcgcagaggtgtgacgacagtccagcacccagaaaagagcgactggcaaacaaggaccggccagccttgcagctgtatgatccaggagctcgcttccgagcgcgagagtgtggcggaaacaggaggatctgcaaggcagaaggttcggggactggtcctgagaagagggaagaggcagagtgagtcactgcacgcacctggcctccatggacgagcaagggcatcccagaaacgtgtaaatgaccccgagtgtgactgggaaggagaacttattccttaccaggaaactggaagctaaaaatacagagggtgacgtagaaacacgcagaaaccattctaaagaaagtagtgatcttgtattaaattgagcagaattctcacagattttaccattcctgttataaactagtatttgttgtttagccaaaacagaaaatgatttccactggacagtagaaaaatatgtgtaaaatagggaagaaagttagtattggatcagtgtgagtcctgaagcactttcagtgctgtgagaacgacatccactttgggtttcattcgtttgtaagcagaggagctgtcagtcactcgtgcttctcggtggcctctgagccatggtgtcgagtgaagagtagttcttgtttgttacaacctttgtgagtcagccatgcccgcaaagcgtgctgtgttttagtcctggtaggaatatttatcagagttcacactatataaaacccaacagcttcaactattgccctttcaacagttttgccactgaccggatagaaacggtttcagtctctggatggatgtgtttgtggtttgtaaccattacggtttaaaccatggtttaagaatttgcccaaataacagaaattttgttcgggaagggataaactagatatagcatacagagcctgtttttgagttttagatactttatttgtaaataacttaaaatagctttctgaaaccgtgcattctgtagtttcttcctttcagtgaaattgctaaatgtcaatgtatttttggcactgcgattttaaccatttattaaataaaaattttgttaaagaa

SEQ ID NO: 420972 - DNA, 2568 bp, Homo sapiens
agctctcgcgaggtttcgtcgggggctggcggctgcggctcggcggagagtgcggcatgcgctcggaaaaggagggggccggaggccttcgggcggccgttgccgcgcggggcccgagcgggagggagaagctgtcggccctagaagtgcagttccaccgcgactcgcagcagcaggaggctgagacgccgccaacttcgtcctccggttgcgggggcggtgcgggcaaacctcgcgaggagaagaggacggccctgagcaaggtggtcatccgccgcctgcctccgggcctcaccaaggagcagctggaggagcagctgcgcccgctgccagcacacgactacttcgagttcttcgccgccgacctgagtctttatcctcatctctactcaagagcatacattaattttaggaatcctgatgacatccttctttttagagatcgttttgatggatatatcttccttgacagcaaaggcctagaatatcctgcagtggtagagtttgctccattccagaagatagccaaaaagaagctgagaaaaaaagatgccaagactggaagcatcgaagatgatccagaatataagaagtttttagaaacctactgtgtggaggaagagaagaccagtgccaaccctgagactctgctgggggagatggaggcgaagacaagagagctcattgctagaagaaccacacctcttttggaatatattaaaaatagaaaattagaaaagcagagaattcgagaagagaagcgagaagaacggaggaggagagagttagaaaagaaacgtttgcgggaagaggaaaaaagaagaagaagagaagaagaaagatgcaaaaaaaaagagacagataaacagaagaaaattgcagagaaagaagtaaggattaagcttcttaagaaaccagaaaagggagaggaaccaaccacagagaaaccaaaagaaagaggagaggagattgatactggaggtggcaagcaggaatcctgtgcccccggtgcagtcgtaaaagccaggcccatggaaggctcgctggaggagccccaggagacgtcacacagcggcagtgataaagagcacagggatgtggagagatctcaagaacaagaatctgaagcacaaagataccatgtggatgacggcaggaggcacagagctcaccacgagcctgaacggctttccagaaggagtgaggatgagcagagatgggggaaaggacctggccaagacagagggaagaaggggagccaggacagcggggctccgggggaggccatggagagactgggaagagcgcagaggtgtgacgacagtccagcacccagaaaagagcgactggcaaacaaggaccggccagccttgcagctgtatgatccaggagctcgcttccgagcgcgagagtgtggcggaaacaggaggatctgcaaggcagaaggttcggggactggtcctgagaagagggaagaggcagagtgagtcactgcacgcacctggcctccatggacgagcaagggcatcccagaaacgtgtaaatgaccccgagtgtgactgggaaggagaacttattccttaccaggaaactggaagctaaaaatacagagggtgacgtagaaacacgcagaaaccattctaaagaaagtagtgatcttgtattaaattgagcagaattctcacagattttaccattcctgttataaactagtatttgttgtttagccaaaacagaaaatgatttccactggacagtagaaaaatatgtgtaaaatagggaagaaagttagtattggatcagtgtgagtcctgaagcactttcagtgctgtgagaacgacatccactttgggtttcattcgtttgtaagcagaggagctgtcagtcactcgtgcttctcggtggcctctgagccatggtgtcgagtgaagagtagttcttgtttgttacaacctttgtgagtcagccatgcccgcaaagcgtgctgtgttttagtcctggtaggaatatttatcagagttcacactatataaaacccaacagcttcaactattgccctttcaacagttttgccactgaccggatagaaacggtttcagtctctggatggatgtgtttgtggtttgtaaccattacggtttaaaccatggtttaagaatttgcccaaataacagaaattttgttcgggaagggataaactagatatagcatacagagcctgtttttgagttttagatactttatttgtaaataacttaaaatagctttctgaaaccgtgcattctgtagtttcttcctttcagtgaaattgctaaatgtcaatgtatttttggcactgcgattttaaccatttattaaataaaaattttgttaaagaaaaaaaaaaaaaaaacaaaaaagaaaaaaacaaaaacaacaaaagagaggggcgggcgcgcgccctagaagagataatccccccggggagggggcgcccaacatcggttggcgcgcctcacaccagctgtttctgtctggtgccagcggggtggcccccataaatagtgggggggcggcattatataaagc

SEQ ID NO: 420973 - DNA, 3367 bp, Homo sapiens
ctttgttgtcgttgttttgttttttagagatggggtctcactatgttgcccaggctggtgtcaaactcctgagctcaagcgattccccccacattggcctcccaaagtgctgggctacaggcgtgagccgctgccctgccgttgtttttatggtctctggcctaagcctgtgcttttgatgtcatatgcaacccattgccaaatccattgccatggagcttttcccctgtgtttttttccaagtgttttatggtttcaggtcttatatttaggtttgatccatatcgagttactttttgtatatggtgttaggtaagggtccagcttcattcttctggctgtggatatccagttttcccagcaccagttgttgaaaagactttcttttccccattgaatggtctgggcacccttttcaaaaatcagttgaccaagtattacaaaggtttatttctgtgctctctattttattcccttggtggatgtgtctgtctacatggcagtaccacactgattactttcagctttggaatcagggagtatgtcatctgccattgaatgagtatccactgtgtgctaggccttgtgggtggagcggtgacttggacatcgtccctgctggtccagtgccctgccgtccccctgagtcttgactttattctggatagtggaggttggcacaaaaatatctcccagttaaaggaattataattcagtcacctgactattactgacaagtcaaaaaaaaatgactcagtgggtttagtaccaaggtagcagtgttccatttgatgattcagcatatagcaggttctcttagtgaacatttctctttgtgtatttgtttttcccccacatagcaacgaagttagtttctaatgacttccattctctacttttatcagaagcagatttcacctggaatattctataaaccctttgaaaccctctattttagccatggtgtcttctaagcaaagtaattttcttgaacttaaataacaaattgatagttgaattaaccttttaaaataaaatgtaaagtgtagctaagaaatcattatttaaaggtattccaacgataaattatttgggatggggctggggaggtcaggtatattgaggtgtaagttacatatggtaaaagtcacccttttaaagtgaacaatttgatgaattttgaacaacttcagttatgcaaccaccacaacatgatggattgttttagtaaatgttcttcttaccaggagttcatccttgtttaagtctggagtttgccgtgttaaggttgcaggtgcttgaaagtgtaataaaattgtaggttttttaatcttttttttaatctcttactggaaggatgaattatagtttaaatagtaataatgcattgtcgttgttacacttactctttaagtaagttaggtcattattttccgaaatgaatgtagtagaatttcagaatggcttctggaacatgtttcctgttaaaaggcctagaatatcctgcagtggtagagtttgctccattccagaagatagccaaaaagaagctgagaaaaaaagatgccaagactggaagcatcgaagatgatccagaatataagaagtttttagaaacctactgtgtggaggaagagaagaccagtgccaaccctgagactctgctgggggagatggaggcgaagacaagagagctcattgagtttatacacacgctcttccatgtctttagagaattcgagaagagaagcgagaagaacggaggaggagagagttagaaaagaaacgtttgcgggaagaggaaaaaagaagaagaagagaagaagaaagatgcaaaaaaaaagagacagataaacagaagaaaattgcagagaaagaagtaaggattaagcttcttaagaaaccagaaaagggagaggaaccaaccacagagaaaccaaaagaaagaggagaggagattgatactggaggtggcaagcaggaatcctgtgcccccggtgcagtcgtaaaagccaggcccatggaaggctcgctggaggagccccaggagacgtcacacagcggcagtgataaagagcacagggatgtggagagatctcaagaacaagaatctgaagcacaaagataccatgtggatgacggcaggaggcacagagctcaccacgagcctgaacggctttccagaaggagtgaggatgagcagagatgggggaaaggacctggccaagacagagggaagaaggggagccaggacagcggggctccgggggaggccatggagagactgggaagagcgcagaggtgtgacgacagtccagcacccagaaaagagcgactggcaaacaaggaccggccagccttgcagctgtatgatccaggagctcgcttccgagcgcgagagtgtggcggaaacaggaggatctgcaaggcagaaggttcggggactggtcctgagaagagggaagaggcagagtgagtcactgcacgcacctggcctccatggacgagcaagggcatcccagaaacgtgtaaatgaccccgagtgtgactgggaaggagaacttattccttaccaggaaactggaagctaaaaatacagagggtgacgtagaaacacgcagaaaccattctaaagaaagtagtgatcttgtattaaattgagcagaattctcacagattttaccattcctgttataaactagtatttgttgtttagccaaaacagaaaatgatttccactggacagtagaaaaatatgtgtaaaatagggaagaaagttagtattggatcagtgtgagtcctgaagcactttcagtgctgtgagaacgacatccactttgggtttcattcgtttgtaagcagaggagctgtcagtcactcgtgcttctcggtggcctctgagccatggtgtcgagtgaagagtagttcttgtttgttacaacctttgtgagtcagccatgcccgcaaagcgtgctgtgttttagtcctggtaggaatatttatcagagttcacactatataaaacccaacagcttcaactattgccctttcaacagttttgccactgaccggatagaaacggtttcagtctctggatggatgtgtttgtggtttgtaaccattacggtttaaaccatggtttaagaatttgcccaaataacagaaattttgttcgggaagggataaactagatatagcatacagagcctgtttttgagttttagatactttatttgtaaataacttaaaatagctttctgaaaccgtgcattctgtagtttcttcctttcagtgaaattgctaaatgtcaatgtatttttggcactgcgattttaaccatttattaaataaaaattttgttaaagaa

SEQ ID NO: 420974 - DNA, 2065 bp, Homo sapiens
tccaggattgcgcaattctggatgctgtcggccctagaagtgcagttccaccgcgactcgcagcagcaggaggctgagacgccgccaacttcgtcctccggttgcgggggcggtgcgggcaaacctcgcgaggagaagaggacggccctgagcaaggtggtcatccgccgcctgcctccgggcctcaccaaggagcagctggaggagcagctgcgcccgctgccagcacacgactacttcgagttcttcgccgccgacctgagatccagaatataagaagtttttagaaacctactgtgtggaggaagagaagaccagtgccaaccctgagactctgctgggggagatggaggcgaagacaagagagctcattgctagaagaaccacacctcttttggaatatattaaaaatagaaaattagaaaagcagagaattcgagaagagaagcgagaagaacggaggaggagagagttagaaaagaaacgtttgcgggaagaggaaaaaagaagaagaagagaagaagaaagatgcaaaaaaaaagagacagataaacagaagaaaattgcagagaaagaagtaaggattaagcttcttaagaaaccagaaaagggagaggaaccaaccacagagaaaccaaaagaaagaggagaggagattgatactggaggtggcaagcaggaatcctgtgcccccggtgcagtcgtaaaagccaggcccatggaaggctcgctggaggagccccaggagacgtcacacagcggcagtgataaagagcacagggatgtggagagatctcaagaacaagaatctgaagcacaaagataccatgtggatgacggcaggaggcacagagctcaccacgagcctgaacggctttccagaaggagtgaggatgagcagagatgggggaaaggacctggccaagacagagggaagaaggggagccaggacagcggggctccgggggaggccatggagagactgggaagagcgcagaggtgtgacgacagtccagcacccagaaaagagcgactggcaaacaaggaccggccagccttgcagctgtatgatccaggagctcgcttccgagcgcgagagtgtggcggaaacaggaggatctgcaaggcagaaggttcggggactggtcctgagaagagggaagaggcagagtgagtcactgcacgcacctggcctccatggacgagcaagggcatcccagaaacgtgtaaatgaccccgagtgtgactgggaaggagaacttattccttaccaggaaactggaagctaaaaatacagagggtgacgtagaaacacgcagaaaccattctaaagaaagtagtgatcttgtattaaattgagcagaattctcacagattttaccattcctgttataaactagtatttgttgtttagccaaaacagaaaatgatttccactggacagtagaaaaatatgtgtaaaatagggaagaaagttagtattggatcagtgtgagtcctgaagcactttcagtgctgtgagaacgacatccactttgggtttcattcgtttgtaagcagaggagctgtcagtcactcgtgcttctcggtggcctctgagccatggtgtcgagtgaagagtagttcttgtttgttacaacctttgtgagtcagccatgcccgcaaagcgtgctgtgttttagtcctggtaggaatatttatcagagttcacactatataaaacccaacagcttcaactattgccctttcaacagttttgccactgaccggatagaaacggtttcagtctctggatggatgtgtttgtggtttgtaaccattacggtttaaaccatggtttaagaatttgcccaaataacagaaattttgttcgggaagggataaactagatatagcatacagagcctgtttttgagttttagatactttatttgtaaataacttaaaatagctttctgaaaccgtgcattctgtagtttcttcctttcagtgaaattgctaaatgtcaatgtatttttggcactgcgattttaaccatttattaaataaaaattttgttaaagaa

SEQ ID NO: 420975 - DNA, 2019 bp, Homo sapiens
atattttaagcctcccttaagaatcaggaattagatgtctactatgtatgaaattgttgatactttcaaattacttgacctgacagtaatggaataaaaactcccctggagacagtgtgtaaatttaaaaagtaatgatatggttcccgtatttattttaaagattacattcaaaacaagtatttaaaatacatctttctttaggagttaaatacaatattacaatttttgtgttttagctagaagaaccacacctcttttggaatatattaaaaatagaaaattagaaaagcaggtaggtctggcctttacctgatgaacaccctccctgcttctgccattctcatccaggcagtttatacacacgctcttccatgtctttagagaattcgagaagagaagcgagaagaacggaggaggagagagttagaaaagaaacgtttgcgggaagaggaaaaaagaagaagaagagaagaagaaagatgcaaaaaaaaagagacagataaacagaagaaaattgcagagaaagaagtaaggattaagcttcttaagaaaccagaaaagggagaggaaccaaccacagagaaaccaaaagaaagaggagaggagattgatactggaggtggcaagcaggaatcctgtgcccccggtgcagtcgtaaaagccaggcccatggaaggctcgctggaggagccccaggagacgtcacacagcggcagtgataaagagcacagggatgtggagagatctcaagaacaagaatctgaagcacaaagataccatgtggatgacggcaggaggcacagagctcaccacgagcctgaacggctttccagaaggagtgaggatgagcagagatgggggaaaggacctggccaagacagagggaagaaggggagccaggacagcggggctccgggggaggccatggagagactgggaagagcgcagaggtgtgacgacagtccagcacccagaaaagagcgactggcaaacaaggaccggccagccttgcagctgtatgatccaggagctcgcttccgagcgcgagagtgtggcggaaacaggaggatctgcaaggcagaaggttcggggactggtcctgagaagagggaagaggcagagtgagtcactgcacgcacctggcctccatggacgagcaagggcatcccagaaacgtgtaaatgaccccgagtgtgactgggaaggagaacttattccttaccaggaaactggaagctaaaaatacagagggtgacgtagaaacacgcagaaaccattctaaagaaagtagtgatcttgtattaaattgagcagaattctcacagattttaccattcctgttataaactagtatttgttgtttagccaaaacagaaaatgatttccactggacagtagaaaaatatgtgtaaaatagggaagaaagttagtattggatcagtgtgagtcctgaagcactttcagtgctgtgagaacgacatccactttgggtttcattcgtttgtaagcagaggagctgtcagtcactcgtgcttctcggtggcctctgagccatggtgtcgagtgaagagtagttcttgtttgttacaacctttgtgagtcagccatgcccgcaaagcgtgctgtgttttagtcctggtaggaatatttatcagagttcacactatataaaacccaacagcttcaactattgccctttcaacagttttgccactgaccggatagaaacggtttcagtctctggatggatgtgtttgtggtttgtaaccattacggtttaaaccatggtttaagaatttgcccaaataacagaaattttgttcgggaagggataaactagatatagcatacagagcctgtttttgagttttagatactttatttgtaaataacttaaaatagctttctgaaaccgtgcattctgtagtttcttcctttcagtgaaattgctaaatgtcaatgtatttttggcactgcgattttaaccatttattaaataaaaattttgttaaagaa

SEQ ID NO: 420976 - DNA, 2025 bp, Homo sapiens
ggggcgggggccgggcctcccagcgcggtacgcggtgccttttgagctccttgtccacgctccgccccggtgggaacggccgcgcgctccccgcaggtggtcatccgccgcctgcctccgggcctcaccaaggagcagctggaggagcagctgcgcccgctgccagcacacgactacttcgagttcttcgccgccgacctgagtctttatcctcatctctactcaagagcatacattaattttaggaatcctgatgacatccttctttttagagatcgttttgatggatatatcttccttgacagcaaaggcctagaatatcctgcagtggtagagtttgctccattccagaagatagccaaaaagaagctgagaaaaaaagatgccaagactggaagcatcgaagatgatccagaatataagaagtttttagaaacctactgtgtggaggaagagaagaccagtgccaaccctgagactctgctgggggagatggaggcgaagacaagagagctcattgagtttatacacacgctcttccatgtctttagagaattcgagaagagaagcgagaagaacggaggaggagagagttagaaaagaaacgtttgcgggaagaggaaaaaagaagaagaagagaagaagaaagatgcaaaaaaaaagagacagataaacagaagaaaattgcagagaaagaagtaaggattaaggtcacacagcggcagtgataaagagcacagggatgtggagagatctcaagaacaagaatctgaagcacaaagataccatgtggatgacggcaggaggcacagagctcaccacgagcctgaacggctttccagaaggagtgaggatgagcagagatgggggaaaggacctggccaagacagagggaagaaggggagccaggacagcggggctccgggggaggccatggagagactgggaagagcgcagaggtgtgacgacagtccagcacccagaaaagagcgactggcaaacaaggaccggccagccttgcagctgtatgatccaggagctcgcttccgagcgcgagagtgtggcggaaacaggaggatctgcaaggcagaaggttcggggactggtcctgagaagagggaagaggcagagtgagtcactgcacgcacctggcctccatggacgagcaagggcatcccagaaacgtgtaaatgaccccgagtgtgactgggaaggagaacttattccttaccaggaaactggaagctaaaaatacagagggtgacgtagaaacacgcagaaaccattctaaagaaagtagtgatcttgtattaaattgagcagaattctcacagattttaccattcctgttataaactagtatttgttgtttagccaaaacagaaaatgatttccactggacagtagaaaaatatgtgtaaaatagggaagaaagttagtattggatcagtgtgagtcctgaagcactttcagtgctgtgagaacgacatccactttgggtttcattcgtttgtaagcagaggagctgtcagtcactcgtgcttctcggtggcctctgagccatggtgtcgagtgaagagtagttcttgtttgttacaacctttgtgagtcagccatgcccgcaaagcgtgctgtgttttagtcctggtaggaatatttatcagagttcacactatataaaacccaacagcttcaactattgccctttcaacagttttgccactgaccggatagaaacggtttcagtctctggatggatgtgtttgtggtttgtaaccattacggtttaaaccatggtttaagaatttgcccaaataacagaaattttgttcgggaagggataaactagatatagcatacagagcctgtttttgagttttagatactttatttgtaaataacttaaaatagctttctgaaaccgtgcattctgtagtttcttcctttcagtgaaattgctaaatgtcaatgtatttttggcactgcgattttaaccatttattaaataaaaattttgttaaagaa

SEQ ID NO: 420977 - DNA, 3091 bp, Homo sapiens
ctttgttgtcgttgttttgttttttagagatggggtctcactatgttgcccaggctggtgtcaaactcctgagctcaagcgattccccccacattggcctcccaaagtgctgggctacaggcgtgagccgctgccctgccgttgtttttatggtctctggcctaagcctgtgcttttgatgtcatatgcaacccattgccaaatccattgccatggagcttttcccctgtgtttttttccaagtgttttatggtttcaggtcttatatttaggtttgatccatatcgagttactttttgtatatggtgttaggtaagggtccagcttcattcttctggctgtggatatccagttttcccagcaccagttgttgaaaagactttcttttccccattgaatggtctgggcacccttttcaaaaatcagttgaccaagtattacaaaggtttatttctgtgctctctattttattcccttggtggatgtgtctgtctacatggcagtaccacactgattactttcagctttggaatcagggagtatgtcatctgccattgaatgagtatccactgtgtgctaggccttgtgggtggagcggtgacttggacatcgtccctgctggtccagtgccctgccgtccccctgagtcttgactttattctggatagtggaggttggcacaaaaatatctcccagttaaaggaattataattcagtcacctgactattactgacaagtcaaaaaaaaatgactcagtgggtttagtaccaaggtagcagtgttccatttgatgattcagcatatagcaggttctcttagtgaacatttctctttgtgtatttgtttttcccccacatagcaacgaagttagtttctaatgacttccattctctacttttatcagaagcagatttcacctggaatattctataaaccctttgaaaccctctattttagccatggtgtcttctaagcaaagtaattttcttgaacttaaataacaaattgatagttgaattaaccttttaaaataaaatgtaaagtgtagctaagaaatcattatttaaaggtattccaacgataaattatttgggatggggctggggaggtcaggtatattgaggtgtaagttacatatggtaaaagtcacccttttaaagtgaacaatttgatgaattttgaacaacttcagttatgcaaccaccacaacatgatggattgttttagtaaatgttcttcttaccaggagttcatccttgtttaagtctggagtttgccgtgttaaggttgcaggtgcttgaaagtgtaataaaattgtaggttttttaatcttttttttaatctcttactggaaggatgaattatagtttaaatagtaataatgcattgtcgttgttacacttactctttaagtaagttaggtcattattttccgaaatgaatgtagtagaatttcagaatggcttctggaacatgtttcctgttaaaaggcctagaatatcctgcagtggtagagtttgctccattccagaagatagccaaaaagaagctgagaaaaaaagatgccaagactggaagcatcgaagatggtgagccctttccaagtgctacgttatgaagctgccaaattaagaacactgagcaaatgtaattctcccgtagttgggaaagattatatttattttcttcctactttttaatgtctagatccagaatataagaagtttttagaaacctactgtgtggaggaagagaagaccagtgccaaccctgagactctgctgggggagatggaggcgaagacaagagagctcattgctagaagaaccacacctcttttggaatatattaaaaatagaaaattagaaaagcaggtaggtctggcctttacctgatgaacaccctccctgcttctgccattctcatccaggcagtttatacacacgctcttccatgtctttagagaattcgagaagagaagcgagaagaacggaggccatggagagactgggaagagcgcagaggtgtgacgacagtccagcacccagaaaagagcgactggcaaacaaggaccggccagccttgcagctgtatgatccaggagctcgcttccgagcgcgagagtgtggcggaaacaggaggatctgcaaggcagaaggttcggggactggtcctgagaagagggaagaggcagagtgagtcactgcacgcacctggcctccatggacgagcaagggcatcccagaaacgtgtaaatgaccccgagtgtgactgggaaggagaacttattccttaccaggaaactggaagctaaaaatacagagggtgacgtagaaacacgcagaaaccattctaaagaaagtagtgatcttgtattaaattgagcagaattctcacagattttaccattcctgttataaactagtatttgttgtttagccaaaacagaaaatgatttccactggacagtagaaaaatatgtgtaaaatagggaagaaagttagtattggatcagtgtgagtcctgaagcactttcagtgctgtgagaacgacatccactttgggtttcattcgtttgtaagcagaggagctgtcagtcactcgtgcttctcggtggcctctgagccatggtgtcgagtgaagagtagttcttgtttgttacaacctttgtgagtcagccatgcccgcaaagcgtgctgtgttttagtcctggtaggaatatttatcagagttcacactatataaaacccaacagcttcaactattgccctttcaacagttttgccactgaccggatagaaacggtttcagtctctggatggatgtgtttgtggtttgtaaccattacggtttaaaccatggtttaagaatttgcccaaataacagaaattttgttcgggaagggataaactagatatagcatacagagcctgtttttgagttttagatactttatttgtaaataacttaaaatagctttctgaaaccgtgcattctgtagtttcttcctttcagtgaaattgctaaatgtcaatgtatttttggcactgcgattttaaccatttattaaataaaaattttgttaaagaa

SEQ ID NO: 420978 - DNA, 1746 bp, Homo sapiens
tccaggattgcgcaattctggatgctgtcggccctagaagtgcagttccaccgcgactcgcagcagcaggaggctgagacgccgccaacttcgtcctccggttgcgggggcggtgcgggcaaacctcgcgaggagaagaggacggccctgagcaaggtggtcatccgccgcctgcctccgggcctcaccaaggagcagctggaggagcagctgcgcccgctgccagcacacgactacttcgagttcttcgccgccgacctgagatccagaatataagaagtttttagaaacctactgtgtggaggaagagaagaccagtgccaaccctgagactctgctgggggagatggaggcgaagacaagagagctcattgctagaagaaccacacctcttttggaatatattaaaaatagaaaattagaaaagcagagaattcgagaagagaagcgagaagaacggaggaggagagagttagaaaagaaacgtttgcgggaagaggaaaaaagaagaagaagagaagaagaaagatgcaaaaaaaaagagacagataaacagaagaaaattgcagagaaagaagtaaggattaaggtcacacagcggcagtgataaagagcacagggatgtggagagatctcaagaacaagaatctgaagcacaaagataccatgtggatgacggcaggaggcacagagctcaccacgagcctgaacggctttccagaaggagaccggccagccttgcagctgtatgatccaggagctcgcttccgagcgcgagagtgtggcggaaacaggaggatctgcaaggcagaaggttcggggactggtcctgagaagagggaagaggcagagtgagtcactgcacgcacctggcctccatggacgagcaagggcatcccagaaacgtgtaaatgaccccgagtgtgactgggaaggagaacttattccttaccaggaaactggaagctaaaaatacagagggtgacgtagaaacacgcagaaaccattctaaagaaagtagtgatcttgtattaaattgagcagaattctcacagattttaccattcctgttataaactagtatttgttgtttagccaaaacagaaaatgatttccactggacagtagaaaaatatgtgtaaaatagggaagaaagttagtattggatcagtgtgagtcctgaagcactttcagtgctgtgagaacgacatccactttgggtttcattcgtttgtaagcagaggagctgtcagtcactcgtgcttctcggtggcctctgagccatggtgtcgagtgaagagtagttcttgtttgttacaacctttgtgagtcagccatgcccgcaaagcgtgctgtgttttagtcctggtaggaatatttatcagagttcacactatataaaacccaacagcttcaactattgccctttcaacagttttgccactgaccggatagaaacggtttcagtctctggatggatgtgtttgtggtttgtaaccattacggtttaaaccatggtttaagaatttgcccaaataacagaaattttgttcgggaagggataaactagatatagcatacagagcctgtttttgagttttagatactttatttgtaaataacttaaaatagctttctgaaaccgtgcattctgtagtttcttcctttcagtgaaattgctaaatgtcaatgtatttttggcactgcgattttaaccatttattaaataaaaattttgttaaagaa

SEQ ID NO: 420979 - DNA, 2795 bp, Homo sapiens
ctttgttgtcgttgttttgttttttagagatggggtctcactatgttgcccaggctggtgtcaaactcctgagctcaagcgattccccccacattggcctcccaaagtgctgggctacaggcgtgagccgctgccctgccgttgtttttatggtctctggcctaagcctgtgcttttgatgtcatatgcaacccattgccaaatccattgccatggagcttttcccctgtgtttttttccaagtgttttatggtttcaggtcttatatttaggtttgatccatatcgagttactttttgtatatggtgttaggtaagggtccagcttcattcttctggctgtggatatccagttttcccagcaccagttgttgaaaagactttcttttccccattgaatggtctgggcacccttttcaaaaatcagttgaccaagtattacaaaggtttatttctgtgctctctattttattcccttggtggatgtgtctgtctacatggcagtaccacactgattactttcagctttggaatcagggagtatgtcatctgccattgaatgagtatccactgtgtgctaggccttgtgggtggagcggtgacttggacatcgtccctgctggtccagtgccctgccgtccccctgagtcttgactttattctggatagtggaggttggcacaaaaatatctcccagttaaaggaattataattcagtcacctgactattactgacaagtcaaaaaaaaatgactcagtgggtttagtaccaaggtagcagtgttccatttgatgattcagcatatagcaggttctcttagtgaacatttctctttgtgtatttgtttttcccccacatagcaacgaagttagtttctaatgacttccattctctacttttatcagaagcagatttcacctggaatattctataaaccctttgaaaccctctattttagccatggtgtcttctaagcaaagtaattttcttgaacttaaataacaaattgatagttgaattaaccttttaaaataaaatgtaaagtgtagctaagaaatcattatttaaaggtattccaacgataaattatttgggatggggctggggaggtcaggtatattgaggtgtaagttacatatggtaaaagtcacccttttaaagtgaacaatttgatgaattttgaacaacttcagttatgcaaccaccacaacatgatggattgttttagtaaatgttcttcttaccaggagttcatccttgtttaagtctggagtttgccgtgttaaggttgcaggtgcttgaaagtgtaataaaattgtaggttttttaatcttttttttaatctcttactggaaggatgaattatagtttaaatagtaataatgcattgtcgttgttacacttactctttaagtaagttaggtcattattttccgaaatgaatgtagtagaatttcagaatggcttctggaacatgtttcctgttaaaaggcctagaatatcctgcagtggtagagtttgctccattccagaagatagccaaaaagaagctgagaaaaaaagatgccaagactggaagcatcgaagatggtgagccctttccaagtgctacgttatgaagctgccaaattaagaacactgagcaaatgtaattctcccgtagttgggaaagattatatttattttcttcctactttttaatgtctagatccagaatataagaagtttttagaaacctactgtgtggaggaagagaagaccagtgccaaccctgagactctgctgggggagatggaggcgaagacaagagagctcattggtctgttttgctcatttcttctcttttctttattgagagatttactcgtagaggatatacgttttttctctttttcttgactgtgataacaagttgaaacttgttacaggcttgacagaaatgtagagtgatttccagttttgacaaaagaatggcaagatggcagcatgggaaaatatttctgagcgttggttgatggagagcacgtgatttttttagttaagatcattttaagttatgatgcttccgaatgagcagtgcagaagacacatgaatggtctgttcctgagcgtcagggaaggcatgttgtgtcacatagttgaagtcagtggtcacagacggatgcctcaagagcccataggaatgagatgttttgcttgcggtgaggtcatcttgctgcttcaacacaaatgccaggctccccgagccaggccaacttgtggataagcccagccagagcacagaatcgagtttaaatccagccttccaccccatgcccacaagtggtgtactttagaaatagttacttcccagtagcaccaacatgaaaatcaggcaaactgttgttgtttagtcccagacacacctggtagtgtttctcttctctgtggatctcctttcctcaaagccctggttcttcacctctcatctctcccgcccaggctgtgccctgcccacccatcaagatggatgtactttgggaggccagggtgggcggatcacaaggtcaggacttcgagatcagcctggccgacatggtgaaaccccatctctactaaagatacaaaaaattagcagggcatggtggtgcgtgcctatagttccagctactgaggaggctgaggcaggagaatcgcttgaacccagaaggcggaggttgcagtgagctgagatcgcaccactgcactccagcctggtgacagagcgagactccatctcaaaaaaccaataaaattgatgtgacatgacagccaca

SEQ ID NO: 420980 - DNA, 2556 bp, Homo sapiens
ctttgttgtcgttgttttgttttttagagatggggtctcactatgttgcccaggctggtgtcaaactcctgagctcaagcgattccccccacattggcctcccaaagtgctgggctacaggcgtgagccgctgccctgccgttgtttttatggtctctggcctaagcctgtgcttttgatgtcatatgcaacccattgccaaatccattgccatggagcttttcccctgtgtttttttccaagtgttttatggtttcaggtcttatatttaggtttgatccatatcgagttactttttgtatatggtgttaggtaagggtccagcttcattcttctggctgtggatatccagttttcccagcaccagttgttgaaaagactttcttttccccattgaatggtctgggcacccttttcaaaaatcagttgaccaagtattacaaaggtttatttctgtgctctctattttattcccttggtggatgtgtctgtctacatggcagtaccacactgattactttcagctttggaatcagggagtatgtcatctgccattgaatgagtatccactgtgtgctaggccttgtgggtggagcggtgacttggacatcgtccctgctggtccagtgccctgccgtccccctgagtcttgactttattctggatagtggaggttggcacaaaaatatctcccagttaaaggaattataattcagtcacctgactattactgacaagtcaaaaaaaaatgactcagtgggtttagtaccaaggtagcagtgttccatttgatgattcagcatatagcaggttctcttagtgaacatttctctttgtgtatttgtttttcccccacatagcaacgaagttagtttctaatgacttccattctctacttttatcagaagcagatttcacctggaatattctataaaccctttgaaaccctctattttagccatggtgtcttctaagcaaagtaattttcttgaacttaaataacaaattgatagttgaattaaccttttaaaataaaatgtaaagtgtagctaagaaatcattatttaaaggtattccaacgataaattatttgggatggggctggggaggtcaggtatattgaggtgtaagttacatatggtaaaagtcacccttttaaagtgaacaatttgatgaattttgaacaacttcagttatgcaaccaccacaacatgatggattgttttagtaaatgttcttcttaccaggagttcatccttgtttaagtctggagtttgccgtgttaaggttgcaggtgcttgaaagtgtaataaaattgtaggttttttaatcttttttttaatctcttactggaaggatgaattatagtttaaatagtaataatgcattgtcgttgttacacttactctttaagtaagttaggtcattattttccgaaatgaatgtagtagaatttcagaatggcttctggaacatgtttcctgttaaaaggcctagaatatcctgcagtggtagagtttgctccattccagaagatagccaaaaagaagctgagaaaaaaagatgccaagactggaagcatcgaagatggtgagccctttccaagtgctacgttatgaagctgccaaattaagaacactgagcaaatgtaattctcccgtagttgggaaagattatatttattttcttcctactttttaatgtctagatccagaatataagaagtttttagaaacctactgtgtggaggaagagaagaccagtgccaaccctgagactctgctgggggagatggaggcgaagacaagagagctcattggtctgttttgctcatttcttctcttttctttattgagagatttactcgtagaggatatacgttttttctctttttcttgactgtgataacaagttgaaacttgttacaggcttgacagaaatgtagagtgatttccagttttgacaaaagaatggcaagatggcagcatgggaaaatatttctgagcgttggttgatggagagcacgtgatttttttagttaagatcattttaagttatgatgcttccgaatgagcagtgcagaagacacatgaatggtctgttcctgagcgtcagggaaggcatgttgtgtcacatagttgaagtcagtggtcacagacggatgcctcaagagcccataggaatgagatgttttgcttgcggtgaggtcatcttgctgcttcaacacaaatgccaggctccccgagccaggccaacttgtggataagcccagccagagcacagaatcgagtttaaatccagccttccaccccatgcccacaagtggtgtactttagaaatagttacttcccagtagcaccaacatacttcccaggtagcaccaacatgaaaatcaggcaaactgttgttgtttagtcccagacacacctggtagtgtttctcttctctgtggatctcctttcctcaaagccctggttcttcacctctcatctctcccgcccaggctgtgccctgccctcccaaagtactgggattacaggcgtgagccaccacacc

SEQ ID NO: 420981 - DNA, 1614 bp, Homo sapiens
ggggcgggggccgggcctcccagcgcggtacgcggtgccttttgagctccttgtccacgctccgccccggtgggaacggccgcgcgctccccgcaggtggtcatccgccgcctgcctccgggcctcaccaaggagcagctggaggagcagctgcgcccgctgccagcacacgactacttcgagttcttcgccgccgacctgagtctttatcctcatctctactcaagagcatacattaattttaggaatcctgatgacatccttctttttagagatcgttttgatggatatatcttccttgacagcaaaggcctagaatatcctgcagtggtagagtttgctccattccagaagatagccaaaaagaagctgagaaaaaaagatgccaagactggaagcatcgaagatggtgagccctttccaagtgctacgttatgaagctgccaaattaagaacactgagcaaatgtaattctcccgtagttgggaaagattatatttattttcttcctactttttaatgtctagatccagaatataagaagtttttagaaacctactgtgtggaggaagagaagaccagtgccaaccctgagactctgctgggggagatggaggcgaagacaagagagctcattggtctgttttgctcatttcttctcttttctttattgagagatttactcgtagaggatatacgttttttctctttttcttgactgtgataacaagttgaaacttgttacaggcttgacagaaatgtagagtgatttccagttttgacaaaagaatggcaagatggcagcatgggaaaatatttctgagcgttggttgatggagagcacgtgatttttttagttaagatcattttaagttatgatgcttccgaatgagcagtgcagaagacacatgaatggtctgttcctgagcgtcagggaaggcatgttgtgtcacatagttgaagtcagtggtcacagacggatgcctcaagagcccataggaatgagatgttttgcttgcggtgaggtcatcttgctgcttcaacacaaatgccaggctccccgagccaggccaacttgtggataagcccagccagagcacagaatcgagtttaaatccagccttccaccccatgcccacaagtggtgtactttagaaatagttacttcccagtagcaccaacatgaaaatcaggcaaactgttgttgtttagtcccagacacacctggtagtgtttctcttctctgtggatctcctttcctcaaagccctggttcttcacctctcatctctcccgcccaggctgtgccctgcccacccatcaagatggatgtactttgggaggccagggtgggcggatcacaaggtcaggacttcgagatcagcctggccgacatggtgaaaccccatctctactaaagatacaaaaaattagcagggcatggtggtgcgtgcctatagttccagctactgaggaggctgaggcaggagaatcgcttgaacccagaaggcggaggttgcagtgagctgagatcgcaccactgcactccagcctggtgacagagcgagactccatctcaaaaaaccaataaaattgatgtgacatgacagccaca

SEQ ID NO: 420982 - DNA, 311 bp, Homo sapiens
gaaaagaaacgtttgcgggaagaggaaaaaagaagaagaagagaagaagaaagatgcaaaaaaaaagagacagataaacagaagaaaattgcagagaaagaagtaaggattaaggtaattctgaggaaacatttcctttttccaaaaatagctctgctatagtaattacactttttacatatcttagttctttagaattttgaaaacattctgaattaatctaatattgtgttgttatttttttccatcttttccatctttctttccatcctacagcagtggttatcacagtgcgtcctgagccctgggag

SEQ ID NO: 420983 - DNA, 2378 bp, Homo sapiens
agctctcgcgaggtttcgtcgggggctggcggctgcggctcggcggagagtgcggcatgcgctcggaaaaggagggggccggaggccttcgggcggccgttgccgcgcggggcccgagcgggagggagaagctgtcggccctagaagtgcagttccaccgcgactcgcagcagcaggaggctgagacgccgccaacttcgtcctccggttgcgggggcggtgcgggcaaacctcgcgaggagaagaggacggccctgagcaaggtggtcatccgccgcctgcctccgggcctcaccaaggagcagctggaggagcagctgcgcccgctgccagcacacgactacttcgagttcttcgccgccgacctgagtctttatcctcatctctactcaagagcatacattaattttaggaatcctgatgacatccttctttttagagatcgttttgatggatatatcttccttgacagcaaaggcctagaatatcctgcagtggtagagtttgctccattccagaagatagccaaaaagaagctgagaaaaaaagatgccaagactggaagcatcgaagatgatccagaatataagaagtttttagaaacctactgtgtggaggaagagaagaccagtgccaaccctgagactctgctgggggagatggaggcgaagacaagagagctcattgctagaagaaccacacctcttttggaatatattaaaaatagaaaattagaaaagcagagaattcgagaagagaagcgagaagaacggaggaggagagagttagaaaagaaacgtttgcgggaagaggaaaaaagaagaagaagagaagaagaaagatgcaaaaaaaaagagacagataaacagaagaaaattgcagagaaagaagtaaggattaagcttcttaagaaaccagaaaagggagaggaaccaaccacagagaaaccaaaagaaagaggagaggagattgatactggaggtggcaagcaggaatcctgtgcccccggtgcagtcgtaaaagccaggcccatggaaggctcgctggaggagccccaggagacgtcacacagcggcagtgataaagagcacagggatgtggagagatctcaagaacaagaatctgaagcacaaagataccatgtggatgacggcaggaggcacagagctcaccacgagcctgaacggctttccagaaggagtgaggatgagcagagatgggggaaaggacctggccaagacagagggaagaaggggagccaggacagcggggctccgggggaggccatggagagactgggaagagcgcagaggtgtgacgacagtccagcacccagaaaagagcgactggcaaacaaggaccggccagccttgcagctgtatgatccaggagctcgcttccgagcgcgagagtgtggcggaaacaggaggatctgcaaggcagaaggttcggggactggtcctgagaagagggaagaggcagagtgagtcactgcacgcacctggcctccatggacgagcaagggcatcccagaaacgtgtaaatgaccccgagtgtgactgggaaggagaacttattccttaccaggaaactggaagctaaaaatacagagggtgacgtagaaacacgcagaaaccattctaaagaaagtagtgatcttgtattaaattgagcagaattctcacagattttaccattcctgttataaactagtatttgttgtttagccaaaacagaaaatgatttccactggacagtagaaaaatatgtgtaaaatagggaagaaagttagtattggatcagtgtgagtcctgaagcactttcagtgctgtgagaacgacatccactttgggtttcattcgtttgtaagcagaggagctgtcagtcactcgtgcttctcggtggcctctgagccatggtgtcgagtgaagagtagttcttgtttgttacaacctttgtgagtcagccatgcccgcaaagcgtgctgtgttttagtcctggtaggaatatttatcagagttcacactatataaaacccaacagcttcaactattgccctttcaacagttttgccactgaccggatagaaacggtttcagtctctggatggatgtgtttgtggtttgtaaccattacggtttaaaccatggtttaagaatttgcccaaataacagaaattttgttcgggaagggataaactagatatagcatacagagcctgtttttgagttttagatactttatttgtaaataacttaaaatagctttctgaaaccgtgcattctgtagtttcttcctttcagtgaaattgctaaatgtcaatgtatttttggcactgcgattttaaccatttattaaataaaaattttgttaaagaa

SEQ ID NO: 420984 - DNA, 3392 bp, Homo sapiens
ctttgttgtcgttgttttgttttttagagatggggtctcactatgttgcccaggctggtgtcaaactcctgagctcaagcgattccccccacattggcctcccaaagtgctgggctacaggcgtgagccgctgccctgccgttgtttttatggtctctggcctaagcctgtgcttttgatgtcatatgcaacccattgccaaatccattgccatggagcttttcccctgtgtttttttccaagtgttttatggtttcaggtcttatatttaggtttgatccatatcgagttactttttgtatatggtgttaggtaagggtccagcttcattcttctggctgtggatatccagttttcccagcaccagttgttgaaaagactttcttttccccattgaatggtctgggcacccttttcaaaaatcagttgaccaagtattacaaaggtttatttctgtgctctctattttattcccttggtggatgtgtctgtctacatggcagtaccacactgattactttcagctttggaatcagggagtatgtcatctgccattgaatgagtatccactgtgtgctaggccttgtgggtggagcggtgacttggacatcgtccctgctggtccagtgccctgccgtccccctgagtcttgactttattctggatagtggaggttggcacaaaaatatctcccagttaaaggaattataattcagtcacctgactattactgacaagtcaaaaaaaaatgactcagtgggtttagtaccaaggtagcagtgttccatttgatgattcagcatatagcaggttctcttagtgaacatttctctttgtgtatttgtttttcccccacatagcaacgaagttagtttctaatgacttccattctctacttttatcagaagcagatttcacctggaatattctataaaccctttgaaaccctctattttagccatggtgtcttctaagcaaagtaattttcttgaacttaaataacaaattgatagttgaattaaccttttaaaataaaatgtaaagtgtagctaagaaatcattatttaaaggtattccaacgataaattatttgggatggggctggggaggtcaggtatattgaggtgtaagttacatatggtaaaagtcacccttttaaagtgaacaatttgatgaattttgaacaacttcagttatgcaaccaccacaacatgatggattgttttagtaaatgttcttcttaccaggagttcatccttgtttaagtctggagtttgccgtgttaaggttgcaggtgcttgaaagtgtaataaaattgtaggttttttaatcttttttttaatctcttactggaaggatgaattatagtttaaatagtaataatgcattgtcgttgttacacttactctttaagtaagttaggtcattattttccgaaatgaatgtagtagaatttcagaatggcttctggaacatgtttcctgttaaaaggcctagaatatcctgcagtggtagagtttgctccattccagaagatagccaaaaagaagctgagaaaaaaagatgccaagactggaagcatcgaagatgatccagaatataagaagtttttagaaacctactgtgtggaggaagagaagaccagtgccaaccctgagactctgctgggggagatggaggcgaagacaagagagctcattgctagaagaaccacacctcttttggaatatattaaaaatagaaaattagaaaagcagagaattcgagaagagaagcgagaagaacggaggaggagagagttagaaaagaaacgtttgcgggaagaggaaaaaagaagaagaagagaagaagaaagatgcaaaaaaaaagagacagataaacagaagaaaattgcagagaaagaagtaaggattaagcttcttaagaaaccagaaaagggagaggaaccaaccacagagaaaccaaaagaaagaggagaggagattgatactggaggtggcaagcaggaatcctgtgcccccggtgcagtcgtaaaagccaggcccatggaaggctcgctggaggagccccaggagacgtcacacagcggcagtgataaagagcacagggatgtggagagatctcaagaacaagaatctgaagcacaaagataccatgtggatgacggcaggaggcacagagctcaccacgagcctgaacggctttccagaaggagtgaggatgagcagagatgggggaaaggacctggccaagacagagggaagaaggggagccaggacagcggggctccgggggaggccatggagagactgggaagagcgcagaggtgtgacgacagtccagcacccagaaaagagcgactggcaaacaaggaccggccagccttgcagctgtatgatccaggagctcgcttccgagcgcgagagtgtggcggaaacaggaggatctgcaaggcagaaggttcggggactggtcctgagaagagggaagaggcagagtgagtcactgcacgcacctggcctccatggacgagcaagggcatcccagaaacgtgtaaatgaccccgagtgtgactgggaaggagaacttattccttaccaggaaactggaagctaaaaatacagagggtgacgtagaaacacgcagaaaccattctaaagaaagtagtgatcttgtattaaattgagcagaattctcacagattttaccattcctgttataaactagtatttgttgtttagccaaaacagaaaatgatttccactggacagtagaaaaatatgtgtaaaatagggaagaaagttagtattggatcagtgtgagtcctgaagcactttcagtgctgtgagaacgacatccactttgggtttcattcgtttgtaagcagaggagctgtcagtcactcgtgcttctcggtggcctctgagccatggtgtcgagtgaagagtagttcttgtttgttacaacctttgtgagtcagccatgcccgcaaagcgtgctgtgttttagtcctggtaggaatatttatcagagttcacactatataaaacccaacagcttcaactattgccctttcaacagttttgccactgaccggatagaaacggtttcagtctctggatggatgtgtttgtggtttgtaaccattacggtttaaaccatggtttaagaatttgcccaaataacagaaattttgttcgggaagggataaactagatatagcatacagagcctgtttttgagttttagatactttatttgtaaataacttaaaatagctttctgaaaccgtgcattctgtagtttcttcctttcagtgaaattgctaaatgtcaatgtatttttggcactgcgattttaaccatttattaaataaaaattttgttaaagaa

SEQ ID NO: 420985 - DNA, 2076 bp, Homo sapiens
aaaagaggctaaattaatggactattgtatttttcactgaccattttcactgttatctcttatttcagtctttatcctcatctctactcaagagcatacattaattttaggaatcctgatgacatccttctttttagagatcgttttgatggatatatcttccttgacagcaaaggcctagaatatcctgcagtggtagagtttgctccattccagaagatagccaaaaagaagctgagaaaaaaagatgccaagactggaagcatcgaagatgatccagaatataagaagtttttagaaacctactgtgtggaggaagagaagaccagtgccaaccctgagactctgctgggggagatggaggcgaagacaagagagctcattgctagaagaaccacacctcttttggaatatattaaaaatagaaaattagaaaagcagagaattcgagaagagaagcgagaagaacggaggaggagagagttagaaaagaaacgtttgcgggaagaggaaaaaagaagaagaagagaagaagaaagatgcaaaaaaaaagagacagataaacagaagaaaattgcagagaaagaagtaaggattaagcttcttaagaaaccagaaaagggagaggaaccaaccacagagaaaccaaaagaaagaggagaggagattgatactggaggtggcaagcaggaatcctgtgcccccggtgcagtcgtaaaagccaggcccatggaaggctcgctggaggagccccaggagacgtcacacagcggcagtgataaagagcacagggatgtggagagatctcaagaacaagaatctgaagcacaaagataccatgtggatgacggcaggaggcacagagctcaccacgagcctgaacggctttccagaaggagtgaggatgagcagagatgggggaaaggacctggccaagacagagggaagaaggggagccaggacagcggggctccgggggaggccatggagagactgggaagagcgcagaggtgtgacgacagtccagcacccagaaaagagcgactggcaaacaaggaccggccagccttgcagctgtatgatccaggagctcgcttccgagcgcgagagtgtggcggaaacaggaggatctgcaaggcagaaggttcggggactggtcctgagaagagggaagaggcagagtgagtcactgcacgcacctggcctccatggacgagcaagggcatcccagaaacgtgtaaatgaccccgagtgtgactgggaaggagaacttattccttaccaggaaactggaagctaaaaatacagagggtgacgtagaaacacgcagaaaccattctaaagaaagtagtgatcttgtattaaattgagcagaattctcacagattttaccattcctgttataaactagtatttgttgtttagccaaaacagaaaatgatttccactggacagtagaaaaatatgtgtaaaatagggaagaaagttagtattggatcagtgtgagtcctgaagcactttcagtgctgtgagaacgacatccactttgggtttcattcgtttgtaagcagaggagctgtcagtcactcgtgcttctcggtggcctctgagccatggtgtcgagtgaagagtagttcttgtttgttacaacctttgtgagtcagccatgcccgcaaagcgtgctgtgttttagtcctggtaggaatatttatcagagttcacactatataaaacccaacagcttcaactattgccctttcaacagttttgccactgaccggatagaaacggtttcagtctctggatggatgtgtttgtggtttgtaaccattacggtttaaaccatggtttaagaatttgcccaaataacagaaattttgttcgggaagggataaactagatatagcatacagagcctgtttttgagttttagatactttatttgtaaataacttaaaatagctttctgaaaccgtgcattctgtagtttcttcctttcagtgaaattgctaaatgtcaatgtatttttggcactgcgattttaaccatttattaaataaaaattttgttaaagaa

SEQ ID NO: 420986 - DNA, 2112 bp, Homo sapiens
ggggcgggggccgggcctcccagcgcggtacgcggtgccttttgagctccttgtccacgctccgccccggtgggaacggccgcgcgctccccgcaggtggtcatccgccgcctgcctccgggcctcaccaaggagcagctggaggagcagctgcgcccgctgccagcacacgactacttcgagttcttcgccgccgacctgagtctttatcctcatctctactcaagagcatacattaattttaggaatcctgatgacatccttctttttagagatcgttttgatggatatatcttccttgacagcaaagatccagaatataagaagtttttagaaacctactgtgtggaggaagagaagaccagtgccaaccctgagactctgctgggggagatggaggcgaagacaagagagctcattgctagaagaaccacacctcttttggaatatattaaaaatagaaaattagaaaagcagagaattcgagaagagaagcgagaagaacggaggaggagagagttagaaaagaaacgtttgcgggaagaggaaaaaagaagaagaagagaagaagaaagatgcaaaaaaaaagagacagataaacagaagaaaattgcagagaaagaagtaaggattaagcttcttaagaaaccagaaaagggagaggaaccaaccacagagaaaccaaaagaaagaggagaggagattgatactggaggtggcaagcaggaatcctgtgcccccggtgcagtcgtaaaagccaggcccatggaaggctcgctggaggagccccaggagacgtcacacagcggcagtgataaagagcacagggatgtggagagatctcaagaacaagaatctgaagcacaaagataccatgtggatgacggcaggaggcacagagctcaccacgagcctgaacggctttccagaaggagtgaggatgagcagagatgggggaaaggacctggccaagacagagggaagaaggggagccaggacagcggggctccgggggaggccatggagagactgggaagagcgcagaggtgtgacgacagtccagcacccagaaaagagcgactggcaaacaaggaccggccagccttgcagctgtatgatccaggagctcgcttccgagcgcgagagtgtggcggaaacaggaggatctgcaaggcagaaggttcggggactggtcctgagaagagggaagaggcagagtgagtcactgcacgcacctggcctccatggacgagcaagggcatcccagaaacgtgtaaatgaccccgagtgtgactgggaaggagaacttattccttaccaggaaactggaagctaaaaatacagagggtgacgtagaaacacgcagaaaccattctaaagaaagtagtgatcttgtattaaattgagcagaattctcacagattttaccattcctgttataaactagtatttgttgtttagccaaaacagaaaatgatttccactggacagtagaaaaatatgtgtaaaatagggaagaaagttagtattggatcagtgtgagtcctgaagcactttcagtgctgtgagaacgacatccactttgggtttcattcgtttgtaagcagaggagctgtcagtcactcgtgcttctcggtggcctctgagccatggtgtcgagtgaagagtagttcttgtttgttacaacctttgtgagtcagccatgcccgcaaagcgtgctgtgttttagtcctggtaggaatatttatcagagttcacactatataaaacccaacagcttcaactattgccctttcaacagttttgccactgaccggatagaaacggtttcagtctctggatggatgtgtttgtggtttgtaaccattacggtttaaaccatggtttaagaatttgcccaaataacagaaattttgttcgggaagggataaactagatatagcatacagagcctgtttttgagttttagatactttatttgtaaataacttaaaatagctttctgaaaccgtgcattctgtagtttcttcctttcagtgaaattgctaaatgtcaatgtatttttggcactgcgattttaaccatttattaaataaaaattttgttaaagaa

SEQ ID NO: 420987 - DNA, 2001 bp, Homo sapiens
ggggcgggggccgggcctcccagcgcggtacgcggtgccttttgagctccttgtccacgctccgccccggtgggaacggccgcgcgctccccgcaggtggtcatccgccgcctgcctccgggcctcaccaaggagcagctggaggagcagctgcgcccgctgccagcacacgactacttcgagttcttcgccgccgacctgagtctttatcctcatctctactcaagagcatacattaattttaggaatcctgatgacatccttctttttagagatcgttttgatggatatatcttccttgacagcaaagctagaagaaccacacctcttttggaatatattaaaaatagaaaattagaaaagcagagaattcgagaagagaagcgagaagaacggaggaggagagagttagaaaagaaacgtttgcgggaagaggaaaaaagaagaagaagagaagaagaaagatgcaaaaaaaaagagacagataaacagaagaaaattgcagagaaagaagtaaggattaagcttcttaagaaaccagaaaagggagaggaaccaaccacagagaaaccaaaagaaagaggagaggagattgatactggaggtggcaagcaggaatcctgtgcccccggtgcagtcgtaaaagccaggcccatggaaggctcgctggaggagccccaggagacgtcacacagcggcagtgataaagagcacagggatgtggagagatctcaagaacaagaatctgaagcacaaagataccatgtggatgacggcaggaggcacagagctcaccacgagcctgaacggctttccagaaggagtgaggatgagcagagatgggggaaaggacctggccaagacagagggaagaaggggagccaggacagcggggctccgggggaggccatggagagactgggaagagcgcagaggtgtgacgacagtccagcacccagaaaagagcgactggcaaacaaggaccggccagccttgcagctgtatgatccaggagctcgcttccgagcgcgagagtgtggcggaaacaggaggatctgcaaggcagaaggttcggggactggtcctgagaagagggaagaggcagagtgagtcactgcacgcacctggcctccatggacgagcaagggcatcccagaaacgtgtaaatgaccccgagtgtgactgggaaggagaacttattccttaccaggaaactggaagctaaaaatacagagggtgacgtagaaacacgcagaaaccattctaaagaaagtagtgatcttgtattaaattgagcagaattctcacagattttaccattcctgttataaactagtatttgttgtttagccaaaacagaaaatgatttccactggacagtagaaaaatatgtgtaaaatagggaagaaagttagtattggatcagtgtgagtcctgaagcactttcagtgctgtgagaacgacatccactttgggtttcattcgtttgtaagcagaggagctgtcagtcactcgtgcttctcggtggcctctgagccatggtgtcgagtgaagagtagttcttgtttgttacaacctttgtgagtcagccatgcccgcaaagcgtgctgtgttttagtcctggtaggaatatttatcagagttcacactatataaaacccaacagcttcaactattgccctttcaacagttttgccactgaccggatagaaacggtttcagtctctggatggatgtgtttgtggtttgtaaccattacggtttaaaccatggtttaagaatttgcccaaataacagaaattttgttcgggaagggataaactagatatagcatacagagcctgtttttgagttttagatactttatttgtaaataacttaaaatagctttctgaaaccgtgcattctgtagtttcttcctttcagtgaaattgctaaatgtcaatgtatttttggcactgcgattttaaccatttattaaataaaaattttgttaaagaa

SEQ ID NO: 420988 - DNA, 3347 bp, Homo sapiens
ctttgttgtcgttgttttgttttttagagatggggtctcactatgttgcccaggctggtgtcaaactcctgagctcaagcgattccccccacattggcctcccaaagtgctgggctacaggcgtgagccgctgccctgccgttgtttttatggtctctggcctaagcctgtgcttttgatgtcatatgcaacccattgccaaatccattgccatggagcttttcccctgtgtttttttccaagtgttttatggtttcaggtcttatatttaggtttgatccatatcgagttactttttgtatatggtgttaggtaagggtccagcttcattcttctggctgtggatatccagttttcccagcaccagttgttgaaaagactttcttttccccattgaatggtctgggcacccttttcaaaaatcagttgaccaagtattacaaaggtttatttctgtgctctctattttattcccttggtggatgtgtctgtctacatggcagtaccacactgattactttcagctttggaatcagggagtatgtcatctgccattgaatgagtatccactgtgtgctaggccttgtgggtggagcggtgacttggacatcgtccctgctggtccagtgccctgccgtccccctgagtcttgactttattctggatagtggaggttggcacaaaaatatctcccagttaaaggaattataattcagtcacctgactattactgacaagtcaaaaaaaaatgactcagtgggtttagtaccaaggtagcagtgttccatttgatgattcagcatatagcaggttctcttagtgaacatttctctttgtgtatttgtttttcccccacatagcaacgaagttagtttctaatgacttccattctctacttttatcagaagcagatttcacctggaatattctataaaccctttgaaaccctctattttagccatggtgtcttctaagcaaagtaattttcttgaacttaaataacaaattgatagttgaattaaccttttaaaataaaatgtaaagtgtagctaagaaatcattatttaaaggtattccaacgataaattatttgggatggggctggggaggtcaggtatattgaggtgtaagttacatatggtaaaagtcacccttttaaagtgaacaatttgatgaattttgaacaacttcagttatgcaaccaccacaacatgatggattgttttagtaaatgttcttcttaccaggagttcatccttgtttaagtctggagtttgccgtgttaaggttgcaggtgcttgaaagtgtaataaaattgtaggttttttaatcttttttttaatctcttactggaaggatgaattatagtttaaatagtaataatgcattgtcgttgttacacttactctttaagtaagttaggtcattattttccgaaatgaatgtagtagaatttcagaatggcttctggaacatgtttcctgttaaaaggcctagaatatcctgcagtggtagagtttgctccattccagaagatagccaaaaagaagctgagaaaaaaagatgccaagactggaagcatcgaagatgatccagaatataagaagtttttagaaacctactgtgtggaggaagagaagaccagtgccaaccctgagactctgctgggggagatggaggcgaagacaagagagctcattgctagaagaaccacacctcttttggaatatattaaaaatagaaaattagaaaagcagagaattcgagaagagaagcgagaagaacggaggaggagagagttagaaaagaaacgtttgcgggaagaggaaaaaagaagaagaagagaagaagaaagatgcaaaaaaaaagagacagataaacagaagaaaattgcagagaaagaagtaaggattaagcttcttaagaaaccagaaaagggagaggaaccaaccacagagaaaccaaaagaaagaggagaggagattgatactggaggtggcaagcaggaatcctgtgcccccggtgcagtcgtgtcacacagcggcagtgataaagagcacagggatgtggagagatctcaagaacaagaatctgaagcacaaagataccatgtggatgacggcaggaggcacagagctcaccacgagcctgaacggctttccagaaggagtgaggatgagcagagatgggggaaaggacctggccaagacagagggaagaaggggagccaggacagcggggctccgggggaggccatggagagactgggaagagcgcagaggtgtgacgacagtccagcacccagaaaagagcgactggcaaacaaggaccggccagccttgcagctgtatgatccaggagctcgcttccgagcgcgagagtgtggcggaaacaggaggatctgcaaggcagaaggttcggggactggtcctgagaagagggaagaggcagagtgagtcactgcacgcacctggcctccatggacgagcaagggcatcccagaaacgtgtaaatgaccccgagtgtgactgggaaggagaacttattccttaccaggaaactggaagctaaaaatacagagggtgacgtagaaacacgcagaaaccattctaaagaaagtagtgatcttgtattaaattgagcagaattctcacagattttaccattcctgttataaactagtatttgttgtttagccaaaacagaaaatgatttccactggacagtagaaaaatatgtgtaaaatagggaagaaagttagtattggatcagtgtgagtcctgaagcactttcagtgctgtgagaacgacatccactttgggtttcattcgtttgtaagcagaggagctgtcagtcactcgtgcttctcggtggcctctgagccatggtgtcgagtgaagagtagttcttgtttgttacaacctttgtgagtcagccatgcccgcaaagcgtgctgtgttttagtcctggtaggaatatttatcagagttcacactatataaaacccaacagcttcaactattgccctttcaacagttttgccactgaccggatagaaacggtttcagtctctggatggatgtgtttgtggtttgtaaccattacggtttaaaccatggtttaagaatttgcccaaataacagaaattttgttcgggaagggataaactagatatagcatacagagcctgtttttgagttttagatactttatttgtaaataacttaaaatagctttctgaaaccgtgcattctgtagtttcttcctttcagtgaaattgctaaatgtcaatgtatttttggcactgcgattttaaccatttattaaataaaaattttgttaaagaa

SEQ ID NO: 420989 - DNA, 2238 bp, Homo sapiens
ggggcgggggccgggcctcccagcgcggtacgcggtgccttttgagctccttgtccacgctccgccccggtgggaacggccgcgcgctccccgcaggtggtcatccgccgcctgcctccgggcctcaccaaggagcagctggaggagcagctgcgcccgctgccagcacacgactacttcgagttcttcgccgccgacctgagtctttatcctcatctctactcaagagcatacattaattttaggaatcctgatgacatccttctttttagagatcgttttgatggatatatcttccttgacagcaaaggcctagaatatcctgcagtggtagagtttgctccattccagaagatagccaaaaagaagctgagaaaaaaagatgccaagactggaagcatcgaagatgatccagaatataagaagtttttagaaacctactgtgtggaggaagagaagaccagtgccaaccctgagactctgctgggggagatggaggcgaagacaagagagctcattgctagaagaaccacacctcttttggaatatattaaaaatagaaaattagaaaagcagagaattcgagaagagaagcgagaagaacggaggaggagagagttagaaaagaaacgtttgcgggaagaggaaaaaagaagaagaagagaagaagaaagatgcaaaaaaaaagagacagataaacagaagaaaattgcagagaaagaagtaaggattaagcttcttaagaaaccagaaaagggagaggaaccaaccacagagaaaccaaaagaaagaggagaggagattgatactggaggtggcaagcaggaatcctgtgcccccggtgcagtcgtaaaagccaggcccatggaaggctcgctggaggagccccaggagacgtcacacagcggcagtgataaagagcacagggatgtggagagatctcaagaacaagaatctgaagcacaaagataccatgtggatgacggcaggaggcacagagctcaccacgagcctgaacggctttccagaaggagtgaggatgagcagagatgggggaaaggacctggccaagacagagggaagaaggggagccaggacagcggggctccgggggaggccatggagagactgggaagagcgcagaggtgtgacgacagtccagcacccagaaaagagcgactggcaaacaagggtttttattaaacccaaaaagaaaaatgtgtctggctgtcttaaggtccaggctgcatgctgaccatgtcacccccacttggccttgtgtcttggggaacgcagtgctttgagcattttcaagagcagtttttcctgaaagtcagatcccagagtgagactagtcatcatcttttctcagataatcaaattatttttcaccaggaaaaagaaagattttatttagtataaaactagcacgtttatatgattcacttgagaataagattattaaatttacccttgagacaggaaggaaagttttaatgatatttcatggaggtttcttccacattattaacaacattctgattattggtgaatattcccatggctcacaaacacctgtaagttagatctgcacggacggtgagcacaggactgtggttacccccttagccaagcaaacaacttttttttttcaggagctaatttttgttcaggttgcattttcccagcgcagcactacagatggcatcacctttctgacagcaccaggccccaccctggcctcctagcaaactgagggctgcctagggttccagttcccactcacctccctccccatgtctaacccctggcagccactgtctgttctctgcctctgtgattttgtcatttcaagaatgcttgataaatggaaacacacagtatgtgagctttgagagtggctttcttcactcagtctaattcctttcagatccttccaggttgttgtgtgtatgaacgatgttcactttgaaactgtttcagtgtagctgggcatggtggctcacacctataatcccagcactttgggaggctgaggcgggtggatcacctgaggtcaggagttcgagaccagcctggccaacatggcgaaaccctgtctctactaaaaatacaaaaaatagctgggcgtggtggcgcgcctgtaatcccagctactcaggaggctgaggcaggagaattgcttgaacctgggaggcggaggttgcagtgagccaagatgatgccattgcactccag

SEQ ID NO: 420990 - DNA, 1663 bp, Homo sapiens
agctctcgcgaggtttcgtcgggggctggcggctgcggctcggcggagagtgcggcatgcgctcggaaaaggagggggccggaggccttcgggcggccgttgccgcgcggggcccgagcgggagggagaagctgtcggccctagaagtgcagttccaccgcgactcgcagcagcaggaggctgagacgccgccaacttcgtcctccggttgcgggggcggtgcgggcaaacctcgcgaggagaagaggacggccctgagcaaggtggtcatccgccgcctgcctccgggcctcaccaaggagcagctggaggagcagctgcgcccgctgccagcacacgactacttcgagttcttcgccgccgacctgagtctttatcctcatctctactcaagagcatacattaattttaggaatcctgatgacatccttctttttagagatcgttttgatggatatatcttccttgacagcaaaggcctagaatatcctgcagtggtagagtttgctccattccagaagatagccaaaaagaagctgagaaaaaaagatgccaagactggaagcatcgaagatgatccagaatataagaagtttttagaaacctactgtgtggaggaagagaagaccagtgccaaccctgagactctgctgggggagatggaggcgaagacaagagagctcattggtctgttttgctcatttcttctcttttctttattgagagatttactcgtagaggatatacgttttttctctttttcttgactgtgataacaagttgaaacttgttacaggcttgacagaaatgtagagtgatttccagttttgacaaaagaatggcaagatggcagcatgggaaaatatttctgagcgttggttgatggagagcacgtgatttttttagttaagatcattttaagttatgatgcttccgaatgagcagtgcagaagacacatgaatggtctgttcctgagcgtcagggaaggcatgttgtgtcacatagttgaagtcagtggtcacagacggatgcctcaagagcccataggaatgagatgttttgcttgcggtgaggtcatcttgctgcttcaacacaaatgccaggctccccgagccaggccaacttgtggataagcccagccagagcacagaatcgagtttaaatccagccttccaccccatgcccacaagtggtgtactttagaaatagttacttcccagtagcaccaacatgaaaatcaggcaaactgttgttgtttagtcccagacacacctggtagtgtttctcttctctgtggatctcctttcctcaaagccctggttcttcacctctcatctctcccgcccaggctgtgccctgcccacccatcaagatggatgtactttgggaggccagggtgggcggatcacaaggtcaggacttcgagatcagcctggccgacatggtgaaaccccatctctactaaagatacaaaaaattagcagggcatggtggtgcgtgcctatagttccagctactgaggaggctgaggcaggagaatcgcttgaacccagaaggcggaggttgcagtgagctgagatcgcaccactgcactccagcctggtgacagagcgagactccatctcaaaaaaccaataaaattgatgtgacatgacagccaca

SEQ ID NO: 420991 - DNA, 754 bp, Homo sapiens
gttgcattcagggaatgataatttgatttcctactgttgcacctgttctttctaatgtaggaatactagatctgaggaataggaaagccagtaccagtccagttttattctgattaggagtgcttttattataaaagcagcacattagagagctctagggtttttcagtgttgaaatcctgtagtcacattactttaggaagaggtgagtgatcttaggaaatgtggaaacatgacagggcatacctgaaacacactaagtctgtactttgggaagggcagaagttaagaattaatctaactactactccaactgtcttaggtactgaagaagacctggaattttatgtcaggaagtgtggtgatattcttggagtaaccagtaaactaccaaaggaccaacaggatgccaaacatatccttgagcacgtcttcttccaagtggtggagttcaagaaattgaaccaggaacatgacatcgatacaagtgaaacagcattccagaacaatttctgaagaccatgcctcttgaagctttttctgcctcctgattctctctttgtaaactattttcaaattgtttttcaactccttatcaaaattgtttatacactctttcctccatgagctctggaaggtatatgcatcttctgtaatactcagataggtataagatttttcacaaaatccttatgtaagatacattccatttttaaaaattaaatgtatggttgcatctgtctttttatacccta

SEQ ID NO: 420992 - DNA, 1683 bp, Homo sapiens
agcgctgcgtcctgggccacgcctcccggcgcaccgacgcgcctctccggttactaagcggccttggatacctggccgcgggatgctgggcggcgtcaggtgagcggtggtcgctgggcctcaggtaaccatggagaaagagctgcggagcaccattcttttcaatgcctacaaaaaggagatatttaccaccaacaatggctacaaatccatgcagaaaaaacttcggagtaattggaagattcagagcttaaaagatgaaatcacatctgagaagttaaatggagtaaaactgtggattacagctgggccaagggaaaaatttactgcagctgagtttgaaatcctgaagaaatatcttgacactggtggagatgtctttgtgatgctaggagaaggtggagaatccagatttgacaccaatattaactttttactagaagaatatggaatcatggttaataatgatgctgtggttagaaatgtatatcacaaatatttccatcctaaagaagctctagtttccagtggagtcttgaacagggaaattagccgagctgcaggaaaggctgtgcctgggatcattgatgaggaaagcagtggaaacaatgcccaggctctcacctttgtgtatccttttggtgccacattgagtgtcatgaaaccagcagtggcggttctgtctacaggttctgtctgcttcccacttaacagacccattttggctttctatcactcaaagaaccaaggtgggaagctggcagtgcttggttcatgtcacatgttcagtgatcaatatttggacaaagaagaaaacagcaaaatcatggatgttgttttccagtggctcacgacaggagacatccacctaaaccagattgatgctgaggacccagagatttctgactacatgatgctgccctacacagccaccctatcaaagcggaatcgagagtgtctccaggagagtgatgagatcccaagggactttaccaccctcttcgacctgtccatcttccagctggataccacctccttccacagcgtcatcgaggctcacgagcagctaaatgtgaaacatgaaccactccagctcatccagcctcagtttgagacgccgctgccaacccttcagcctgcggtttttcctcccagtttccgggagttaccacctcctcctctggagctatttgatttagatgaaacgttctcctctgagaaggcacggctggctcagattaccaataagtgtactgaagaagacctggaattttatgtcaggaagtgtggtgatattcttggagtaaccagtaaactaccaaaggaccaacaggatgccaaacatatccttgagcacgtcttcttccaagtggtggagttcaagaaattgaaccaggaacatgacatcgatacaagtgaaacagcattccagaacaatttctgaagaccatgcctcttgaagctttttctgcctcctgattctctctttgtaaactattttcaaattgtttttcaactccttatcaaaattgtttatacactctttcctccatgagctctggaaggtatatgcatcttctgtaatactcagataggtataagatttttcacaaaatccttatgtaagatacattccatttttaaaaattaaatgtatggttgcatctgtctttttatacccta

SEQ ID NO: 420993 - DNA, 1646 bp, Homo sapiens
agcgctgcgtcctgggccacgcctcccggcgcaccgacgcgcctctccggttactaagcggccttggatacctggccgcgggatgctgggcggcgtcaggtgagcggtggtcgctgggcctcaggtaaccatggagaaagagctgcggagcaccattcttttcaatgcctacaaaaaggagatatttaccaccaacaatggctacaaatccatgcagaaaaaacttcggagtaattggaagattcagagcttaaaagatgaaatcacatctgagaagttaaatggagtaaaactgtggattacagctgggccaagggaaaaatttactgcagctgagatgtctttgtgatgctaggagaaggtggagaatccagatttgacaccaatattaactttttactagaagaatatggaatcatggttaataatgatgctgtggttagaaatgtatatcacaaatatttccatcctaaagaagctctagtttccagtggagtcttgaacagggaaattagccgagctgcaggaaaggctgtgcctgggatcattgatgaggaaagcagtggaaacaatgcccaggctctcacctttgtgtatccttttggtgccacattgagtgtcatgaaaccagcagtggcggttctgtctacaggttctgtctgcttcccacttaacagacccattttggctttctatcactcaaagaaccaaggtgggaagctggcagtgcttggttcatgtcacatgttcagtgatcaatatttggacaaagaagaaaacagcaaaatcatggatgttgttttccagtggctcacgacaggagacatccacctaaaccagattgatgctgaggacccagagatttctgactacatgatgctgccctacacagccaccctatcaaagcggaatcgagagtgtctccaggagagtgatgagatcccaagggactttaccaccctcttcgacctgtccatcttccagctggataccacctccttccacagcgtcatcgaggctcacgagcagctaaatgtgaaacatgaaccactccagctcatccagcctcagtttgagacgccgctgccaacccttcagcctgcggtttttcctcccagtttccgggagttaccacctcctcctctggagctatttgatttagatgaaacgttctcctctgagaaggcacggctggctcagattaccaataagtgtactgaagaagacctggaattttatgtcaggaagtgtggtgatattcttggagtaaccagtaaactaccaaaggaccaacaggatgccaaacatatccttgagcacgtcttcttccaagtggtggagttcaagaaattgaaccaggaacatgacatcgatacaagtgaaacagcattccagaacaatttctgaagaccatgcctcttgaagctttttctgcctcctgattctctctttgtaaactattttcaaattgtttttcaactccttatcaaaattgtttatacactctttcctccatgagctctggaaggtatatgcatcttctgtaatactcagataggtataagatttttcacaaaatccttatgtaagatacattccatttttaaaaattaaatgtatggttgcatctgtctttttatacccta

SEQ ID NO: 420994 - DNA, 1801 bp, Homo sapiens
agcgctgcgtcctgggccacgcctcccggcgcaccgacgcgcctctccggttactaagcggccttggatacctggccgcgggatgctgggcggcgtcaggtaaccatggagaaagagctgcggagcaccattcttttcaatgcctacaaaaaggagatatttaccaccaacaatggctacaaatccatgcagaaaaaacttcggagtaattggaagattcagagcttaaaagatgaaatcacatctgagaagttaaatggagtaaaactgtggattacagctgggccaagggaaaaatttactgcagctgagtttgaaatcctgaagaaatatcttgacactggtggagatgtctttgtgatgctaggagaaggtggagaatccagatttgacaccaatattaactttttactagaagaatatggaatcatggttaataatgatgctgtggttagaaatgtatatcacaaatatttccatcctaaagaagctctagtttccagtggagtcttgaacagggaaattagccgagctgcaggaaaggctgtgcctgggatcattgatgaggaaagcagtggaaacaatgcccagtgagtgtgttttctgatgccacatgaggaagatgtatcattttggagtcttctttttcaaaatgaaaagagcttttgtttctggttacaaaaataatcagaatttgaacagttcaagaggaaaaaagtagaagctctgcactggctctcacctttgtgtatccttttggtgccacattgagtgtcatgaaaccagcagtggcggttctgtctacaggttctgtctgcttcccacttaacagacccattttggctttctatcactcaaagaaccaaggtgggaagctggcagtgcttggttcatgtcacatgttcagtgatcaatatttggacaaagaagaaaacagcaaaatcatggatgttgttttccagtggctcacgacaggagacatccacctaaaccagattgatgctgaggacccagagatttctgactacatgatgctgccctacacagccaccctatcaaagcggaatcgagagtgtctccaggagagtgatgagatcccaagggactttaccaccctcttcgacctgtccatcttccagctggataccacctccttccacagcgtcatcgaggctcacgagcagctaaatgtgaaacatgaaccactccagctcatccagcctcagtttgagacgccgctgccaacccttcagcctgcggtttttcctcccagtttccgggagttaccacctcctcctctggagctatttgatttagatgaaacgttctcctctgagaaggcacggctggctcagattaccaataagtgtactgaagaagacctggaattttatgtcaggaagtgtggtgatattcttggagtaaccagtaaactaccaaaggaccaacaggatgccaaacatatccttgagcacgtcttcttccaagtggtggagttcaagaaattgaaccaggaacatgacatcgatacaagtgaaacagcattccagaacaatttctgaagaccatgcctcttgaagctttttctgcctcctgattctctctttgtaaactattttcaaattgtttttcaactccttatcaaaattgtttatacactctttcctccatgagctctggaaggtatatgcatcttctgtaatactcagataggtataagatttttcacaaaatccttatgtaagatacattccatttttaaaaattaaatgtatggttgcatctgtctttttatacccta

SEQ ID NO: 420995 - DNA, 1049 bp, Homo sapiens
agcgctgcgtcctgggccacgcctcccggcgcaccgacgcgcctctccggttactaagcggccttggatacctggccgcgggatgctgggcggcgtcaggtgagcggtggtcgctgggcctcaggtaaccatggagaaagagctgcggagcaccattcttttcaatgcctacaaaaaggagatatttaccaccaacaatggctacaaatccatgcagaaaaaacttcggagtaattggaagattcagagcttaaaagatgaaatcacatctgagaagttaaatggagtaaaactgtggattacagctgggccaagggaaaaatttactgcagctgagtttgaaatcctgaagaaatatcttgacactggtggagatgtctttgtgatgctaggagaaggtggagaatccagatttgacaccaatattaactttttactagaagaatatggaatcatggttaataatgatgctgtggttagaaatgtatatcacaaatatttccatcctaaagaagctctagtttccagtggagtcttgaacagggaaattagccgagctgcaggaaaggctgtgcctgggatcattgatgaggaaagcagtggaaacaatgcccaggctctcacctttgtgtatccttttggtgccacattgagtgtcatgaaaccagcagtggcggttctgtctacaggttctgtctgcttcccacttaacagacccattttggctttctatcactcaaagaaccaaggtgggaagctggcagtgcttggttcatgtcacatgttcagtgatcaatatttggacaaagaagaaaacagcaaaatcatggatgttgttttccagtggctcacgacaggagacatccacctaaaccagattgatgctgaggacccagaggtagacaccgaattattagaaacttttaaatgaaaaatgagtccagcttctcagtaccacttctcacagctcaaaaggaatacatgactgtcttaactcatctgtaagacagatggaacgaaggaatgatttgggggagatgaaggccata

SEQ ID NO: 420996 - DNA, 333 bp, Homo sapiens
gtagagacggggtttcaccatgttggccaggctggttttgaactctcaacctcaggtgatccgcctgcctcggcctcccaaagtgctgggattacaggctgatccactgcgcctggcctatagttggtatttctaaactttaaaatctgggtgtgaattggcactcttcagtatataagacagttgctagcatgattctaataagtgtctgggtactaggatacatgagatgcactttcggatttgagtatctgaccctgctttgtcatcaatagaaccaaggtgggaagctggcagtgcttggttcatgtcacatgttcagtgatcaatatt

SEQ ID NO: 420997 - DNA, 1732 bp, Homo sapiens
agcgctgcgtcctgggccacgcctcccggcgcaccgacgcgcctctccggttactaagcggccttggatacctggccgcgggatgctgggcggcgtcaggtaaccatggagaaagagctgcggagcaccattcttttcaatgcctacaaaaaggagatatttaccaccaacaatggctacaaatccatgcagaaaaaacttcggagtaattggaagattcagagcttaaaagatgaaatcacatctgagaagttaaatggagtaaaactgtggattacagctgggccaagggaaaaatttactgcagctgagtttgaaatcctgaagaaatatcttgacactggtggagatgtctttgtgatgctaggagaaggtggagaatccagatttgacaccaatattaactttttactagaagaatatggaatcatggttaataatgatgctgtggttagaaatgtatatcacaaatatttccatcctaaagaagctctagtttccagtggagtcttgaacagggaaattagccgagctgcaggaaaggctgtgcctgggatcattgatgaggaaagcagtggaaacaatgcccaggctctcacctttgtgtatccttttggtgccacattgagtgtcatgaaaccagcagtggcggttctgtctacaggttctgtctgcttcccacttaacagacccattttggctttctatcactcaaagaaccaaggtgggaagctggcagtgcttggttcatgtcacatgttcagtgatcaatatttggacaaagaagaaaacagcaaaatcatggatgttgttttccagtggctcacgacaggagacatccacctaaaccagattgatgctgaggacccagagatttctgactacatgatgctgccctacacagccaccctatcaaagcggaatcgagagtgtctccaggagagtgatgagatcccaagggactttaccaccctcttcgacctgtccatcttccagctggataccacctccttccacagcgtcatcgaggctcacgagcagctaaatgtgaaacatgaaccactccagctcatccagcctcagtttgagacgccgctgccaacccttcagcctgcggtttttcctcccagtttccgggagttaccacctcctcctctggagctatttgatttagatgaaacgttctcctctgagaaggcacggctggctcagattaccaataagtgtactgaagaagacctggaattttatgtcaggaagtgtggtgatattcttggagtaaccagtaaactaccaaaggaccaacaggatgccaaacatatccttgagcacgtcttcttccaagtggtggagttcaagaaattgaaccaggaacatgacatcgatacaagtgaaacagcattccagaacaatttctgaagaccatgcctcttgaagctttttctgcctcctgattctctctttgtaaactattttcaaattgtttttcaactccttatcaaaattgtttatacactctttcctccatgagctctggaaggtatatgcatcttctgtaatactcagataggtataagatttttcacaaaatccttatgtaagatacattccatttttaaaaattaaatgtatggttgcatctgtctttttataccctaaaaaaaaaaattgatttttttttctcaaccccagttctggatttgagtcttttatcaaagacataattaactct

SEQ ID NO: 420998 - DNA, 1796 bp, Homo sapiens
agcgctgcgtcctgggccacgcctcccggcgcaccgacgcgcctctccggttactaagcggccttggatacctggccgcgggatgctgggcggcgtcaggtgagcggtggtcgctgggcctcaggtaaccatggagaaagagctgcggagcaccattcttttcaatgcctacaaaaaggagatatttaccaccaacaatggctacaaatccatgcagaaaaaacttcggagtaattggaagattcagagcttaaaagatgaaatcacatctgagaagttaaatggagtaaaactgtggattacagctgggccaagggaaaaatttactgcagctgagtttgaaatcctgaagaaatatcttgacactggtggagatgtctttgtgatgctaggagaaggtggagaatccagatttgacaccaatattaactttttactagaagaatatggaatcatggttaataatgatgctgtggttagaaatgtatatcacaaatatttccatcctaaagaagctctagtttccagtggagtcttgaacagggaaattagccgagctgcaggaaaggctgtgcctgggatcattgatgaggaaagcagtggaaacaatgcccaggctctcacctttgtgtatccttttggtgccacattgagtgtcatgaaaccagcagtggcggttctgtctacaggttctgtctgcttcccacttaacagacccattttggctttctatcactcaaagagacagggtttcccaggctggagtgcatggtgcagtcatagctcattgtaacctcgagctcctgggctcaagtgattctcctgccccagcttcccaagtagctaggactacagaaccaaggtgggaagctggcagtgcttggttcatgtcacatgttcagtgatcaatatttggacaaagaagaaaacagcaaaatcatggatgttgttttccagtggctcacgacaggagacatccacctaaaccagattgatgctgaggacccagagatttctgactacatgatgctgccctacacagccaccctatcaaagcggaatcgagagtgtctccaggagagtgatgagatcccaagggactttaccaccctcttcgacctgtccatcttccagctggataccacctccttccacagcgtcatcgaggctcacgagcagctaaatgtgaaacatgaaccactccagctcatccagcctcagtttgagacgccgctgccaacccttcagcctgcggtttttcctcccagtttccgggagttaccacctcctcctctggagctatttgatttagatgaaacgttctcctctgagaaggcacggctggctcagattaccaataagtgtactgaagaagacctggaattttatgtcaggaagtgtggtgatattcttggagtaaccagtaaactaccaaaggaccaacaggatgccaaacatatccttgagcacgtcttcttccaagtggtggagttcaagaaattgaaccaggaacatgacatcgatacaagtgaaacagcattccagaacaatttctgaagaccatgcctcttgaagctttttctgcctcctgattctctctttgtaaactattttcaaattgtttttcaactccttatcaaaattgtttatacactctttcctccatgagctctggaaggtatatgcatcttctgtaatactcagataggtataagatttttcacaaaatccttatgtaagatacattccatttttaaaaattaaatgtatggttgcatctgtctttttatacccta

SEQ ID NO: 420999 - DNA, 1611 bp, Homo sapiens
agcgctgcgtcctgggccacgcctcccggcgcaccgacgcgcctctccggttactaagcggccttggatacctggccgcgggatgctgggcggcgtcaggtgagcggtggtcgctgggcctcaggtaaccatggagaaagagctgcggagcaccattcttttcaatgcctacaaaaaggagatatttaccaccaacaatggctacaaatccatgcagaaaaaacttcggagtaattggaagattcagagcttaaaagatgaaatcacatctgagaagttaaatggagtaaaactgtggattacagctgggccaagggaaaaatttactgcagctgagtttgaaatcctgaagaaatatcttgacactggtggagatgtctttgtgatgctaggagaaggtggagaatccagatttgacaccaatattaactttttactagaagaatatggaatcatggttaataatgatgctgtggttagaaatgtatatcacaaatatttccatcctaaagaagctctagtttccagtggagtcttgaacagggaaattagccgagctgcaggaaaggctgtgcctgggatcattgatgaggaaagcagtggaaacaatgcccaggctctcacctttgtgtatccttttggtgccacattgagtgtcatgaaaccagcagtggcggttctgtctacaggttctgtctgcttcccacttaacagacccattttggctttctatcactcaaagaaccaaggtgggaagctggcagtgcttggttcatgtcacatgttcagtgatcaatatttggacaaagaagaaaacagcaaaatcatggatgttgttttccagtggctcacgacaggagacatccacctaaaccagattgatgctgaggacccagagatttctgactacatgatgctgccctacacagccaccctatcaaagcggaatcgagagtgtctccaggagagtgatgagatcccaagggactttaccaccctcttcgacctgtccatcttccagctggataccacctccttccacagcgtcatcgaggctcacgagcagctaaatgtgaaacatgaaccactccagctcatccagcctcagtttgagacgccgctgccaacccttcagcctgcggtttttcctcccagtttccgggagttaccacctcctcctctggagctatttgatttagatgaaacgttctcctctgagaaggcacggctggctcagattaccaataagtgaacatgacatcgatacaagtgaaacagcattccagaacaatttctgaagaccatgcctcttgaagctttttctgcctcctgattctctctttgtaaactattttcaaattgtttttcaactccttatcaaaattgtttatacactctttcctccatgagctctggaaggtatatgcatcttctgtaatactcagataggtataagatttttcacaaaatccttatgtaagatacattccatttttaaaaattaaatgtatggttgcatctgtctttttataccctaaaaaaaaaaattgatttttttttctcaaccccagttctggatttgagtcttttatcaaagacataattaactct

SEQ ID NO: 421000 - DNA, 839 bp, Homo sapiens
agcgctgcgtcctgggccacgcctcccggcgcaccgacgcgcctctccggttactaagcggccttggatacctggccgcgggatgctgggcggcgtcaggtgagcggtggtcgctgggcctcaggtaaccatggagaaagagctgcggagcaccattcttttcaatgcctacaaaaaggagatatttaccaccaacaatggctacaaatccatgcagaaaaaacttcggagtaattggaagattcagagcttaaaagatgaaatcacatctgagaagttaaatggagtaaaactgtggattacagctgggccaagggaaaaatttactgcagctgagtttgaaatcctgaagaaatatcttgacactggtggagatgtctttgtgatgctaggagaaggtggagaatccagatttgacaccaatattaactttttactagaagaatatggaatcatggttaataatgatgctgtggttagaaatgtatatcacaaatatttccatcctaaagaagctctagtttccagtggagtcttgaacagggaaattagccgagctgcaggaaaggctgtgcctgggatcattgatgaggaaagcagtggaaacaatgcccaggctctcacctttgtgtatccttttggtgccacattgagtgtcatgaaaccagcagtggcggttctgtctacaggttctgtctgcttcccacttaacagacccattttggctttctatcactcaaaggtacagcttttcttagatatgggtatagatgttatttttattgttgaaataataaaaaccaccttaccatttccagaaggcttctatatgttttctc

SEQ ID NO: 421001 - DNA, 818 bp, Homo sapiens
agcgctgcgtcctgggccacgcctcccggcgcaccgacgcgcctctccggttactaagcggccttggatacctggccgcgggatgctgggcggcgtcaggtgagcggtggtcgctgggcctcaggtaaccatggagaaagagctgcggagcaccattcttttcaatgcctacaaaaaggagatatttaccaccaacaatggctacaaatccatgcagaaaaaacttcggagtaattggaagattcagagcttaaaagatgaaatcacatctgagaagttaaatggagtaaaactgtggattacagctgggccaagggaaaaatttactgcagctgagtttgaaatcctgaagaaatatcttgacactggtggagatgtctttgtgatgctaggagaaggtggagaatccagatttgacaccaatattaactttttactagaagaatatggaatcatggttaataatgatgctgtggttagaaatgtatatcacaaatatttccatcctaaagaagctctagtttccagtggagtcttgaacagggaaattagccgagctgcaggaaaggctgtgcctgggatcattgatgaggaaagcagtggaaacaatgcccaggctctcacctttgtgtatccttttggtgccacattgagtgtcatgaaaccagcagtggcggttctgtctacaggttctgtctgcttcccacttaacagacccattttggctttctatcactcaaagagacagggtttcccaggctggtgcatggtgcagtcatagctgttcctgggtacgagctcgattcgtatatgtaagt

SEQ ID NO: 421002 - DNA, 1704 bp, Homo sapiens
agaactagtctcgagtttttttttgtctgtcctggattggagccgtccctataaccatctagttccgagtacaaactggagacagaaataaatattaaagaaatcatagaccgaccaggtaaaggcaaagggatgaattcctacttcactaacccttccttatcctgccacctcgccgggggccaggacgtcctccccaacgtcgccctcaattccaccgcctatgatccagtgaggcatttctcgacctatggagcggccgttgcccagaaccggatctactcgactcccttttattcgccacaggagaatgtcgtgttcagttccagccgggggccgtatgactatggatctaattccttttaccaggagaaagacatgctctcaaactgcagacaaaacaccttaggacataacacacagacctcaatcgctcaggattttagttctgagcagggcaggactgcgccccaggaccagaaagccagtatccagatttacccctggatgcagcgaatgaattcgcacagtggggtcggctacggagcggaccggaggcgcggccgccagatctactcgcggtaccagaccctggaactggagaaggaatttcacttcaatcgctacctaacgcggcgccggcgcatcgagatcgccaacgcgctttgcctgaccgagcgacagatcaaaatctggttccagaaccgccggatgaagtggaaaaaagaatctaatctcacatccactctctcggggggcggcggaggggccaccgccgacagcctgggcggaaaagaggaaaagcgggaagagacagaagaggagaagcagaaagagtgaccaggactgtccctgccacccctctctccctttctccctcgctccccaccaactctcccctaatcacacactctgtatttatcactggcacaattgatgtgttttgattccctaaaacaaaattagggagtcaaacgtggacctgaaagtcagctctggaccccctccctcaccgcacaactctctttcaccacgcgcctcctcctcctcgctcccttgctagctcgttctcggcttgtctacaggcccttttccccgtccaggccttgggggctcggaccctgaactcagactctacagattgccctccaagtgaggacttggctcccccactccttcgacgcccccacccccgccccccgtgcagagagccggctcctgggcctgctggggcctctgctccagggcctcagggcccggcctggcagccggggagggccggaggcccaaggagggcgcgccttggccccacaccaacccccagggcctccccgcagtccctgcctagcccctctgccccagcaaatgcccagcccaggcaaattgtatttaaagaatcctgggggtcattatggcattttacaaactgtgaccgtttctgtgtgaagatttttagctgtatttgtggtctctgtatttatatttatgtttagcaccgtcagtgttcctatccaatttcaaaaaaggaaaaaaaagagggaaaattacaaaaagagagaaaaaaagtgaatgacgtttgtttagccagtaggagaaaataaataaataaataaatcccttcgtgttaccctcctgtataaatccaacctctgggtccgttctcgaatatttaataaaactgatattatttttaaaactttatac

SEQ ID NO: 421003 - DNA, 1613 bp, Homo sapiens
acccctcaacttcaaagagtcacaaatcacccttaatcaaaaagggtgcagaaatttttttgggccctccccgccatgagctcctacgtagccaattcattctataagcagagccccaatatccctgcctataacatgcaaacttgtgggaactatggatcggcctcagaggtgcaggcatccaggtactgctacggcggattggacttaagcatcactttcccaccgcctgcgccttccaactctctccacggggtagacatggctgccaacccccgggctcaccccgaccgccccgcctgcagcgccgcggccgctccgggacacgctccgggcagagacgaagcggctcctctgaaccccgggatgtacagtcagaaggcggctcgcccggcgctggaggagcgagctaagagcagtggggagatcaaagaggagcaggcgcagacagggcagcccgccggactgagccagccaccggccccgccacagatttacccgtggatgaccaaactgcacatgagccacgagacggacggcaagcggtcccgaaccagttacacgcgctaccagactctggaactcgagaaagaattccactttaaccgctacctcactcgccgcaggcgcatagagatcgccaacaacttgtgtctcaatgagagacagatcaagatctggttccagaaccgcaggatgaagtggaagaaagattccaaaatgaaaagcaaagaggctctttagaggcagcgggggaggcccgcagagcgcgcccctagccggttcctgtccctgcgcctttccttttcgcctttcctctctatatttcgggtcgggggcaggtgctggagcactgggctcccgggccccacagacaaaagcgcttttccttggcattccgcatccctaccgacccagggttcccgcggggctgtcggcgctgccccatctcccctcagctcggctcagctcggtacccggggcccagggcaagctccgcaggacttccccggagggctgcggcgtacaggctggcgcagaacgaaccttggcctgggccgtatctccggctcccagcctcagcgcggccctcccgagttaaggtgggcccggcccgcgccacaggaccctcgccggaccctctaacctcgccctctcctttgttcccggctggacgggttagacagccaaaggctggcgagagtctggccctagactcggggtgcttccttgtagcgactaaactagattttcacttatgaatgatttgcatatgaaaggagagcatcggcctagggcccccacagttgctctatgctttccaaaccttatctccacaacctcttccccccaaaacccgggaacctccccagcctgcgcctgctgcatgccctctcaggccggcagccccagcctgctagctagctcaactagtggggtttcctggcactggaccccagcaagtggtcctagaggccctttgctgtcccatagtccctgccacgaatttctgtgccctcctgacccattgctgttgtccaactatttattgactctgggtccttcctgaaactatattttgtcatatcaaataaagagagaacaggactaaa

SEQ ID NO: 421004 - DNA, 928 bp, Homo sapiens
  misc_feature (879)..(879): n is a, c, g, or t
acctgccctgggcgctcccttcattagcagtattttttttaaattaatctgattaataattatttttcccccatttaattttttttcctcccaggtggagttgccgaagctgggggcagctggggagggtggggatgggaggggagagacagaagttgagggcatctctctcttccttcccgaccctctggcccccaaggggcaggaggaatgcaggagcaggagttgagcttgggagctgcagatgcctccgcccctcctctctcccaggctcttcctcctgcccccttcttgcaactctccttaattttgtttggcttttggatgattataattatttttatttttgaatttatataaagtatatgtgtgtgtgtgtggagctgagacaggctcggcagcggcacagaatgagggaagacgagaaagagagtgggagagagagaggcagagagggagagagggagagtgacagcagcgctcgagacggacggcaagcggtcccgaaccagttacacgcgctaccagactctggaactcgagaaagaattccactttaaccgctacctcactcgccgcaggcgcatagagatcgccaacaacttgtgtctcaatgagagacagatcaagatctggttccagaaccgcaggatgaagtggaagaaagattccaaaatgaaaagcaaagaggctctttagaggcagcgggggaggcccgcagagcgcgcccctagccggttcctgtccctgcgcctttccttttcgcctttcctctctatatttcgggtcgggggcaggtgctggagcactgggctcccgggccccacagacaaaagcgcttttccttggcattccgcatccctaccgacccaggtcccnggggtgcggggggccattccccccaagggcatgggccccggccggaacc

SEQ ID NO: 421005 - DNA, 2235 bp, Homo sapiens
acctgccctgggcgctcccttcattagcagtattttttttaaattaatctgattaataattatttttcccccatttaattttttttcctcccaggtggagttgccgaagctgggggcagctggggagggtggggatgggaggggagagacagaagttgagggcatctctctcttccttcccgaccctctggcccccaaggggcaggaggaatgcaggagcaggagttgagcttgggagctgcagatgcctccgcccctcctctctcccaggctcttcctcctgcccccttcttgcaactctccttaattttgtttggcttttggatgattataattatttttatttttgaatttatataaagtatatgtgtgtgtgtgtggagctgagacaggctcggcagcggcacagaatgagggaagacgagaaagagagtgggagagagagaggcagagagggagagagggagagtgacagcagcgctcgcgggggctcaacccccagacctccagaaatgacgtcagaatcatttgcatcccgctgcctctacctgcctggtccagctgggaccctgcctcgccggccgcatggccagagggttggaaattaatgatcatgagctcgtatttgatggactctaactacatcgatccgaaatttcctccatgcgaagaatattcgcaaaatagctacatccctgaacacagtccggaatattacggccggaccagggaatcgggattccagcatcaccaccaggagctgtacccaccaccgcctccgcgccctagctaccctgagcgccagtatagctgcaccagtctccaggggcccggcaattcgcgaggccacgggccggcccaggcgggccaccaccaccccgagaaatcacagtcgctctgcgagccggcgcctctctcaggcgcctccgcctccccgtccccagccccgccagcctgcagccagccagcccccgaccatccctccagcgccgccagcaagcaacccatagtctacccatggatgaaaaaaattcacgttagcacggtgaaccccaattataacggaggggaacccaagcgctcgagggcagcctatacccggcagcaagtcctggaattagagaaagagtttcattacaaccgctacctgacccgaaggagaaggatcgagatcgcccactcgctgtgcctctctgagaggcagatcaaaatctggttccaaaaccgtcgcatgaaatggaagaaggaccaccgactccccaacaccaaagtcaggtcagcacccccggccggcgctgcgcccagcaccctttcggcagctaccccgggtacttctgaagaccactcccagagcgccacgccgccggagcagcaacgggcagaggacattaccaggttataaaacataactcacacccctgcccccaccccatgcccccaccctcccctcacacacaaattgactcttatttatagaatttaatatatatatatatatatatatatataggttcttttctctcttcctctcaccttgtcccttgtcagttccaaacagacaaaacagataaacaaacaagccccctgccctcctctccctcccactgttaaggacccttttaagcatgtgatgttgtcttagcatggtacctgctgggtgtttttttttaaaaggccattttggggggttatttattttttaagaaaaaaagctgcaaaaattatatattgcaaggtgtgatggtctggcttgggtgaatttcaggggaaatgaggaaaagaaaaaaggaaagaaattttaaagccaattctcatccttctcctcctcctccttccccccctctttccttaggccttttgcattgaaaatgcaccaggggaggttagtgagggggaagtcattttaaggagaacaaagctatgaagttcttttgtattattgttgggggggggtgtgggaggagagggggcgaagacagcagacaaagctaaatgcatctggagagcctctcagagctgttcagtttgaggagccaaaagaaaatcaaaatgaactttcagttcagagaggcagtctataggtagaatctctccccacccctatcgtggttattgtgtttttggactgaatttacttgattattgtaaaacttgcaataaagaattttagtgtcgatgtgaaatgccccgtgatcaataataaaccagtggatgtgaattagttttaaaaaaatg

SEQ ID NO: 421006 - DNA, 2596 bp, Homo sapiens
acctgccctgggcgctcccttcattagcagtattttttttaaattaatctgattaataattatttttcccccatttaattttttttcctcccaggtggagttgccgaagctgggggcagctggggagggtggggatgggaggggagagacagaagttgagggcatctctctcttccttcccgaccctctggcccccaaggggcaggaggaatgcaggagcaggagttgagcttgggagctgcagatgcctccgcccctcctctctcccaggctcttcctcctgcccccttcttgcaactctccttaattttgtttggcttttggatgattataattatttttatttttgaatttatataaagtatatgtgtgtgtgtgtggagctgagacaggctcggcagcggcacagaatgagggaagacgagaaagagagtgggagagagagaggcagagagggagagagggagagtgacagcagcgctcgcgggggctcaacccccagacctccagaaatgacgtcagaatcatttgcatcccgctgcctctacctgcctggtccagctgggaccctgcctcgccggccgcatggccagagggttggaaattaatgatcatgagctcgtatttgatggactctaactacatcgatccgaaatttcctccatgcgaagaatattcgcaaaatagctacatccctgaacacagtccggaatattacggccggaccagggaatcgggattccagcatcaccaccaggagctgtacccaccaccgcctccgcgccctagctaccctgagcgccagtatagctgcaccagtctccaggggcccggcaattcgcgaggccacgggccggcccaggcgggccaccaccaccccgagaaatcacagtcgctctgcgagccggcgcctctctcaggcgcctccgcctccccgtccccagccccgccagcctgcagccagccagcccccgaccatccctccagcgccgccagcaagcaacccatagtctacccatggatgaaaaaaattcacgttagcacggtgaaccccaattataacggaggggaacccaagcgctcgagggcagcctatacccggcagcaagtcctggaattagagaaagagtttcattacaaccgctacctgacccgaaggagaaggatcgagatcgcccactcgctgtgcctctctgagaggcagatcaaaatctggttccaaaaccgtcgcatgaaatggaagaaggaccaccgactccccaacaccaaagtcaggtcagcacccccggccggcgctgcgcccagcaccctttcggcagctaccccgggtacttctgaagaccactcccagagcgccacgccgccggagcagcaacgggcagaggacattaccaggttataaaacataactcacacccctgcccccaccccatgcccccaccctcccctcacacacaaattgactcttatttatagaatttaatatatatatatatatatatatatataggttcttttctctcttcctctcaccttgtcccttgtcagttccaaacagacaaaacagataaacaaacaagccccctgccctcctctccctcccactgttaaggacccttttaagcatgtgatgttgtcttagcatggtacctgctgggtgtttttttttaaaaggccattttggggggttatttattttttaagaaaaaaagctgcaaaaattatatattgcaaggtgtgatggtctggcttgggtgaatttcaggggaaatgaggaaaagaaaaaaggaaagaaattttaaagccaattctcatccttctcctcctcctccttccccccctctttccttaggccttttgcattgaaaatgcaccaggggaggttagtgagggggaagtcattttaaggagaacaaagctatgaagttcttttgtattattgttgggggggggtgtgggaggagagggggcgaagacagcagacaaagctaaatgcatctggagagcctctcagagctgttcagtttgaggagccaaaagaaaatcaaaatgaactttcagttcagagaggcagtctataggtagaatctctccccacccctatcgtggttattgtgtttttggactgaatttacttgattattgtaaaacttgcaataaagaattttagtgtcgatgtgaaaaaaaaaaaaaaaaggggggccgcccttttttcccttagccattaactccccctttttattatcgtatgaatctatcgtctaaataactgcaaacgtcattaattgacataataaaaacaaccagaagagaaggaacacccacaccactgacacacccccaaaacaaagcaaagctgactcaacaaacaccacacacttatagacgcagatacaaaactaaagacaaccaaacacacaatcatacaaaccgaaatgacaaataaaccaatacacaaaaatcgaaatatacgctccagaactagcacagaccacacatcagtactcaacatacaaacaatttacacgaacagacacagaaccaacatcaccaccaacacataccacacactatcagctataacaacaaacagaac

SEQ ID NO: 421007 - DNA, 1709 bp, Homo sapiens
cggatctgattgcctggggtgctgggctgggcgcaccccactgctgctgggggtcaccccaagagccccccacccatccaaggaaaggaataaacttaaccgctggaggggcatgaggagctcagcccccccaacctcgacagcagctaacagaaacgccaggagcagcaggaggaggaggcagcgacaaggacgtcctccccaacgtcgccctcaattccaccgcctatgatccagtgaggcatttctcgacctatggagcggccgttgcccagaaccggatctactcgactcccttttattcgccacaggagaatgtcgtgttcagttccagccgggggccgtatgactatggatctaattccttttaccaggagaaagacatgctctcaaactgcagacaaaacaccttaggacataacacacagacctcaatcgctcaggattttagttctgagcagggcaggactgcgccccaggaccagaaagccagtatccagatttacccctggatgcagcgaatgaattcgcacagtggggtcggctacggagcggaccggaggcgcggccgccagatctactcgcggtaccagaccctggaactggagaaggaatttcacttcaatcgctacctaacgcggcgccggcgcatcgagatcgccaacgcgctttgcctgaccgagcgacagatcaaaatctggttccagaaccgccggatgaagtggaaaaaagaatctaatctcacatccactctctcggggggcggcggaggggccaccgccgacagcctgggcggaaaagaggaaaagcgggaagagacagaagaggagaagcagaaagagtgaccaggactgtccctgccacccctctctccctttctccctcgctccccaccaactctcccctaatcacacactctgtatttatcactggcacaattgatgtgttttgattccctaaaacaaaattagggagtcaaacgtggacctgaaagtcagctctggaccccctccctcaccgcacaactctctttcaccacgcgcctcctcctcctcgctcccttgctagctcgttctcggcttgtctacaggcccttttccccgtccaggccttgggggctcggaccctgaactcagactctacagattgccctccaagtgaggacttggctcccccactccttcgacgcccccacccccgccccccgtgcagagagccggctcctgggcctgctggggcctctgctccagggcctcagggcccggcctggcagccggggagggccggaggcccaaggagggcgcgccttggccccacaccaacccccagggcctccccgcagtccctgcctagcccctctgccccagcaaatgcccagcccaggcaaattgtatttaaagaatcctgggggtcattatggcattttacaaactgtgaccgtttctgtgtgaagatttttagctgtatttgtggtctctgtatttatatttatgtttagcaccgtcagtgttcctatccaatttcaaaaaaggaaaaaaaagagggaaaattacaaaaagagagaaaaaaagtgaatgacgtttgtttagccagtaggagaaaataaataaataaataaatcccttcgtgttaccctcctgtataaatccaacctctgggtccgttctcgaatatttaataaaactgatattatttttaaaactttatac

SEQ ID NO: 421008 - DNA, 1215 bp, Homo sapiens
agaactagtctcgagtttttttttgtctgtcctggattggagccgtccctataaccatctagttccgagtacaaactggagacagaaataaatattaaagaaatcatagaccgaccaggtaaaggcaaagggatgaattcctacttcactaacccttccttatcctgccacctcgccgggggccaggacgtcctccccaacgtcgccctcaattccaccgcctatgatccagtgaggcatttctcgacctatggagcggccgttgcccagaaccggatctactcgactcccttttattcgccacaggagaatgtcgtgttcagttccagccgggggccgtatgactatggatctaattccttttaccaggagaaagacatgctctcaaactgcagacaaaacaccttaggacataacacacagacctcaatcgctcaggattttagttctgagcagggcaggactgcgccccaggaccagaaagccagtatccagatttacccctggatgcagcgaatgaattcgcacagtggggtcggctacggagcggaccggaggcgcggccgccagatctactcgcggtaccagaccctggaactggagaaggaatttcacttcaatcgctacctaacgcggcgccggcgcatcgagatcgccaacgcgctttgcctgaccgagcgacagatcaaaatctggttccagaaccgccggatgaagtggaaaaaagaatctaatctcacatccactctctcggggggcggcggaggggccaccgccgacagcctgggcggaaaagaggaaaagcgggaagagacagaagaggagaagcagaaagagtgaccaggacttccctgcctagcccctctgccccagcaaatgcccagcccaggcaaattgtatttaaagaatcctgggggtcattatggcattttacaaactgtgaccgtttctgtgtgaagatttttagctgtatttgtggtctctgtatttatatttatgtttagcaccgtcagtgttcctatccaatttcaaaaaaggaaaaaaaagagggaaaattacaaaaagagagaaaaaaagtgaatgacgtttgtttagccagtaggagaaaataaataaataaataaatcccttcgtgttaccctcctgtataaatccaacctctgggtccgttctcgaatatttaataaaactgatattatttttaaaactttatac

SEQ ID NO: 421009 - DNA, 2002 bp, Homo sapiens
acctgccctgggcgctcccttcattagcagtattttttttaaattaatctgattaataattatttttcccccatttaattttttttcctcccaggtggagttgccgaagctgggggcagctggggagggtggggatgggaggggagagacagaagttgagggcatctctctcttccttcccgaccctctggcccccaaggggcaggaggaatgcaggagcaggagttgagcttgggagctgcagatgcctccgcccctcctctctcccaggctcttcctcctgcccccttcttgcaactctccttaattttgtttggcttttggatgattataattatttttatttttgaatttatataaagtatatgtgtgtgtgtgtggagctgagacaggctcggcagcggcacagaatgagggaagacgagaaagagagtgggagagagagaggcagagagggagagagggagagtgacagcagcgctcggacgtcctccccaacgtcgccctcaattccaccgcctatgatccagtgaggcatttctcgacctatggagcggccgttgcccagaaccggatctactcgactcccttttattcgccacaggagaatgtcgtgttcagttccagccgggggccgtatgactatggatctaattccttttaccaggagaaagacatgctctcaaactgcagacaaaacaccttaggacataacacacagacctcaatcgctcaggattttagttctgagcagggcaggactgcgccccaggaccagaaagccagtatccagatttacccctggatgcagcgaatgaattcgcacagtggggtcggctacggagcggaccggaggcgcggccgccagatctactcgcggtaccagaccctggaactggagaaggaatttcacttcaatcgctacctaacgcggcgccggcgcatcgagatcgccaacgcgctttgcctgaccgagcgacagatcaaaatctggttccagaaccgccggatgaagtggaaaaaagaatctaatctcacatccactctctcggggggcggcggaggggccaccgccgacagcctgggcggaaaagaggaaaagcgggaagagacagaagaggagaagcagaaagagtgaccaggactgtccctgccacccctctctccctttctccctcgctccccaccaactctcccctaatcacacactctgtatttatcactggcacaattgatgtgttttgattccctaaaacaaaattagggagtcaaacgtggacctgaaagtcagctctggaccccctccctcaccgcacaactctctttcaccacgcgcctcctcctcctcgctcccttgctagctcgttctcggcttgtctacaggcccttttccccgtccaggccttgggggctcggaccctgaactcagactctacagattgccctccaagtgaggacttggctcccccactccttcgacgcccccacccccgccccccgtgcagagagccggctcctgggcctgctggggcctctgctccagggcctcagggcccggcctggcagccggggagggccggaggcccaaggagggcgcgccttggccccacaccaacccccagggcctccccgcagtccctgcctagcccctctgccccagcaaatgcccagcccaggcaaattgtatttaaagaatcctgggggtcattatggcattttacaaactgtgaccgtttctgtgtgaagatttttagctgtatttgtggtctctgtatttatatttatgtttagcaccgtcagtgttcctatccaatttcaaaaaaggaaaaaaaagagggaaaattacaaaaagagagaaaaaaagtgaatgacgtttgtttagccagtaggagaaaataaataaataaataaatcccttcgtgttaccctcctgtataaatccaacctctgggtccgttctcgaatatttaataaaactgatattatttttaaaactttatac

SEQ ID NO: 421010 - DNA, 1250 bp, Homo sapiens
gtgagtttccctgagacccccaagtccgacagccagacccccagccccaatgaaatcaagacggagcagagcctggcgggccctaaagggagcccctcggagagcgaaaaggagagggccaaagctgccgactccagcccagacacctcggataacgaagcgaaagagacggacggcaagcggtcccgaaccagttacacgcgctaccagactctggaactcgagaaagaattccactttaaccgctacctcactcgccgcaggcgcatagagatcgccaacaacttgtgtctcaatgagagacagatcaagatctggttccagaaccgcaggatgaagtggaagaaagattccaaaatgaaaagcaaagaggctctttagaggcagcgggggaggcccgcagagcgcgcccctagccggttcctgtccctgcgcctttccttttcgcctttcctctctatatttcgggtcgggggcaggtgctggagcactgggctcccgggccccacagacaaaagcgcttttccttggcattccgcatccctaccgacccagggttcccgcggggctgtcggcgctgccccatctcccctcagctcggctcagctcggtacccggggcccagggcaagctccgcaggacttccccggagggctgcggcgtacaggctggcgcagaacgaaccttggcctgggccgtatctccggctcccagcctcagcgcggccctcccgagttaaggtgggcccggcccgcgccacaggaccctcgccggaccctctaacctcgccctctcctttgttcccggctggacgggttagacagccaaaggctggcgagagtctggccctagactcggggtgcttccttgtagcgactaaactagattttcacttatgaatgatttgcatatgaaaggagagcatcggcctagggcccccacagttgctctatgctttccaaaccttatctccacaacctcttccccccaaaacccgggaacctccccagcctgcgcctgctgcatgccctctcaggccggcagccccagcctgctagctagctcaactagtggggtttcctggcactggaccccagcaagtggtcctagaggccctttgctgtcccatagtccctgccacgaatttctgtgccctcctgacccattgctgttgtccaactatttattgactctgggtccttcctgaaactatattttgtcatatcaaataaagagagaacaggactaaa

SEQ ID NO: 421011 - DNA, 1618 bp, Homo sapiens
caaagtggagtcagtctgaggagaagggagggggagaggagaggcagataagtggggagaagtttccaaggaactaggatgcttggggagatgggggagcccagtccttgagaaagggggccctcatccccattatctgggatttttcaaaaatctgcttttagacttgcagctttctgtttgccttttgccccgcccccccgcccccccccccaccacacacctttctttgggacacacaggtcccaccttataggaggtctgaagttggggtcctcgctgtacccccagtgggggtggggcaaggcaaaagggagaaggctagagccctaaggaggctgtgagctgctggccaggttgggagggtcaggactttgctaggcgaaacagtctgcagaggacgctttgctgattgcttttagtgtgttttgtgcccggatctttaggggtcggctacggagcggaccggaggcgcggccgccagatctactcgcggtaccagaccctggaactggagaaggaatttcacttcaatcgctacctaacgcggcgccggcgcatcgagatcgccaacgcgctttgcctgaccgagcgacagatcaaaatctggttccagaaccgccggatgaagtggaaaaaagaatctaatctcacatccactctctcggggggcggcggaggggccaccgccgacagcctgggcggaaaagaggaaaagcgggaagagacagaagaggagaagcagaaagagtgaccaggactgtccctgccacccctctctccctttctccctcgctccccaccaactctcccctaatcacacactctgtatttatcactggcacaattgatgtgttttgattccctaaaacaaaattagggagtcaaacgtggacctgaaagtcagctctggaccccctccctcaccgcacaactctctttcaccacgcgcctcctcctcctcgctcccttgctagctcgttctcggcttgtctacaggcccttttccccgtccaggccttgggggctcggaccctgaactcagactctacagattgccctccaagtgaggacttggctcccccactccttcgacgcccccacccccgccccccgtgcagagagccggctcctgggcctgctggggcctctgctccagggcctcagggcccggcctggcagccggggagggccggaggcccaaggagggcgcgccttggccccacaccaacccccagggcctccccgcagtccctgcctagcccctctgccccagcaaatgcccagcccaggcaaattgtatttaaagaatcctgggggtcattatggcattttacaaactgtgaccgtttctgtgtgaagatttttagctgtatttgtggtctctgtatttatatttatgtttagcaccgtcagtgttcctatccaatttcaaaaaaggaaaaaaaagagggaaaattacaaaaagagagaaaaaaagtgaatgacgtttgtttagccagtaggagaaaataaataaataaataaatcccttcgtgttaccctcctgtataaatccaacctctgggtccgttctcgaatatttaataaaactgatattatttttaaaactttatac

SEQ ID NO: 421012 - DNA, 1495 bp, Homo sapiens
aagcgggattggaccaaaccagagggacagagtcttctgggtctctctgcctgaggccctggagggagagaaggagaatgtcgtgttcagttccagccgggggccgtatgactatggatctaattccttttaccaggagaaagacatgctctcaaactgcagacaaaacaccttaggacataacacacagacctcaatcgctcaggattttagttctgagcagggcaggactgcgccccaggaccagaaagccagtatccagatttacccctggatgcagcgaatgaattcgcacagtgtgtgttttgtgcccggatctttaggggtcggctacggagcggaccggaggcgcggccgccagatctactcgcggtaccagaccctggaactggagaaggaatttcacttcaatcgctacctaacgcggcgccggcgcatcgagatcgccaacgcgctttgcctgaccgagcgacagatcaaaatctggttccagaaccgccggatgaagtggaaaaaagaatctaatctcacatccactctctcggggggcggcggaggggccaccgccgacagcctgggcggaaaagaggaaaagcgggaagagacagaagaggagaagcagaaagagtgaccaggactgtccctgccacccctctctccctttctccctcgctccccaccaactctcccctaatcacacactctgtatttatcactggcacaattgatgtgttttgattccctaaaacaaaattagggagtcaaacgtggacctgaaagtcagctctggaccccctccctcaccgcacaactctctttcaccacgcgcctcctcctcctcgctcccttgctagctcgttctcggcttgtctacaggcccttttccccgtccaggccttgggggctcggaccctgaactcagactctacagattgccctccaagtgaggacttggctcccccactccttcgacgcccccacccccgccccccgtgcagagagccggctcctgggcctgctggggcctctgctccagggcctcagggcccggcctggcagccggggagggccggaggcccaaggagggcgcgccttggccccacaccaacccccagggcctccccgcagtccctgcctagcccctctgccccagcaaatgcccagcccaggcaaattgtatttaaagaatcctgggggtcattatggcattttacaaactgtgaccgtttctgtgtgaagatttttagctgtatttgtggtctctgtatttatatttatgtttagcaccgtcagtgttcctatccaatttcaaaaaaggaaaaaaaagagggaaaattacaaaaagagagaaaaaaagtgaatgacgtttgtttagccagtaggagaaaataaataaataaataaatcccttcgtgttaccctcctgtataaatccaacctctgggtccgttctcgaatatttaataaaactgatattatttttaaaactttatac

SEQ ID NO: 421013 - DNA, 394 bp, Homo sapiens
ttggccggaggagtcacatggtgaaagtaactttacagggtcgctagctagtaggagggctttatggagcagaaaaacgacaaagcgagaaaaattattttccactccagaaattaatgatcatgagctcgtatttgatggactctaactacatcgatccgaaatttcctccatgcgaagaatattcgcaaaatagctacatccctgaacacagtccggaatattacggccggaccagggaatcgggattccagcatcaccaccaggagctgtacccaccaccgcctccgcgccctagctaccctgagcgccagtatagctgcaccagtctccaggggcccggcaattcgcgaggccacgggccggcccaggcgggccaccaccaccccgagaa

SEQ ID NO: 421014 - DNA, 2965 bp, Homo sapiens
gattttcctccctgcagagccaatggtgcacattggtttaagcccagagatcctgcttgatccctggactcatcttgggaagggccatgggaggtcctggctagagttctgcccaaccttgaccaaccccagcaatttttccaaaagccagtcaagggcattacatttgttcctgggactggcagctgggcctcctgggtgccagtccatctcaagtgccatattctgtgatcacggatgttggctccccctcgccctatgcaagcaaacacactctcacctcctctcccagcctcccggagctctgagcacgccccacgcatggtgcaggagggactggacagatctgaggaaggccgtaaaatggggacaggaggattcagctcaggagtaagggaagaggtcctctggccccctgaagatgagaatcacccctctcagtgcacctggggatccccctaaactgtgaattctgccctggacagggctttgcccttggaggatccccaggtggccttacccgtgattcttactcggcatcctccattccccaaactccctcctccctgttaaatgtcaacctagacctggacctgggtgggaggaaactgtagcctgagtgtccacagggacacacgtgagccacagggctagaagcacaggcccgtcaccccaggaggaaaagcccagggtctggggcagcagagccatcgcatcatgtttcccagggcaacttgaggtctgacttttggctccctcgccctaagaggctcttcctctcttttgctcatccaccttcacaccacttgtgagctgacccccaggaacagcttggctgttccaccagagcagagggaatcattgctggactggatttcttctggagggaagcaccatgaattaaaggtgccagagctccatgcatggaaaagtggcctgttggttcaacgtggtttccttgtacttgatcctcctgaaatgagagattttcctgagatgactgagtatggagattaccaggcagatgataccgaaatgcttaaaggggctgtggctgaggctgtagcatctctgctggaggtgagacactctgggaactgatttgacctcgaatgctcctaaaagagaacttgatagcctgacagcagagaagtattatttggtggggagtctgagaaagcctggcttgtattatctgtccaaaaggaagcctcttcatctcctcggtgccttggttgactattttggaaataggcatatcaaggttcctgattcagcactttgctcttttaataacaaatcgtccaaagatctcaaagtaagggtttttttttttagcttccactcttccgcagacttggtcatcgacctatttttgttgaagaatgaaaggcaatgacaagtttaacatatacaaattcgtgaattcttgttcattttgcattcctgcagtcagtgctaatccgtcgttcttaatcaggagttctgccaggtttaaggtcacctgcactcccagccaagtggtgatgtatgcctcccactctctgcaaggttttcctcatttttatattcatttattcatcattcattcattcacctaactttcattaaatagctgcaccatcccaggccctgtgcggagcatcgggaatacaaagatgagataaaacattgtccctgcccccgggggctcacatgccactggaaacaacagactcttaaactaacaattcaagcaggcgccaagtgctacgacagaggtgtgaataaaagcatcaggaaatcggatggagaaccaccattcacccaagggtcagaggaggtttcaaagaaaaggtgtcattggagcagtgttttgcagaatgagccagagttcaccaagcaggcaaggcaaggaagggtgttgcagagagggaacagcatatgcaaaggcatatcagttcatggcatcacatctttcactggggaagccagtttccacaggcagcatcccaaggttcaataaggccttatttaacaagcaagcaaaatgcaaaccaaaccattattcatttattggcttaagtatgctttctcctgaaaactttagcattgggtgcaaatattcagtatggttctcggagtccaaagggttttaagccagggcacaaccagaaaagtggctctctttggtagggagaggggctccaatatttcgttctctccccatggggcactgacagagaaatgaaatagttttatctggaaaattccagagctattatttactccttaccaagggaagttacttcttgtaaaaacttttaagccatttatcaacaagttcttgttgactcagggcataatgagttcctgagacatgctcttttgggggctggggctttaggtagaagaatttcaaggaaaagaattctcagcagagctcaagattgtagaaactcagcagaagctggtaaaaacatggggagcccggaggacaggctgctgtccagggcagaggccatgaagaagtgcttccgtggccgacagtctggaaatgaatccatcatacattagtgccatagagtttagtaaccgtccagcaagtgtcatcacttttacagaaaacaaggtccagtaatagcaagtcttagtacatcctcacttttattataaatgggtgttttttcataatttttactgacgctcagtaaccatgcaaaattgtgtatagcattaatgtatctacatacctacacctatctatatataagctcatggtagaaaaccatagctaagtagcatcgcagacttaagcgtacaaagtgatcttgttcacaagtaatctgttgacagtgccaataaatgataaaaaaaaaattaacatgtcacaatgtaacggatgaccatatgcacaattccatgaattaaatctgtttcctgtgttagtcagtattcttaaataaaatttataattgaaacatga

SEQ ID NO: 421015 - DNA, 458 bp, Homo sapiens
cgcgccgaatggcgcgcagtatgacgcccaggatgcctcacagcatgcatgcggtgggggctggggctttaggtagaagaatttcaaggaaaagaattctcagcagagctcaagattgtagaaactcagcagaagctggtaaaaacatggggagcccggaggacaggctgctgtccagggcagaggccatgaagaagtgcttccgtggccgacagtctggaaatgaatccatcatacattagtgccatagagtttagtaaccgccccgaatgcattcggaggggcatgcagtggggtttttgtttgtttgttttgagatagggtctcaccctgtcacccaggctagagtacagtcgtgtgatttcagctcactgcaacctccacctcccgggttcaaatgattctcccacctcagcccagatctggagtagctgtagctggaccacaacagcgccccc

SEQ ID NO: 421016 - DNA, 2911 bp, Homo sapiens
gattttcctccctgcagagccaatggtgcacattggtttaagcccagagatcctgcttgatccctggactcatcttgggaagggccatgggaggtcctggctagagttctgcccaaccttgaccaaccccagcaatttttccaaaagccagtcaagggcattacatttgttcctgggactggcagctgggcctcctgggtgccagtccatctcaagtgccatattctgtgatcacggatgttggctccccctcgccctatgcaagcaaacacactctcacctcctctcccagcctcccggagctctgagcacgccccacgcatggtgcaggagggactggacagatctgaggaaggccgtaaaatggggacaggaggattcagctcaggagtaagggaagaggtcctctggccccctgaagatgagaatcacccctctcagtgcacctggggatccccctaaactgtgaattctgccctggacagggctttgcccttggaggatccccaggtggccttacccgtgattcttactcggcatcctccattccccaaactccctcctccctgttaaatgtcaacctagacctggacctgggtgggaggaaactgtagcctgagtgtccacagggacacacgtgagccacagggctagaagcacaggcccgtcaccccaggaggaaaagcccagggtctggggcagcagagccatcgcatcatgtttcccagggcaacttgaggtctgacttttggctccctcgccctaagaggctcttcctctcttttgctcatccaccttcacaccacttgtgagctgacccccaggaacagcttggctgttccaccagagcagagggaatcattgctggactggatttcttctggagggaagcaccatgaattaaaggtgccagagctccatgcatggaaaagtggcctgttggttcaacgtggtttccttgtacttgatcctcctgaaatgagagattttcctgagatgactgagtatggagattaccaggcagatgataccgaaatgcttaaaggggctgtggctgaggctgtagcatctctgctggaggtgagacactctgggaactgatttgacctcgaatgctcctaaaagagaacttgatagcctgacagcagagaagtattatttggtggggagtctgagaaagcctggcttgtattatctgtccaaaaggaagcctcttcatctcctcggtgccttggttgactattttggaaataggcatatcaaggttcctgattcagcactttgctcttttaataacaaatcgtccaaagatctcaaagtaagggtttttttttttagcttccactcttccgcagacttggtcatcgacctatttttgttgaagaatgaaaggcaatgacaagtttaacatatacaaattcgtgaattcttgttcattttgcattcctgcagtcagtgctaatccgtcgttcttaatcaggagttctgccaggtttaaggtcacctgcactcccagccaagtggtgatgtatgcctcccactctctgcaaggttttcctcatttttatattcatttattcatcattcattcattcacctaactttcattaaatagctgcaccatcccaggccctgtgcggagcatcgggaatacaaagatgagataaaactaacaattcaagcaggcgccaagtgctacgacagaggtgtgaataaaagcatcaggaaatcggatggagaaccaccattcacccaagggtcagaggaggtttcaaagaaaaggtgtcattggagcagtgttttgcagaatgagccagagttcaccaagcaggcaaggcaaggaagggtgttgcagagagggaacagcatatgcaaaggcatatcagttcatggcatcacatctttcactggggaagccagtttccacaggcagcatcccaaggttcaataaggccttatttaacaagcaagcaaaatgcaaaccaaaccattattcatttattggcttaagtatgctttctcctgaaaactttagcattgggtgcaaatattcagtatggttctcggagtccaaagggttttaagccagggcacaaccagaaaagtggctctctttggtagggagaggggctccaatatttcgttctctccccatggggcactgacagagaaatgaaatagttttatctggaaaattccagagctattatttactccttaccaagggaagttacttcttgtaaaaacttttaagccatttatcaacaagttcttgttgactcagggcataatgagttcctgagacatgctcttttgggggctggggctttaggtagaagaatttcaaggaaaagaattctcagcagagctcaagattgtagaaactcagcagaagctggtaaaaacatggggagcccggaggacaggctgctgtccagggcagaggccatgaagaagtgcttccgtggccgacagtctggaaatgaatccatcatacattagtgccatagagtttagtaaccgtccagcaagtgtcatcacttttacagaaaacaaggtccagtaatagcaagtcttagtacatcctcacttttattataaatgggtgttttttcataatttttactgacgctcagtaaccatgcaaaattgtgtatagcattaatgtatctacatacctacacctatctatatataagctcatggtagaaaaccatagctaagtagcatcgcagacttaagcgtacaaagtgatcttgttcacaagtaatctgttgacagtgccaataaatgataaaaaaaaaattaacatgtcacaatgtaacggatgaccatatgcacaattccatgaattaaatctgtttcctgtgttagtcagtattcttaaataaaatttataattgaaacatga

SEQ ID NO: 421017 - DNA, 3105 bp, Homo sapiens
gattttcctccctgcagagccaatggtgcacattggtttaagcccagagatcctgcttgatccctggactcatcttgggaagggccatgggaggtcctggctagagttctgcccaaccttgaccaaccccagcaatttttccaaaagccagtcaagggcattacatttgttcctgggactggcagctgggcctcctgggtgccagtccatctcaagtgccatattctgtgatcacggatgttggctccccctcgccctatgcaagcaaacacactctcacctcctctcccagcctcccggagctctgagcacgccccacgcatggtgcaggagggactggacagatctgaggaaggccgtaaaatggggacaggaggattcagctcaggagtaagggaagaggtcctctggccccctgaagatgagaatcacccctctcagtgcacctggggatccccctaaactgtgaattctgccctggacagggctttgcccttggaggatccccaggtggccttacccgtgattcttactcggcatcctccattccccaaactccctcctccctgttaaatgtcaacctagacctggacctgggtgggaggaaactgtagcctgagtgtccacagggacacacgtgagccacagggctagaagcacaggcccgtcaccccaggaggaaaagcccagggtctggggcagcagagccatcgcatcatgtttcccagggcaacttgaggtctgacttttggctccctcgccctaagaggctcttcctctcttttgctcatccaccttcacaccacttgtgagctgacccccaggaacagcttggctgttccaccagagcagagggaatcattgctggactggatttcttctggagggaagcaccatgaattaaaggtgccagagctccatgcatggaaaagtggcctgttggttcaacgtggtttccttgtacttgatcctcctgaaatgagagattttcctgagatgactgagtatggagattaccaggcagatgataccgaaatgcttaaaggggctgtggctgaggctgtagcatctctgctggaggtgagacactctgggaactgatttgacctcgaatgctcctaaaagagaacttgatagcctgacagcagagaagtattatttggtggggagtctgagaaagcctggcttgtattatctgtccaaaaggaagcctcttcatctcctcggtgccttggttgactattttggaaataggcatatcaaggttcctgattcagcactttgctcttttaataacaaatcgtccaaagatctcaaagtaagggtttttttttttagcttccactcttccgcagacttggtcatcgacctatttttgttgaagaatgaaaggcaatgacaagtttaacatatacaaattcgtgaattcttgttcattttgcattcctgcagtcagtgctaatccgtcgttcttaatcaggagttctgccaggtttaaggtcacctgcactcccagccaagtggtgatgtatgcctcccactctctgcaaggttttcctcatttttatattcatttattcatcattcattcattcacctaactttcattaaatagctgcaccatcccaggccctgtgcggagcatcgggaatacaaagatgagataaaacattgtccctgcccccgggggctcacatgccactggaaacaacagactcttaaactaacaattcaagcaggcgccaagtgctacgacagaggtgtgaataaaagcatcaggaaatcggatggagaaccaccattcacccaagggtcagaggaggtttcaaagaaaaggtgtcattggagcagtgttttgcagaatgagccagagttcaccaagcaggcaaggcaaggaagggtgttgcagagagggaacagcatatgcaaaggcatatcagttcatggcatcacatctttcactggggaagccagtttccacaggcagcatcccaaggttcaataaggccttatttaacaagcaagcaaaatgcaaaccaaaccattattcatttattggcttaagtatgctttctcctgaaaactttagcattgggtgcaaatattcagtatggttctcggagtccaaagggttttaagccagggcacaaccagaaaagtggctctctttggtagggagaggggctccaatatttcgttctctccccatggggcactgacagagaaatgaaatagttttatctggaaaattccagagctattatttactccttaccaagggaagttacttcttgtaaaaacttttaagccatttatcaacaagttcttgttgactcagggcataatgagttcctgagacatgctcttttgggggctggggctttaggtagaagaatttcaaggaaaagaattctcagcagagctcaagattgtagaaactcagcagaagctggtaaaaacatggggagcccggaggacaggctgctgtccagggcagaggccatgaagaagtgcttccgtggccgacagtctggaaatgaatccatcatacattagtgccatagagtttagtaaccgtccagcaagtgtcatcacttttacagaaaacaaggtccagtaatagcaagtcttagtacatcctcacttttattataaatgggtgttttttcataatttttactgacgctcagtaaccatgcaaaattgtgtatagcattaatgtatctacatacctacacctatctatatataagctcatggtagaaaaccatagctaagtagcatcgcagacttaagcgtacaaagtgatcttgttcacaagtaatctgttgacagtgccaataaatgataaaaaaaaaattaacatgtcacaatgtaacggatgaccatatgcacaattccatgaattaaatctgtttcctgtgttagtcagtattcttaaataaaatttataattgaaacatgaaaaaacgaaaaacaacgaacgaacaaagagcgcaaaaacacgagaggaagcaaaaggccaccacgagcagcacggaggggcggaacaaatgagggacgaagaggaaggaggcagagcgagaggagagaaggcgacggagg

SEQ ID NO: 421018 - DNA, 2674 bp, Homo sapiens
gattttcctccctgcagagccaatggtgcacattggtttaagcccagagatcctgcttgatccctggactcatcttgggaagggccatgggaggtcctggctagagttctgcccaaccttgaccaaccccagcaatttttccaaaagccagtcaagggcattacatttgttcctgggactggcagctgggcctcctgggtgccagtccatctcaagtgccatattctgtgatcacggatgttggctccccctcgccctatgcaagcaaacacactctcacctcctctcccagcctcccggagctctgagcacgccccacgcatggtgcaggagggactggacagatctgaggaaggccgtaaaatggggacaggaggattcagctcaggagtaagggaagaggtcctctggccccctgaagatgagaatcacccctctcagtgcacctggggatccccctaaactgtgaattctgccctggacagggctttgcccttggaggatccccaggtggccttacccgtgattcttactcggcatcctccattccccaaactccctcctccctgttaaatgtcaacctagacctggacctgggtgggaggaaactgtagcctgagtgtccacagggacacacgtgagccacagggctagaagcacaggcccgtcaccccaggaggaaaagcccagggtctggggcagcagagccatcgcatcatgtttcccagggcaacttgaggtctgacttttggctccctcgccctaagaggctcttcctctcttttgctcatccaccttcacaccacttgtgagctgacccccaggaacagcttggctgttccaccagagcagagggaatcattgctggactggatttcttctggagggaagcaccatgaattaaaggtgccagagctccatgcatggaaaagtggcctgttggttcaacgtggtttccttgtacttgatcctcctgaaatgagagattttcctgagatgactgagtatggagattaccaggcagatgataccgaaatgcttaaaggggctgtggctgaggctgtagcatctctgctggaggtgagacactctgggaactgatttgacctcgaatgctcctaaaagagaacttgatagcctgacagcagagaagtattatttggtggggagtctgagaaagcctggcttgtattatctgtccaaaaggaagcctcttcatctcctcggtgccttggttgactattttggaaataggcatatcaaggttcctgattcagcactttgctcttttaataacaaatcgtccaaagatctcaaagtaagggtttttttttttagcttccactcttccgcagacttggtcatcgacctatttttgttgaagaatgaaaggcaatgacaagtttaacatatacaaattcgtgaattcttgttcattttgcattcctgcagtcagtgctaatccgtcgttcttaatcaggagttctgccaggtttaaggtcacctgcactcccagccaagtggtgatgtatgcctcccactctctgcaaggttttcctcatttttatattcatttattcatcattcattcattcacctaactttcattaaatagctgcaccatcccaggccctgtgcggagcatcgggaatacaaagatgagataaaacattgtccctgcccccgggggctcacatgccactggaaacaacagactcttaaactaacaattcaagcaggcgccaagtgctacgacagaggtgtgaataaaagcatcaggaaatcggatggagaaccaccattcacccaagggtcagaggaggtttcaaagaaaaggtgtcattggagcagtgttttgcagaatgagccagagttcaccaagcaggcaaggcaaggaagggtgttgcagagagggaacagcatatgcaaaggcatatcagttcatggcatcacatctttcactggggaagccagtttccacaggcagcatcccaaggttcaataaggccttatttaacaagcaagcaaaatgcaaaccaaaccattattcatttattggcttaagtatgctttctcctgaaaactttagcattgggtgcaaatattcagtatggttctcggagtccaaagggttttaagccagggcacaaccagaaaagtggctctctttggtagggagaggggctccaatatttcgttctctccccatggggcactgacagagaaatgaaatagttttatctggaaaattccagagctattatttactccttaccaagggaagttacttcttgtaaaaacttttaagccatttatcaacaagttcttgttgactcagggcataatgagttcctgagacatgctcttttgggggctggggctttaggtagaagaatttcaaggaaaagaattctcagcagagctcaagattgtagaaactcagcagaagctggtaaaaacatggggagcccggaggacaggctgctgtccagggcagaggccatgaagaagtgcttccgtggccgacagtctggaaatgaatccatcatacattagtgccatagagtttagtaaccgtccagcaagtgtcatcacttttacagaaaacaaggtccagtaatagcaagtcttagtacatcctcacttttattggggatcctcagagtcgagcgtt

SEQ ID NO: 421019 - DNA, 2911 bp, Homo sapiens
gattttcctccctgcagagccaatggtgcacattggtttaagcccagagatcctgcttgatccctggactcatcttgggaagggccatgggaggtcctggctagagttctgcccaaccttgaccaaccccagcaatttttccaaaagccagtcaagggcattacatttgttcctgggactggcagctgggcctcctgggtgccagtccatctcaagtgccatattctgtgatcacggatgttggctccccctcgccctatgcaagcaaacacactctcacctcctctcccagcctcccggagctctgagcacgccccacgcatggtgcaggagggactggacagatctgaggaaggccgtaaaatggggacaggaggattcagctcaggagtaagggaagaggtcctctggccccctgaagatgagaatcacccctctcagtgcacctggggatccccctaaactgtgaattctgccctggacagggctttgcccttggaggatccccaggtggccttacccgtgattcttactcggcatcctccattccccaaactccctcctccctgttaaatgtcaacctagacctggacctgggtgggaggaaactgtagcctgagtgtccacagggacacacgtgagccacagggctagaagcacaggcccgtcaccccaggaggaaaagcccagggtctggggcagcagagccatcgcatcatgtttcccagggcaacttgaggtctgacttttggctccctcgccctaagaggctcttcctctcttttgctcatccaccttcacaccacttgtgagctgacccccaggaacagcttggctgttccaccagagcagagggaatcattgctggactggatttcttctggagggaagcaccatgaattaaaggtgccagagctccatgcatggaaaagtggcctgttggttcaacgtggtttccttgtacttgatcctcctgaaatgagagattttcctgagatgactgagtatggagattaccaggcagatgataccgaaatgcttaaaggggctgtggctgaggctgtagcatctctgctggaggtgagacactctgggaactgatttgacctcgaatgctcctaaaagagaacttgatagcctgacagcagagaagtattatttggtggggagtctgagaaagcctggcttgtattatctgtccaaaaggaagcctcttcatctcctcggtgccttggttgactattttggaaataggcatatcaaggttcctgattcagcactttgctcttttaataacaaatcgtccaaagatctcaaagtaagggtttttttttttagcttccactcttccgcagacttggtcatcgacctatttttgttgaagaatgaaaggcaatgacaagtttaacatatacaaattcgtgaattcttgttcattttgcattcctgcagtcagtgctaatccgtcgttcttaatcaggagttctgccaggtttaaggtcacctgcactcccagccaagtggtgatgtatgcctcccactctctgcaaggttttcctcatttttatattcatttattcatcattcattcattcacctaactttcattaaatagctgcaccatcccaggccctgtgcggagcatcgggaatacaaagatgagataaaacattgtccctgcccccgggggctcacatgccactggaaacaacagactcttaaactaacaattcaagcaggcgccaagtgctacgacagaggtgtgaataaaagcatcaggaaatcggatggagaaccaccattcacccaagggtcagaggaggtttcaaaggcaaggcaaggaagggtgttgcagagagggaacagcatatgcaaaggcatatcagttcatggcatcacatctttcactggggaagccagtttccacaggcagcatcccaaggttcaataaggccttatttaacaagcaagcaaaatgcaaaccaaaccattattcatttattggcttaagtatgctttctcctgaaaactttagcattgggtgcaaatattcagtatggttctcggagtccaaagggttttaagccagggcacaaccagaaaagtggctctctttggtagggagaggggctccaatatttcgttctctccccatggggcactgacagagaaatgaaatagttttatctggaaaattccagagctattatttactccttaccaagggaagttacttcttgtaaaaacttttaagccatttatcaacaagttcttgttgactcagggcataatgagttcctgagacatgctcttttgggggctggggctttaggtagaagaatttcaaggaaaagaattctcagcagagctcaagattgtagaaactcagcagaagctggtaaaaacatggggagcccggaggacaggctgctgtccagggcagaggccatgaagaagtgcttccgtggccgacagtctggaaatgaatccatcatacattagtgccatagagtttagtaaccgtccagcaagtgtcatcacttttacagaaaacaaggtccagtaatagcaagtcttagtacatcctcacttttattataaatgggtgttttttcataatttttactgacgctcagtaaccatgcaaaattgtgtatagcattaatgtatctacatacctacacctatctatatataagctcatggtagaaaaccatagctaagtagcatcgcagacttaagcgtacaaagtgatcttgttcacaagtaatctgttgacagtgccaataaatgataaaaaaaaaattaacatgtcacaatgtaacggatgaccatatgcacaattccatgaattaaatctgtttcctgtgttagtcagtattcttaaataaaatttataattgaaacatga

SEQ ID NO: 421020 - DNA, 2911 bp, Homo sapiens
gattttcctccctgcagagccaatggtgcacattggtttaagcccagagatcctgcttgatccctggactcatcttgggaagggccatgggaggtcctggctagagttctgcccaaccttgaccaaccccagcaatttttccaaaagccagtcaagggcattacatttgttcctgggactggcagctgggcctcctgggtgccagtccatctcaagtgccatattctgtgatcacggatgttggctccccctcgccctatgcaagcaaacacactctcacctcctctcccagcctcccggagctctgagcacgccccacgcatggtgcaggagggactggacagatctgaggaaggccgtaaaatggggacaggaggattcagctcaggagtaagggaagaggtcctctggccccctgaagatgagaatcacccctctcagtgcacctggggatccccctaaactgtgaattctgccctggacagggctttgcccttggaggatccccaggtggccttacccgtgattcttactcggcatcctccattccccaaactccctcctccctgttaaatgtcaacctagacctggacctgggtgggaggaaactgtagcctgagtgtccacagggacacacgtgagccacagggctagaagcacaggcccgtcaccccaggaggaaaagcccagggtctggggcagcagagccatcgcatcatgtttcccagggcaacttgaggtctgacttttggctccctcgccctaagaggctcttcctctcttttgctcatccaccttcacaccacttgtgagctgacccccaggaacagcttggctgttccaccagagcagagggaatcattgctggactggatttcttctggagggaagcaccatgaattaaaggtgccagagctccatgcatggaaaagtggcctgttggttcaacgtggtttccttgtacttgatcctcctgaaatgagagattttcctgagatgactgagtatggagattaccaggcagatgataccgaaatgcttaaaggggctgtggctgaggctgtagcatctctgctggaggtgagacactctgggaactgatttgacctcgaatgctcctaaaagagaacttgatagcctgacagcagagaagtattatttggtggggagtctgagaaagcctggcttgtattatctgtccaaaaggaagcctcttcatctcctcggtgccttggttgactattttggaaataggcatatcaaggttcctgattcagcactttgctcttttaataacaaatcgtccaaagatctcaaagtaagggtttttttttttagcttccactcttccgcagacttggtcatcgacctatttttgttgaagaatgaaaggcaatgacaagtttaacatatacaaattcgtgaattcttgttcattttgcattcctgcagtcagtgctaatccgtcgttcttaatcaggagttctgccaggtttaaggtcacctgcactcccagccaagtggtgatgtatgcctcccactctctgcaaggttttcctcatttttatattcatttattcatcattcattcattcacctaactttcattaaatagctgcaccatcccaggccctgtgcggagcatcgggaatacaaagatgagataaaacattgtccctgcccccgggggctcacatgccactggaaacaacagactcttaaactaacaattcaagcaggcgccaagtgctacgacagaggtgtgaataaaagcatcaggaaatcggatggagaaccaccattcacccaagggtcagaggaggtttcaaagaaaaggtgtcattggagcagtgttttgcagaatgagccagagttcaccaagcaggcaaggcaaggaagggtgttgcagagagggaacagcatatgcaaaggcatatcagttcatggcatcacatctttcactggggaagccagtttccacaggcagcatcccaaggttcaataaggccttatttaacaagcaagcaaaatgcaaaccaaaccattattcatttattggcttaagtatgctttctcctgaaaactttagcattgggtgcaaatattcagtatggttctcggagtccaaagggttttaagccagggcacaaccagaaaagtggctctctttggtagggagaggggctccaatatttcgttctctccccatggggcactgacagagaaatgaaatagttttatctggaaaattccagagctattatttactccttaccaagggaagttacttcttgtaaaaacttttaagccatttatcaacaagttcttgttgactcagggcataatgagttcctgagacatgctcttttgggggctggggctttaggtagaagaatttcaaggaaaagaattctcagcagagctcaagattgtagaaactcagcagaagctggtaaaaacatggggagcccggaggacaggctgctgtccagggcagaggccatgaagaagtgcttccgtggccgacagtctggaaatgaatccatcatacattagtgccatagagtttagtaaccgtccagcaagtgtcatcacttttacagaaaacaaggtccagtaatagcaagtcttagtacatcctcacttttattataaatgggtgttttttcataatttttactgacgctcagtaaccatgcaaaattgtgtatagcattaatgtatctacatacctacacctatctatatataagctcatggtagaaaaccatagctaagtagcatcgcagacttaagcgtacaaagtgatcttgttcacaagtaatctgttgacagtgccaataaatgataaaaaaaatctgtttcctgtgttagtcagtattcttaaataaaatttataattgaaacatga

SEQ ID NO: 421021 - DNA, 3129 bp, Homo sapiens
gctccataaaagctgcccggggaagccaggagagcgaagggcggacgtactcgccacggcacccaggctgcgcgcacgcggtcccggtgtgcagctggagagcgagcggccaccgggagcccccggcacagcccgcgcccgccccgcaggagcccgcgaagatgccccggcgcagcctgcacgcggcggccgtgctcctgctggtgatcttaaaggaacagccttccagcccggccccagtgaacggttccaagtggacttattttggtcctgatggggagaatagctggtccaagaagtacccgtcgtgtgggggcctgctgcagtcccccatagacctgcacagtgacatcctccagtatgacgccagcctcacgcccctcgagttccaaggctacaatctgtctgccaacaagcagtttctcctgaccaacaatggccattcagtgaagctgaacctgccctcggacatgcacatccagggcctccagtctcgctacagtgccacgcagctgcacctgcactgggggaacccgaatgacccgcacggctctgagcacaccgtcagcggacagcacttcgccgccgagctgcacattgtccattataactcagacctttatcctgacgccagcactgccagcaacaagtcagaaggcctcgctgtcctggctgttctcattgagatgggctccttcaatccgtcctatgacaagatcttcagtcaccttcaacatgtaaagtacaaaggccaggaagcattcgtcccgggattcaacattgaagagctgcttccggagaggaccgctgaatattaccgctaccgggggtccctgaccacacccccttgcaaccccactgtgctctggacagttttccgaaaccccgtgcaaatttcccaggagcagctgctggctttggagacagccctgtactgcacacacatggacgacccttcccccagagaaatgatcaacaacttccggcaggtccagaagttcgatgagaggctggtatacacctccttctcccaaggcatcatcctctcactggccctggctggcattcttggcatctgtattgtggtggtggtgtccatttggcttttcagaaggaagagtatcaaaaaaggtgataacaagggagtcatttacaagccagccaccaagatggagactgaggcccacgcttgaggtccccggagctcccgggcacatccaggaaggaccttgctttggaccctacacacttcggctctctggacacttgcgacacctcaaggtgttctctgtagctcaatctgcaaacatgccaggcctcagggatcctctgctgggtgcctccttgccttgggaccatggccaccccagagccatccgatcgatggatgggatgcactctcagaccaagcagcaggaattcaaagctgcttgctgtaactgtgtgagattgtgaagtggtctgaattctggaatcacaaaccaagccatgctggtgggccattaatggttggaaaacactttcatccggggctttgccagagcgtgctttcaagtgtcctggaaagtctgctgcttctccaagctttcagacaagaatgtgcactctctgcttaggttttgcttgggaaactcaacttctttcctctggagacggggcatctccctctgatttccttctgctatgacaaaacctttaatctgcaccttacaactcggggacaaatggggacaggaaggatcaagttgtagagagaaaaagaaaacaagagatatacattgtgatatattagggacactttcacagtcctgtcctctggatcacagacactgcacagaccttagggaatggcaggttcaagttccacttcttggtggggatgagaagggagagagagctagagggacaaagagaatgagaagacatggatgatctgggagagtctcactttggaatcagaattggaatcacattctgtttatcaagccataatgtaaggacagaataatacaatattaagtccaaatccaacctcctgtcagtggagcagttatgttttatactctacagattttacaaataatgaggctgttccttgaaaatgtgttgttgctgtgtcctggaggagacatgagttccgagatgacccaatctgcctttgaatctggaggaaataggcagaaacaaaatgactgtagaacttattctctgtaggccaaatttcatttcagccacttctgcaggatccctactgccaacctggaatggagacttttatctacttctctctctctgaagatgtcaaatcgtggtttagatcaaatatatttcaagctataaaagcaggaggttatctgtgcagggggctggcatcatgtatttaggggcaagtaataatggaatgctactaagatactccatattcttccccgaatcacacagacagtttctgacaggcgcaactcctccattttcctcccgcaggtgagaaccctgtggagatgagtcagtgccatgactgagaaggaaccgacccctagttgagagcaccttgcagttccccgagaactttctgattcacagtctcattttgacagcatgaaatgtcctcttgaagcatagctttttaaatatctttttccttctactcctccctctgactctaagaattctctcttctggaatcgcttgaacccaggaggcggaggttgcagtaagccaaggtcatgccactgcactctagcctgggtgacagagcgagactccatctcaaaaaaaaaaaaaaaaaaaaaatttattctgtaccatcacaatttttcacaaacgatggcaagccttatgtctggggagcctgtttggctaggcaaagttacaagtgacctaagtgggagcccaaatggtgtggtgtgtctctcaggtgtcggtgtgtgtgtgtgcactcaagacctctaacagcctcgaaagcctggggtgggcatcccggccttgccattagcatgcctcatgcatcatcagatgacaaggacaaccctcatgacgaagcaacatgaattaggggcctcttggccttggtccaaaattgtcaatcagaaatgaacataaaggactccagagcagtgggactgtctg

SEQ ID NO: 421022 - DNA, 3075 bp, Homo sapiens
gctccataaaagctgcccggggaagccaggagagcgaagggcggacgtactcgccacggcacccaggctgcgcgcacgcggtcccggtgtgcagctggagagcgagcggccaccgggagcccccggcacagcccgcgcccgccccgcaggagcccgcgaagatgccccggcgcagcctgcacgcggcggccgtgctcctgctggtgatcttaaaggaacagccttccagcccggccccagtgaacggttccaagtggacttattttggtcctgatggggagaatagctggtccaagaagtacccgtcgtgtgggggcctgctgcagtcccccatagacctgcacagtgacatcctccagtatgacgccagcctcacgcccctcgagttccaaggctacaatctgtctgccaacaagcagtttctcctgaccaacaatggccattcagtgaagctgaacctgccctcggacatgcacatccagggcctccagtctcgctacagtgccacgcagctgcacctgcactgggggaacccgaatgacccgcacggctctgagcacaccgtcagcggacagcacttcgccgccgagctgcacattgtccattataactcagacctttatcctgacgccagcactgccagcaacaagtcagaaggcctcgctgtcctggctgttctcattgagatgggctccttcaatccgtcctatgacaagatcttcagtcaccttcaacatgtaaagtacaaaggccaggaagcattcgtcccgggattcaacattgaagagctgcttccggagaggaccgctgaatattaccgctaccgggggtccctgaccacacccccttgcaaccccactgtgctctggacagttttccgaaaccccgtgcaaatttcccaggagcagctgctggctttggagacagccctgtactgcacacacatggacgacccttcccccagagaaatgatcaacaacttccggcaggtccagaagttcgatgagaggctggtatacacctccttctcccaaggcatcatcctctcactggccctggctggcattcttggcatctgtattgtggtggtggtgtccatttggcttttcagaaggaagagtatcaaaaaaggtgataacaagggagtcatttacaagccagccaccaagatggagactgaggcccacgcttgaggtccccggagctcccgggcacatccaggaaggaccttgctttggaccctacacacttcggctctctggacacttgcgacacctcaaggtgttctctgtagctcaatctgcaaacatgccaggcctcagggatcctctgctgggtgcctccttgccttgggaccatggccaccccagagccatccgatcgatggatgggatgcactctcagaccaagcagcaggaattcaaagctgcttgctgtaactgtgtgagattgtgaagtggtctgaattctggaatcacaaaccaagccatgctggtgggccattaatggttggaaaacactttcatccggggctttgccagagcgtgctttcaagtgtcctggaaagtctgctgcttctccaagctttcagacaagaatgtgcactctctgcttaggttttgcttgggaaactcaacttctttcctctggagacggggcatctccctctgatttccttctgctatgacaaaacctttaatctgcaccttacaactcggggacaaatggggacaggaaggatcaagttgtagagagaaaaagctggatcacagacactgcacagaccttagggaatggcaggttcaagttccacttcttggtggggatgagaagggagagagagctagagggacaaagagaatgagaagacatggatgatctgggagagtctcactttggaatcagaattggaatcacattctgtttatcaagccataatgtaaggacagaataatacaatattaagtccaaatccaacctcctgtcagtggagcagttatgttttatactctacagattttacaaataatgaggctgttccttgaaaatgtgttgttgctgtgtcctggaggagacatgagttccgagatgacccaatctgcctttgaatctggaggaaataggcagaaacaaaatgactgtagaacttattctctgtaggccaaatttcatttcagccacttctgcaggatccctactgccaacctggaatggagacttttatctacttctctctctctgaagatgtcaaatcgtggtttagatcaaatatatttcaagctataaaagcaggaggttatctgtgcagggggctggcatcatgtatttaggggcaagtaataatggaatgctactaagatactccatattcttccccgaatcacacagacagtttctgacaggcgcaactcctccattttcctcccgcaggtgagaaccctgtggagatgagtcagtgccatgactgagaaggaaccgacccctagttgagagcaccttgcagttccccgagaactttctgattcacagtctcattttgacagcatgaaatgtcctcttgaagcatagctttttaaatatctttttccttctactcctccctctgactctaagaattctctcttctggaatcgcttgaacccaggaggcggaggttgcagtaagccaaggtcatgccactgcactctagcctgggtgacagagcgagactccatctcaaaaaaaaaaaaaaaaaaaaaatttattctgtaccatcacaatttttcacaaacgatggcaagccttatgtctggggagcctgtttggctaggcaaagttacaagtgacctaagtgggagcccaaatggtgtggtgtgtctctcaggtgtcggtgtgtgtgtgtgcactcaagacctctaacagcctcgaaagcctggggtgggcatcccggccttgccattagcatgcctcatgcatcatcagatgacaaggacaaccctcatgacgaagcaacatgaattaggggcctcttggccttggtccaaaattgtcaatcagaaatgaacataaaggactccagagcagtgggactgtctg

SEQ ID NO: 421023 - DNA, 3200 bp, Homo sapiens
gctccataaaagctgcccggggaagccaggagagcgaagggcggacgtactcgccacggcacccaggctgcgcgcacgcggtcccggtgtgcagctggagagcgagcggccaccgggagcccccggcacagcccgcgcccgccccgcaggagcccgcgaagatgccccggcgcagcctgcacgcggcggccgtgctcctgctggtgatcttaaaggaacagccttccagcccggccccagtgaacgtccaagtggacttattttggtcctgatggggagaatagctggtccaaagaagtaccccagtcagatgcttgtgcggagccattggcattggccaagggttcaccacccgccaagttacggaaccattgcgacaagttgaccgatcctccagtatgacgccagcctcacgcccctcgagttccaaggctacaatctgtctgccaacaagcagtttctcctgaccaacaatggccattcagtgaagctgaacctgccctcggacatgcacatccagggcctccagtctcgctacagtgccacgcagctgcacctgcactgggggaacccgaatgacccgcacggctctgagcacaccgtcagcggacagcacttcgccgccgagctgcacattgtccattataactcagacctttatcctgacgccagcactgccagcaacaagtcagaaggcctcgctgtcctggctgttctcattgagatgggctccttcaatccgtcctatgacaagatcttcagtcaccttcaacatgtaaagtacaaaggccaggaagcattcgtcccgggattcaacattgaagagctgcttccggagaggaccgctgaatattaccgctaccgggggtccctgaccacacccccttgcaaccccactgtgctctggacagttttccgaaaccccgtgcaaatttcccaggagcagctgctggctttggagacagccctgtactgcacacacatggacgacccttcccccagagaaatgatcaacaacttccggcaggtccagaagttcgatgagaggctggtatacacctccttctcccaagtgcaagtctgtactgcggcaggactgagtctgggcatcatcctctcactggccctggctggcattcttggcatctgtattgtggtggtggtgtccatttggcttttcagaaggaagagtatcaaaaaaggtgataacaagggagtcatttacaagccagccaccaagatggagactgaggcccacgcttgaggtccccggagctcccgggcacatccaggaaggaccttgctttggaccctacacacttcggctctctggacacttgcgacacctcaaggtgttctctgtagctcaatctgcaaacatgccaggcctcagggatcctctgctgggtgcctccttgccttgggaccatggccaccccagagccatccgatcgatggatgggatgcactctcagaccaagcagcaggaattcaaagctgcttgctgtaactgtgtgagattgtgaagtggtctgaattctggaatcacaaaccaagccatgctggtgggccattaatggttggaaaacactttcatccggggctttgccagagcgtgctttcaagtgtcctggaaagtctgctgcttctccaagctttcagacaagaatgtgcactctctgcttaggttttgcttgggaaactcaacttctttcctctggagacggggcatctccctctgatttccttctgctatgacaaaacctttaatctgcaccttacaactcggggacaaatggggacaggaaggatcaagttgtagagagaaaaagaaaacaagagatatacattgtgatatattagggacactttcacagtcctgtcctctggatcacagacactgcacagaccttagggaatggcaggttcaagttccacttcttggtggggatgagaagggagagagagctagagggacaaagagaatgagaagacatggatgatctgggagagtctcactttggaatcagaattggaatcacattctgtttatcaagccataatgtaaggacagaataatacaatattaagtccaaatccaacctcctgtcagtggagcagttatgttttatactctacagattttacaaataatgaggctgttccttgaaaatgtgttgttgctgtgtcctggaggagacatgagttccgagatgacccaatctgcctttgaatctggaggaaataggcagaaacaaaatgactgtagaacttattctctgtaggccaaatttcatttcagccacttctgcaggatccctactgccaacctggaatggagacttttatctacttctctctctctgaagatgtcaaatcgtggtttagatcaaatatatttcaagctataaaagcaggaggttatctgtgcagggggctggcatcatgtatttaggggcaagtaataatggaatgctactaagatactccatattcttccccgaatcacacagacagtttctgacaggcgcaactcctccattttcctcccgcaggtgagaaccctgtggagatgagtcagtgccatgactgagaaggaaccgacccctagttgagagcaccttgcagttccccgagaactttctgattcacagtctcattttgacagcatgaaatgtcctcttgaagcatagctttttaaatatctttttccttctactcctccctctgactctaagaattctctcttctggaatcgcttgaacccaggaggcggaggttgcagtaagccaaggtcatgccactgcactctagcctgggtgacagagcgagactccatctcaaaaaaaaaaaaaaaaaaaaaatttattctgtaccatcacaatttttcacaaacgatggcaagccttatgtctggggagcctgtttggctaggcaaagttacaagtgacctaagtgggagcccaaatggtgtggtgtgtctctcaggtgtcggtgtgtgtgtgtgcactcaagacctctaacagcctcgaaagcctggggtgggcatcccggccttgccattagcatgcctcatgcatcatcagatgacaaggacaaccctcatgacgaagcaacatgaattaggggcctcttggccttggtccaaaattgtcaatcagaaatgaacataaaggactccagagcagtgggactgtctg

SEQ ID NO: 421024 - DNA, 452 bp, Homo sapiens
gcatcatcctctcactggccctggctggcattcttggcatctgtattgtggtggtggtgtccatttggcttttcagaaggaagaggtgagctggtttgggtccaaaatgggaatggacagctatgtgtccatgatgattagtctgcctgggaaggcagctttgtggcatgaagagccgcagtcacctggaccaccacttaccctaggagggccgtccccaaagcacccgtgccctggcctcctttgcatgagacgcacatgtgaccctggtcgttcaaagggttcaggggtcactgtgctcagatttggaagcgtgtgtgccttgcttgctgctattgcatggccttggacgagtctcttgacttggggcttgtgcctgaagttaagcagccaggctgtcttcttatcaagatctttacatatgctttttggtctatgaattcaaaaagaaa

SEQ ID NO: 421025 - DNA, 3162 bp, Homo sapiens
gctccataaaagctgcccggggaagccaggagagcgaagggcggacgtactcgccacggcacccaggctgcgcgcacgcggtcccggtgtgcagctggagagcgagcggccaccgggagcccccggcacagcccgcgcccgccccgcaggagcccgcgaagatgccccggcgcagcctgcacgcggcggccgtgctcctgctggtgatcttaaaggaacagccttccagcccggccccagtgaacggttccaagtggacttattttggtcctgatggggagaatagctggtccaagaagtacccgtcgtgtgggggcctgctgcagtcccccatagacctgcacagtgacatcctccagtatgacgccagcctcacgcccctcgagttccaaggctacaatctgtctgccaacaagcagtttctcctgaccaacaatggccattcagtgaagctgaacctgccctcggacatgcacatccagggcctccagtctcgctacagtgccacgcagctgcacctgcactgggggaacccgaatgacccgcacggctctgagcacaccgtcagcggacagcacttcgccgccgagctgcacattgtccattataactcagacctttatcctgacgccagcactgccagcaacaagtcagaaggcctcgctgtcctggctgttctcattgagatgggctccttcaatccgtcctatgacaagatcttcagtcaccttcaacatgtaaagtacaaaggccaggaagcattcgtcccgggattcaacattgaagagctgcttccggagaggaccgctgaatattaccgctaccgggggtccctgaccacacccccttgcaaccccactgtgctctggacagttttccgaaaccccgtgcaaatttcccaggagcagctgctggctttggagacagccctgtactgcacacacatggacgacccttcccccagagaaatgatcaacaacttccggcaggtccagaagttcgatgagaggctggtatacacctccttctcccaagtgcaagtctgtactgcggcaggactgagtctgggcatcatcctctcactggccctggctggcattcttggcatctgtattgtggtggtggtgtccatttggcttttcagaaggaagagtatcaaaaaaggtgataacaagggagtcatttacaagccagccaccaagatggagactgaggcccacgcttgaggtccccggagctcccgggcacatccaggaaggaccttgctttggaccctacacacttcggctctctggacacttgcgacacctcaaggtgttctctgtagctcaatctgcaaacatgccaggcctcagggatcctctgctgggtgcctccttgccttgggaccatggccaccccagagccatccgatcgatggatgggatgcactctcagaccaagcagcaggaattcaaagctgcttgctgtaactgtgtgagattgtgaagtggtctgaattctggaatcacaaaccaagccatgctggtgggccattaatggttggaaaacactttcatccggggctttgccagagcgtgctttcaagtgtcctggaaagtctgctgcttctccaagctttcagacaagaatgtgcactctctgcttaggttttgcttgggaaactcaacttctttcctctggagacggggcatctccctctgatttccttctgctatgacaaaacctttaatctgcaccttacaactcggggacaaatggggacaggaaggatcaagttgtagagagaaaaagaaaacaagagatatacattgtgatatattagggacactttcacagtcctgtcctctggatcacagacactgcacagaccttagggaatggcaggttcaagttccacttcttggtggggatgagaagggagagagagctagagggacaaagagaatgagaagacatggatgatctgggagagtctcactttggaatcagaattggaatcacattctgtttatcaagccataatgtaaggacagaataatacaatattaagtccaaatccaacctcctgtcagtggagcagttatgttttatactctacagattttacaaataatgaggctgttccttgaaaatgtgttgttgctgtgtcctggaggagacatgagttccgagatgacccaatctgcctttgaatctggaggaaataggcagaaacaaaatgactgtagaacttattctctgtaggccaaatttcatttcagccacttctgcaggatccctactgccaacctggaatggagacttttatctacttctctctctctgaagatgtcaaatcgtggtttagatcaaatatatttcaagctataaaagcaggaggttatctgtgcagggggctggcatcatgtatttaggggcaagtaataatggaatgctactaagatactccatattcttccccgaatcacacagacagtttctgacaggcgcaactcctccattttcctcccgcaggtgagaaccctgtggagatgagtcagtgccatgactgagaaggaaccgacccctagttgagagcaccttgcagttccccgagaactttctgattcacagtctcattttgacagcatgaaatgtcctcttgaagcatagctttttaaatatctttttccttctactcctccctctgactctaagaattctctcttctggaatcgcttgaacccaggaggcggaggttgcagtaagccaaggtcatgccactgcactctagcctgggtgacagagcgagactccatctcaaaaaaaaaaaaaaaaaaaaaatttattctgtaccatcacaatttttcacaaacgatggcaagccttatgtctggggagcctgtttggctaggcaaagttacaagtgacctaagtgggagcccaaatggtgtggtgtgtctctcaggtgtcggtgtgtgtgtgtgcactcaagacctctaacagcctcgaaagcctggggtgggcatcccggccttgccattagcatgcctcatgcatcatcagatgacaaggacaaccctcatgacgaagcaacatgaattaggggcctcttggccttggtccaaaattgtcaatcagaaatgaacataaaggactccagagcagtgggactgtctg

SEQ ID NO: 421026 - DNA, 3117 bp, Homo sapiens
gctccataaaagctgcccggggaagccaggagagcgaagggcggacgtactcgccacggcacccaggctgcgcgcacgcggtcccggtgtgcagctggagagcgagcggccaccgggagcccccggcacagcccgcgcccgccccgcaggagcccgcgaagatgccccggcgcagcctgcacgcggcggccgtgctcctgctggtgatcttaaaggaacagccttccagcccggccccagtgaacggttccaagtggacttattttggtcctgatggggagaatagctggtccaagaagtacccgtcgtgtgggggcctgctgcagtcccccatagacctgcacagtgacatcctccagtatgacgccagcctcacgcccctcgagttccaaggctacaatctgtctgccaacaagcagtttctcctgaccaacaatggccattcagtgaagctgaacctgccctcggacatgcacatccagggcctccagtctcgctacagtgccacgcagctgcacctgcactgggggaacccgaatgacccgcacggctctgagcacaccgtcagcggacagcacttcgccgccgagctgcacattgtccattataactcagacctttatcctgacgccagcactgccagcaacaagtcagaaggcctcgctgtcctggctgttctcattgagatgggctccttcaatccgtcctatgacaagatcttcagtcaccttcaacatgtaaagtacaaaggccaggaagcattcgtcccgggattcaacattgaagagctgcttccggagaggaccgctgaatattaccgctaccgggggtccctgaccacacccccttgcaaccccactgtgctctggacagttttccgaaaccccgtgcaaatttcccaggagcagctgctggctttggagacagccctgtactgcacacacatggacgacccttcccccagagaaatgatcaacaacttccggcaggtccagaagttcgatgagaggctggtatacacctccttctcccaagtgcaagtctgtactgcggcaggactgagtctgggcatcatcctctcactggccctggctggcattcttggcatctgtattgtggtggtggtgtccatttggcttttcagaaggaagagtatcaaaaaaggtgataacaagggagtcatttacaagccagccaccaagatggagactgaggcccacgcttgaggtccccggagctcccgggcacatccaggaaggaccttgctttggaccctacacacttcggctctctggacacttgcgacacctcaaggtgttctctgtagctcaatctgcaaacatgccaggcctcagggatcctctgctgggtgcctccttgccttgggaccatggccaccccagagccatccgatcgatggatgggatgcactctcagaccaagcagcaggaattcaaagctgcttgctgtaactgtgtgagattgtgaagtggtctgaattctggaatcacaaaccaagccatgctggtgggccattaatggttggaaaacactttcatccggggctttgccagagcgtgctttcaagtgtcctggaaagtctgctgcttctccaagctttcagacaagaatgtgcactctctgcttaggttttgcttgggaaactcaacttctttcctctggagacggggcatctccctctgatttccttctgctatgacaaaacctttaatctgcaccttacaactcggggacaaatggggacaggaaggatcaagttgtagagagaaaaagaaaacaagagatatacattgtgatatattagggacactttcacagtcctgtcctctggatcacagacactgcacagaccttagggaatggcaggttcaagttccacttcttggtggggatgagaagggagagagagctagagggacaaagagaatgagaagacatggatgatctgggagagtctcactttggaatcagaattggaatcacattctgtttatcaagccataatgtaaggacagaataatacaatattaagtccaaatccaacctcctgtcagtggagcagttatgttttatactctacagattttacaaataatgaggctgttccttgaaaatgtgttgttgctgtgtcctggaggagacatgagttccgagatgacccaatctgcctttgaatctggaggaaataggcagaaacaaaatgactgtagaacttattctctgtaggccaaatttcatttcagccacttctgcaggatccctactgccaacctggaatggagacttttatctacttctctctctctgaagatgtcaaatcgtggtttagatcaaatatatttcaagctataaaagcaggaggttatctgtgcagggggctggcatcatgtatttaggggcaagtaataatggaatgctactaagatactccatattcttccccgaatcacacagacagtttctgacaggcgcaactcctccatgactgagaaggaaccgacccctagttgagagcaccttgcagttccccgagaactttctgattcacagtctcattttgacagcatgaaatgtcctcttgaagcatagctttttaaatatctttttccttctactcctccctctgactctaagaattctctcttctggaatcgcttgaacccaggaggcggaggttgcagtaagccaaggtcatgccactgcactctagcctgggtgacagagcgagactccatctcaaaaaaaaaaaaaaaaaaaaaatttattctgtaccatcacaatttttcacaaacgatggcaagccttatgtctggggagcctgtttggctaggcaaagttacaagtgacctaagtgggagcccaaatggtgtggtgtgtctctcaggtgtcggtgtgtgtgtgtgcactcaagacctctaacagcctcgaaagcctggggtgggcatcccggccttgccattagcatgcctcatgcatcatcagatgacaaggacaaccctcatgacgaagcaacatgaattaggggcctcttggccttggtccaaaattgtcaatcagaaatgaacataaaggactccagagcagtgggactgtctg

SEQ ID NO: 421027 - DNA, 782 bp, Homo sapiens
gctccataaaagctgcccggggaagccaggagagcgaagggcggacgtactcgccacggcacccaggctgcgcgcacgcggtcccggtgtgcagctggagagcgagcggccaccgggagcccccggcacagcccgcgcccgccccgcaggagcccgcgaagatgccccggcgcagcctgcacgcggcggccgtgctcctgctggtgatcttaaaggaacagccttccagcccggccccagtgaacggttccaagtggacttattttggtcctgatggggagaatagctggtccaagaagtacccgtcgtgtgggggcctgctgcagtcccccatagacctgcacagtgacatcctccagtatgacgccagcctcacgcccctcgagttccaaggctacaatctgtctgccaacaagcagtttctcctgaccaacaatggccattcagtgaagctgaacctgccctcggacatgcacatccagggcctccagtctcgctacagtgccacgcagctgcacctgcactgggggaacccgaatgacccgcacggctctgagcacaccgtcagcggacagcacttcgccgccgagctgcacattgtccattataactcagacctttatcctgacgccagcactgccagcaacaagtcagaaggcctcgctgtcctggctgttctcattgagatgggctccttcaatccgtcctatgacaagatcttcagtcaccttcaacatgtaaagtacaaagcccaggtagctttagtttagaattccacattt

SEQ ID NO: 421028 - DNA, 3215 bp, Homo sapiens
gccggggtcacgggcagttgcagccgcggccgagcagccagccgctaagaaagagctcgccgctgccgctcccggagccgccgaggccagcttcgcggcgctgccccgcggcgggagaggaggctgcagaagagcggaggcggccagcgggagcggcggggctcagcgcgcacactcagcggccggggagcctcccgagctctgcgcccgcacgcgccagccgcggctcgcgcctttcttggcctccgggcgcccgacctctcctcccccgcgccggctcgccggggccgcggcggcccaaggagcagcatgaatctgcggctctgcgtgcaggcgctcctgctgctctggctctccttgaccgcggtgtgtggagggtccctgatgccgcttcccgatgggaatgggctggaagacggcaatgtccgccacctggtgcagcccagagggtcaaggaatgggccagggccctggcagggaggtcggaggaaattccgccgccagcggccccgcctctcccataagggacccatgcctttctgaagcaggactgaaggggcccccaagtgcccaccccctgcggttatgtctcctccatagattggtctgcttctctggaggcctcacgtccattcagctctcacctcgcacctgctgtagccaccagtgggcccagctcttctcacctgcctgcttcccccagtggcgtgctcctggctgtagtttggatgattcccgttctctcacaagaatccgtccagtccatcttcctggcccctccctggactgactttggagacctagccccagaaagcctcccttcttctccaggtcccctccgccctagtccctgcctgtctcatctaacgccccaaaccttcatttgggccttccttcctcatgtctgccctgagcgcggggtggaagtgctcccttctgtgggctccagcagatcccttgttttcctgtcagttggacccctcacctggcctccagggaagaatgcagagaaaagcaaggagagactctagttaagaggtgctggctgcggggatccagacagggcacattgggggcatggaagtgccagggtggttttcaggagctctggtgaagtgggtggagcatcagcgtttgctcagttaagggagaggtagagaggggcccgtgaagtcctttgtcacttctcttgccttagtgtgcctcccaatactcccttcttcctgcccccacaccccatccccagctagcccaagctccaggtcaggaggggagggtgctgggcctgacatggctatataccctcccaggagtaaaagccaagcaagaggttgtttttgccaagaatcacagaatgttagagctgacaggacccttgaaggtcacttagccttcttaggcaaacgcctgcaaaacagaagcctggagaggggagtgacctgctcagagtcattgcagagccgggatggggaccaggtctcccatctcctactttatgacgccctcttccctcttgatgatgtcttttcaaagcaaatgaagtgccttttcccgaggctggggctgggggtggctgggaggggaagggaagggagaggcaagctggctgtgaactgtcctgttgtggggctggagctgctcccacctccctgacctacccctgctgcaccattcccccagctgggctggaaggttccataactggccagctgcccccataactggcagcattcccagacccagggtactctaataggggcggctcaggcactgagactaccgctcaaccccagggtggttttcaggagtccgaggtagccttcaatcactggactccatggccttcccttcgtgttgaccggaccttccttccagggcttttcctttgggggaggcggagaggggagaagaaggaagggaagggcagaaggaaggagggaagaaaagaaagcaaaggaacagaaggaaggaaagaaagatgggaggaagtgcagcaggaatagcaccctctccccgggaggccctagcttccgtgaggggccatcaccagccattccttggagggggctttctccccttttgcttgagcagggttcccaggagggagaaagagaagacaagagcctgatgcccaactttgtgtgtgtggggacgggggagtcagggccccccaagtcccacaatagccccaatgtttgcctatccacctcccccaagcccctttacctatgctgctgctaacgctgctgctgctgctgctgctgctgcttaaaggctcatgcttggagtggggactggtcggtgcccagaaagtctcttctgccactgacgcccccatcagggattgggccttctttcccccttcctttctgtgtctcctgcctcatcggcctgccatgacctgcagccaagcccagccccgtggggaaggggagaaagtgggggatggctaagaaagctgggagatagggaacagaagagggtagtgggtgggctaggggggctgccttatttaaagtggttgtttatgattcttatactaatttatacaaagatattaaggccctgttcattaagaaattgttcccttcccctgtgttcaatgtttgtaaagattgttctgtgtaaatatgtctttataataaacagttaaaagctgacagttcgcccttactcttggaggtcatgttcaggaggggcattcctttcccctgggggtcatgggtgtccccatgcccacatattgcacgtgcagggaggtaagtgcctgcatcccaaatcggttctaggtcaactggcctcaaactgatttgccatgagctcacaaaatgaatccctatgcttaatgaccaggtcacataaaatccagcccacttacaggttttctggcatctgtttgggtgtcctaatttttttggcagtgtcatttgaagaatttttttaaagcagtttatttaagaacatactgattaaatgcaggatcgctactaaaaattgttttgtatccttggtgggtgtcttctgctattttatctacttttgaacactttcaggactttttagccagtttgcctttcttgaaaaatgttatgttttcagcaataaatacatttgataatgactttgtttgtatcattttatgtttcacaaagtagagttgcttgatgaatgagatagcctgaaaaataaaatgcaaagagttcaatataattctg

SEQ ID NO: 421029 - DNA, 3121 bp, Homo sapiens
  misc_feature (3020)..(3021): n is a, c, g, or t
  misc_feature (3025)..(3025): n is a, c, g, or t
  misc_feature (3044)..(3044): n is a, c, g, or t
  misc_feature (3046)..(3046): n is a, c, g, or t
  misc_feature (3088)..(3088): n is a, c, g, or t
  misc_feature (3094)..(3095): n is a, c, g, or t
  misc_feature (3107)..(3107): n is a, c, g, or t
  misc_feature (3111)..(3111): n is a, c, g, or t
gccggggtcacgggcagttgcagccgcggccgagcagccagccgctaagaaagagctcgccgctgccgctcccggagccgccgaggccagcttcgcggcgctgccccgcggcgggagaggaggctgcagaagagcggaggcggccagcgggagcggcggggctcagcgcgcacactcagcggccggggagcctcccgagctctgcgcccgcacgcgccagccgcggctcgcgcctttcttggcctccgggcgcccgacctctcctcccccgcgccggctcgccggggccgcggcggcccaaggagcagcatgaatctgcggctctgcgtgcaggcgctcctgctgctctggctctccttgaccgcggtgtgtggagggtccctgatgccgcttcccgatgggaatgggctggaagacggcaatgtccgccacctggtgcagcccagagggtcaaggaatgggccagggccctggcagggaggtcggaggaaattccgccgccagcggccccgcctctcccataagggacccatgcctttctgaagcaggactgaaggggcccccaagtgcccaccccctgcggttatgtctcctccatagattggtctgcttctctggaggcctcacgtccattcagctctcacctcgcacctgctgtagccaccagtgggcccagctcttctcacctgcctgcttcccccagtggcgtgctcctggctgtagtttggatgattcccgttctctcacaagaatccgtccagtccatcttcctggcccctccctggactgactttggagacctagccccagaaagcctcccttcttctccaggtcccctccgccctagtccctgcctgtctcatctaacgccccaaaccttcatttgggccttccttcctcatgtctgccctgagcgcggggtggaagtgctcccttctgtgggctccagcagatcccttgttttcctgtcagttggacccctcacctggcctccagggaagaatgcagagaaaagcaaggagagactctagttaagaggtgctggctgcggggatccagacagggcacattgggggcatggaagtgccagggtggttttcaggagctctggtgaagtgggtggagcatcagcgtttgctcagttaagggagaggtagagaggggcccgtgaagtcctttgtcacttctcttgccttagtgtgcctcccaatactcccttcttcctgcccccacaccccatccccagctagcccaagctccaggtcaggaggggagggtgctgggcctgacatggctatataccctcccaggagtaaaagccaagcaagaggttgtttttgccaagaatcacagaatgttagagctgacaggacccttgaaggtcacttagccttcttaggcaaacgcctgcaaaacagaagcctggagaggggagtgacctgctcagagtcattgcagagccgggatggggaccaggtctcccatctcctactttatgacgccctcttccctcttgatgatgtcttttcaaagcaaatgaagtgccttttcccgaggctggggctgggggtggctgggaggggaagggaagggagaggcaagctggctgtgaactgtcctgttgtggggctggagctgctcccacctccctgacctacccctgctgcaccattcccccagctgggctggaaggttccataactggccagctgcccccataactggcagcattcccagacccagggtactctaataggggcggctcaggcactgagactaccgctcaaccccagggtggttttcaggagtccgaggtagccttcaatcactggactccatggccttcccttcgtgttgaccggaccttccttccagggcttttcctttgggggaggcggagaggggagaagaaggaagggaagggcagaaggaaggagggaagaaaagaaagcaaaggaacagaaggaaggaaagaaagatgggaggaagtgcagcaggaatagcaccctctccccgggaggccctagcttccgtgaggggccatcaccagccattccttggagggggctttctccccttttgcttgagcagggttcccaggagggagaaagagaagacaagagcctgatgcccaactttgtgtgtgtggggacgggggagtcagggccccccaagtcccacaatagccccaatgtttgcctatccacctcccccaagcccctttacctatgctgctgctaacgctgctgctgctgctgctgctgctgcttaaaggctcatgcttggagtggggactggtcggtgcccagaaagtctcttctgccactgacgcccccatcagggattgggccttctttcccccttcctttctgtgtctcctgcctcatcggcctgccatgacctgcagccaagcccagccccgtggggaaggggagaaagtgggggatggctaagaaagctgggagatagggaacagaagagggtagtgggtgggctaggggggctgccttatttaaagtggttgtttatgattcttatactaatttatacaaagatattaaggccctgttcattaagaaattgttcccttcccctgtgttcaatgtttgtaaagattgttctgtgtaaatatgtctttataataaacagttaaaagctgacagttcgcccttactcttggaggtcatgttcaggaggggcattcctttcccctgggggtcatgggtgtccccatgcccacatattgcacgtgcagggaggtaagtgcctgcatcccaaatcggttctaggtcaactggcctcaaactgatttgccatgagctcacaaaatgaatccctatgcttaatgaccaggtcacataaaatccagcccacttacaggttttctggcatctgtttgggtgtcctaatttttttggcagtgtcatttgaagaatttttttaaagcagtttatttaagaacatactgattaaatgcaggatcgccaccaaccactgatttgaaaccaaggagggggggnngggnaagggaaggaacgattggngncaataagaacttttaagacagaatacctttcttaaaaaatgnaatgtnnacagcaagaaanacanttgagaatga

SEQ ID NO: 421030 - DNA, 2621 bp, Homo sapiens
gccggggtcacgggcagttgcagccgcggccgagcagccagccgctaagaaagagctcgccgctgccgctcccggagccgccgaggccagcttcgcggcgctgccccgcggcgggagaggaggctgcagaagagcggaggcggccagcgggagcggcggggctcagcgcgcacactcagcggccggggagcctcccgagctctgcgcccgcacgcgccagccgcggctcgcgcctttcttggcctccgggcgcccgacctctcctcccccgcgccggctcgccggggccgcggcggcccaaggagcagcatgaatctgcggctctgcgtgcaggcgctcctgctgctctggctctccttgaccgcggtgtgtggagggtccctgatgccgcttcccgatgggaatgggctggaagacggcaatgtccgccacctggtgcagcccagagggtcaaggaatgggccagggccctggcagggaggtcggaggaaattccgccgccagcggccccgcctctcccataagggacccatgcctttctgaagcaggactgaaggggcccccaagtgcccaccccctgcggttatgtctcctccatagattggtctgcttctctggaggcctcacgtccattcagctctcacctcgcacctgctgtagccaccagtgggcccagctcttctcacctgcctgcttcccccagtggcgtgctcctggctgtagtttggatgattcccgttctctcacaagaatccgtccagtccatcttcctggcccctccctggactgactttggagacctagccccagaaagcctcccttcttctccaggtcccctccgccctagtccctgcctgtctcatctaacgccccaaaccttcatttgggccttccttcctcatgtctgccctgagcgcggggtggaagtgctcccttctgtgggctccagcagatcccttgttttcctgtcagttggacccctcacctggcctccagggaagaatgcagagaaaagcaaggagagactctagttaagaggtgctggctgcggggatccagacagggcacattgggggcatggaagtgccagggtggttttcaggagctctggtgaagtgggtggagcatcagcgtttgctcagttaagggagaggtagagaggggcccgtgaagtcctttgtcacttctcttgccttagtgtgcctcccaatactcccttcttcctgcccccacaccccatccccagctagcccaagctccaggtcaggaggggagggtgctgggcctgacatggctatataccctcccaggagtaaaagccaagcaagaggttgtttttgccaagaatcacagaatgttagagctgacaggacccttgaaggtcacttagccttcttaggcaaacgcctgcaaaacagaagcctggagaggggagtgacctgctcagagtcattgcagagccgggatggggaccagtctccccttttgcttgagcagggttcccaggagggagaaagagaagacaagagcctgatgcccaactttgtgtgtgtggggacgggggagtcagggccccccaagtcccacaatagccccaatgtttgcctatccacctcccccaagcccctttacctatgctgctgctaacgctgctgctgctgctgctgctgctgcttaaaggctcatgcttggagtggggactggtcggtgcccagaaagtctcttctgccactgacgcccccatcagggattgggccttctttcccccttcctttctgtgtctcctgcctcatcggcctgccatgacctgcagccaagcccagccccgtggggaaggggagaaagtgggggatggctaagaaagctgggagatagggaacagaagagggtagtgggtgggctaggggggctgccttatttaaagtggttgtttatgattcttatactaatttatacaaagatattaaggccctgttcattaagaaattgttcccttcccctgtgttcaatgtttgtaaagattgttctgtgtaaatatgtctttataataaacagttaaaagctgacagttcgcccttactcttggaggtcatgttcaggaggggcattcctttcccctgggggtcatgggtgtccccatgcccacatattgcacgtgcagggaggtaagtgcctgcatcccaaatcggttctaggtcaactggcctcaaactgatttgccatgagctcacaaaatgaatccctatgcttaatgaccaggtcacataaaatccagcccacttacaggttttctggcatctgtttgggtgtcctaatttttttggcagtgtcatttgaagaatttttttaaagcagtttatttaagaacatactgattaaatgcaggatcgctactaaaaattgttttgtatccttggtgggtgtcttctgctattttatctacttttgaacactttcaggactttttagccagtttgcctttcttgaaaaatgttatgttttcagcaataaatacatttgataatgactttgtttgtatcattttatgtttcacaaagtagagttgcttgatgaatgagatagcctgaaaaataaaatgcaaagagttcaatataattctg

SEQ ID NO: 421031 - DNA, 3019 bp, Homo sapiens
gccggggtcacgggcagttgcagccgcggccgagcagccagccgctaagaaagagctcgccgctgccgctcccggagccgccgaggccagcttcgcggcgctgccccgcggcgggagaggaggctgcagaagagcggaggcggccagcgggagcggcggggctcagcgcgcacactcagcggccggggagcctcccgagctctgcgcccgcacgcgccagccgcggctcgcgcctttcttggcctccgggcgcccgacctctcctcccccgcgccggctcgccggggccgcggcggcccaaggagcagcatgaatctgcggctctgcgtgcaggcgctcctgctgctctggctctccttgaccgcggtgtgtggagggtccctgatgccgcttcccgatgggaatgggctggaagacggcaatgtccgccacctggtgcagcccagagggtcaaggaatgggccagggccctggcagggaggtcggaggaaattccgccgccagcggccccgcctctcccataagggacccatgcctttctgaagcaggactgaaggggcccccaagtgcccaccccctgcggttatgtctcctccatagattggtctgcttctctggaggcctcacgtccattcagctctcacctcgcacctgctgtagccaccagtgggcccagctcttctcacctgcctgcttcccccagtggcgtgctcctggctgtagtttggatgattcccgttctctcacaagaatccgtccagtccatcttcctggcccctccctggactgactttggagacctagccccagaaagcctcccttcttctccaggtcccctccgccctagtccctgcctgtctcatctaacgccccaaaccttcatttgggccttccttcctcatgtctgccctgagcgcggggtggaagtgctcccttctgtgggctccagcagatcccttgttttcctgtcagttggacccctcacctggcctccagggaagaatgcagagaaaagcaaggagagactctagttaagaggtgctggctgcggggatccagacagggcacattgggggcatggaagtgccagggtggttttcaggagctctggtgaagtgggtggagcatcagcgtttgctcagttaagggagaggtagagaggggcccgtgaagtcctttgtcacttctcttgccttagtgtgcctcccaatactcccttcttcctgcccccacaccccatccccagctagcccaagctccaggtcaggaggggagggtgctgggcctgacatggctatataccctcccaggagtaaaagccaagcaagaggttgtttttgccaagaatcacagaatgttagagctgacaggacccttgaaggtcacttagccttcttaggcaaacgcctgcaaaacagaagcctggagaggggagtgacctgctcagagtcattgcagagccgggatggggaccaggtctcccatctcctactttatgacgccctcttccctcttgatgatgtcttttcaaagcaaatgaagtgccttttcccgaggctggggctgggggtggctgggaggggaagggaagggagaggcaagctggctgtgaactgtcctgttgtggggctggagctgctcccacctccctgacctacccctgctgcaccattcccccagctgggctggaaggttccataactggccagctgcccccataactggcagcattcccagacccagggtactctaataggggcggctcaggcactgagactaccgctcaaccccagggtggttttcaggagtccgaggtagccttcaatcactggactccatggccttcccttcgtgttgaccggaccttccttccagggcttttcctttgggggaggcggagaggggagaagaaggaagggaagggcagaaggaaggagggaagaaaagaaagcaaaggaacagaaggaaggaaagaaagatgggaggaagtgcagcaggaatagcaccctctccccgggaggccctagcttccgtgaggggccatcaccagccattccttggagggggctttctccccttttgcttgagcagggttcccaggagggagaaagagaagacaagagcctgatgcccaactttgtgtgtgtggggacgggggagtcagggccccccaagtcccacaatagccccaatgtttgcctatccacctcccccaagccccccccgtggggaaggggagaaagtgggggatggctaagaaagctgggagatagggaacagaagagggtagtgggtgggctaggggggctgccttatttaaagtggttgtttatgattcttatactaatttatacaaagatattaaggccctgttcattaagaaattgttcccttcccctgtgttcaatgtttgtaaagattgttctgtgtaaatatgtctttataataaacagttaaaagctgacagttcgcccttactcttggaggtcatgttcaggaggggcattcctttcccctgggggtcatgggtgtccccatgcccacatattgcacgtgcagggaggtaagtgcctgcatcccaaatcggttctaggtcaactggcctcaaactgatttgccatgagctcacaaaatgaatccctatgcttaatgaccaggtcacataaaatccagcccacttacaggttttctggcatctgtttgggtgtcctaatttttttggcagtgtcatttgaagaatttttttaaagcagtttatttaagaacatactgattaaatgcaggatcgctactaaaaattgttttgtatccttggtgggtgtcttctgctattttatctacttttgaacactttcaggactttttagccagtttgcctttcttgaaaaatgttatgttttcagcaataaatacatttgataatgactttgtttgtatcattttatgtttcacaaagtagagttgcttgatgaatgagatagcctgaaaaataaaatgcaaagagttcaatataattctg

SEQ ID NO: 421032 - DNA, 1227 bp, Homo sapiens
gccggggtcacgggcagttgcagccgcggccgagcagccagccgctaagaaagagctcgccgctgccgctcccggagccgccgaggccagcttcgcggcgctgccccgcggcgggagaggaggctgcagaagagcggaggcggccagcgggagcggcggggctcagcgcgcacactcagcggccggggagcctcccgagctctgcgcccgcacgcgccagccgcggctcgcgcctttcttggcctccgggcgcccgacctctcctcccccgcgccggctcgccggggccgcggcggcccaaggagcagcatgaatctgcggctctgcgtgcaggcgctcctgctgctctggctctccttgaccgcggtgtgtggagggtccctgatgccgcttcccgatgggaatgggctggaagacggcaatgtccgccacctggtgcagcccagagggtcaaggaatgggccagggccctggcagggaggtcggaggaaattccgccgccagcggccccgcctctcccataagggacccatgcctttctgaagcaggactgaaggggcccccaagtgcccaccccctgcggttatgtctcctccatagattggtctgcttctctggaggcctcacgtccattcagctctcacctcgcacctgctgtagccaccagtgggcccagctcttctcacctgcctgcttcccccagtggcgtgctcctggctgtagtttggatgattcccgttctctcacaagaatccgtccagtccatcttcctggcccctccctggactgactttggagacctagccccagaaagcctcccttcttctccaggtcccctccgccctagtccctgcctgtctcatctaacgccccaaaccttcatttgggccttccttcctcatgtctgccctgagcgcggggtggaagtgctcccttctgtgggctccagcagatcccttgttttcctgtcagttggacccctcacctggcctccagggaagaatgcagagaaaagcaaggagagactctagttaagaggtgctggctgcggcggttatgtctcctccatagattggtctgcttctctggaggcctcacgtccattcagctctcacctcgcacctgctgcagccaccagtgggcccagctcttctcacctgcctgcttcccccagtggcgtgctcctggctgtagtttggatgattcccgttctctcacaagaatccg

SEQ ID NO: 421033 - DNA, 547 bp, Homo sapiens
  misc_feature (506)..(506): n is a, c, g, or t
agcggcatttcaagaccgtactaggtagatggtcaattagagttcccagggtttgaagcctgtaactgctgccgccgctcaagccctccagagcattgctacggctgctgcccttgtactactacctccaaatacgttcttgctggtagtggcggcagcaggaccaattacctcttttttgctctccctcgagaagctccagatggcgtcttccgtgggcaacgtggccgacagcacagaaccaacgaaacgtatgctttccttccaagggttagctgagttggcacatcgagaatatcaggcaggagattttgaggcagctgagagacactgcatgcagctctggagacaagagccagacaatactggtgtgcttttattactttcatctatacacttccagtgtcgaaggctggacagatctgctcactttagcactctggcaattaaacagaacccccttctggcagaagcttattcgaattcggcgcctgcgcgcccgtatngctctccttcccgcgcccctccccgccccctctctccccct

SEQ ID NO: 421034 - DNA, 214 bp, Homo sapiens
gcacgagcaaagcttcaaccagagcggctacttttcgtgccaggtaatatgtcttggaagacttaattctgattagagatatagatattactggaaactaattgttttttttctattgtactctgctttatcaaagaagtaaaacatttaaatcgtactacagaaattaagatgttgtcttgcgatccttaataaatgaatgatttccctttaa

SEQ ID NO: 421035 - DNA, 8712 bp, Homo sapiens
  misc_feature (3588)..(3589): n is a, c, g, or t
agcggcatttcaagaccgtactaggtagatggtcaattagagttcccagggtttgaagcctgtaactgctgccgccgctcaagccctccagagcattgctacggctgctgcccttgtactactacctccaaatacgttcttgctggtagtggcggcagcaggaccaattacctcttttttgctctccctcgagaagctccagatggcgtcttccgtgggcaacgtggccgacagcacagaaccaacgaaacgtatgctttccttccaagggttagctgagttggcacatcgagaatatcaggcaggagattttgaggcagctgagagacactgcatgcagctctggagacaagagccagacaatactggtgtgcttttattactttcatctatacacttccagtgtcgaaggctggacagatctgctcactttagcactctggcaattaaacagaacccccttctggcagaagcttattcgaatttggggaatgtgtacaaggaaagagggcagttgcaggaggcaattgagcattatcgacatgcattgcgtctcaaacctgatttcatcgatggttatattaacctggcagccgccttggtagcagcgggtgacatggaaggggcagtacaagcttacgtctctgctcttcagtacaatcctgatttgtactgtgttcgcagtgacctggggaacctgctcaaagccctgggtcgcttggaagaagccaaggtaggtgtttgatagaacacatttaaacatcagtattatgaaaacttgtactttttgccaagtcttcaactcttcattgagctatcttcacaaaacagtcctttgaaactgaggaaaactgacggcacgaatcgcctcagaatagagcagggccaggctttggcatatctgttctaaatctgggggtaaagcaagaacctgaacattttggagcctttctgctgagctagaccatctttataacactgggctccgtcatgatcttatgtgggaataaataacattccttcaaatctgaggcttgcctgctggtgacaagcagagcgcctgtgatttggctcaagactcctatatgatgcaggtgccattgaaaatgctgctcttctaagtcctttgtggcttgtaagtggagaagaatttcatccaaatgttaccctgtaatactggcatttaaaattcttatttaaccttcctcccttcatcttcctcaccctttttacagtggaagaaaggctgttaaaatgattacaaattaataattggaacatcctgtcccttgtccccactcccttcccaagttcctttttcctcttttccaatcctagttgtctaccttcttttcttcctcatttccttcttttattcctccccaccccaaccccttaaaaaaaaaggtcagaaggacaaagctggtttgtttgggaaatggactgatcgaaagaaaacttgccaaagtggaaaggtggcttttagcattctgtgtttccaaataatgaatttgaacaccaggttgggttaattaaagcttttggtataatttaaaattaaatttataaatgcagttgtcttgttacaagccaccttacgcaaccgcgctgcaggggtgaggagtggggagaaaccagaatgcttctgaaactcccacctgttgctctgagccccacgcgcatgctaatgcgtggagtgtatgcgcagagtagctgtctgtttgactgcttcatccagggagggagaaggcttttcagcaccatctaatgttttaaaaggcactagttttaagtgtacagctcataaattctgctgacattttggattaaccttatgtaggttgccagctaatgaattgtaattgatttcaatcttagctgataaatctaattggtaatttatagaacaaatatttgataagctcctattaattgtcaccccaccaagcggacagctaacatgaattgcacttcactgcagctttagagatcggtttaggctgagacattgcgcctgccttaggttgctgacttctttatttcagagctctggagacacctagtttgaaaaatgttattctgtttttttgtgagaacttagtaaacaagaaaatactcttgagtgaaatgcaatgtatttcttttgtaatcagtgcatttgaaaattcaagccagcatattcctagtagatggaagcaaaattaagttgtctttgtagaaaatgaagagcctttcttccagcaaaaatccctgctgtatgcaatagccctgattaaccctctcccttctgcatgtttcccatattacagacttgagactgtcctcattcccatatgtaatagacatccaaagaatttcaattgctttgttgaacttttactaatgatcttgtttttattttctctcttgtttttggtttttcaccattgatattgtatttagaaggtttcaggtgggtgaaacctcctattccatgcgtaaggtgcctcgctgaagggagctcgaggcctggatctagggcagacacacaacctcctcctcctcttccagcaaggaacgcaccgaaaagtcacatgatgagaaatatggtaacgggtttgtaactgccacagcaaaacaatttgcctccatgcctgaatcttctgtcttgtggcttcagaaacagcttaaaataattttatttacaagcaagttatgtaagagaatgttttatactatagccacaattctgtcaaagataagtaaaagttaattgatattaaaaattattagagataatttacttagtaaaagcttctaactcttcttgttgttcattttttttccttttttcttctttgtttggattgcagcattctgctcttctgatgatgcgctgtgaccctgcagtagcgcaaaggctgcgcagcgttaatgcgcattgcgtgcgaatgaacccctgtgaacggttgactagatgagtaatctgattgactggctccctcagtcctattctgtagcctttttggataaaattgggttttaacatacctcgagtccaactaatctcattaaacaaatattctccatgggcctgtctagtagattaatggatctggttggccgtttgctgcgtctaggggtgttctatgtagcgcagcagttcgcagcgattgcgcagtgcgatgctgttaggttgcgcaagcgatgtttgcgctcgcattacagggacctcaacctaggtgcaatcctgtcatgtgaggtttcagcttcagtcctccttgggagacggggcattgtgagaatgtaacttaaagcctggctttatgatatcctacttggcagaaagacatttttctcctcagtagcatagttttgatgttagtgaggaacattgttgaagagcagcatttcccaaaatgtgtttcatagtattctaataaaatgcccaatgaaagaagagttccatggtcaactaagttcagggaaccctgttacactattaaaggcttagggaagtccagtaaagaaacctattttccgaatttatttgatcatgaactccttttttttcagccatacctcttaacacctcatagaacacacttnnggaaacagtgggggtaggaaaactcggcctcaagttgcgccctctaggtagcacttgaaaacatgacaagggcccgtagttgtttggataagagaactccagcatagagccttatagcaactgacttcccagttaagtcccagtgtaagggttggtctttggttggcagaactgaacatggtggtttgcacttgggttctggtggcgcaggcgcaggagcagccagctgtggcagcgcattagttttggcgcaagcgagcctatgctgcagggtcacttttggctggtcagagaaggaataatgatatcaccttcttccccccctccccccaatcttttttttttccctttacaaattttcccctttccctttacctcctttccctcccatcttctttcattaacccctcctaaggcatgttatttgaaagcaattgagacgcaaccgaactttgcagtagcttggagtaatcttggctgtgttttcaatgcacaaggggaaatttggcttgcaattcatcactttgaaaaggctgtcacccttgacccaaactttctggatgcttatatcaatttaggaaatgtcttgaaagaggcacgcatttttgacagagctgtggcagcttatcttcgtgccctaagtttgagtccaaatcacgcagtggtgcacggcaacctggcttgtgtatactatgagcaaggcctgatagatctggcaatagacacctacaggcgggctatcgaactacaaccacatttccctgatgcttactgcaacctagccaatgctctcaaagagaagggcagtgttgctgaagcagaagattgttataatacagctctccgtctgtgtcccacccatgcagactctctgaataacctagccaatatcaaacgagaacagggaaacattgaagaggcagttcgcttgtatcgtaaagcattagaagtcttcccagagtttgctgctgcccattcaaatttagcaagtgtactgcagcagcagggaaaactgcaggaagctctgatgcattataaggaggctattcgaatcagtcctacctttgctgatgcctactctaatatgggaaacactctaaaggagatgcaggatgttcagggagccttgcagtgttatacgcgtgccatccaaattaatcctgcatttgcagatgcacatagcaatctggcttccattcataaggattcagggaatattccagaagccatagcttcttaccgcacggctctgaaacttaagcctgattttcctgatgcttattgtaacttggctcattgcctgcagattgtctgtgattggacagactatgatgagcgaatgaagaagttggtcagtattgtggctgaccagttagagaagaataggttgccttctgtgcatcctcatcatagtatgctatatcctctttctcatggcttcaggaaggctattgctgagaggcacggcaacctgtgcttagataagattaatgttcttcataaaccaccatatgaacatccaaaagacttgaagctcagtgatggtcggctgcgtgtaggatatgtgagttccgactttgggaatcatcctacttctcaccttatgcagtctattccaggcatgcacaatcctgataaatttgaggtgttctgttatgccctgagcccagacgatggcacaaacttccgagtgaaggtgatggcagaagccaatcatttcattgatctttctcagattccatgcaatggaaaagcagctgatcgcatccatcaggatggaattcatatccttgtaaatatgaatggctatactaagggcgctcgaaatgagctttttgctctcaggccagctcctattcaggcaatgtggctgggataccctgggacgagtggtgcgcttttcatggattatattatcactgatcaggaaacttcgccagctgaagttgctgagcagtattccgagaaattggcttatatgccccacactttttttattggtgatcatgctaatatgttccctcacctgaagaaaaaagcagtcatcgattttaagtccaatgggcacatttatgacaatcggatagttctgaatggcatcgacctcaaagcatttcttgatagtctaccagatgtgaaaattgtcaagatgaagtgtcctgatggaggagacaatgcagatagcagtaacacagctcttaatatgcctgttattcctatgaatactattgcagaagcagttattgaaatgattaaccgaggacagattcaaataacaattaatggattcagtattagcaatggactggcaactactcagatcaacaataaggctgcaactggagaggaggttccccgtaccattattgtaaccacccgttctcagtacgggttaccagaagatgccatcgtatactgtaactttaatcagttgtataaaattgacccttctactttgcagatgtgggcaaacattctgaagcgtgttcccaatagtgtactctggctgttgcgttttccagcagtaggagaacctaatattcaacagtatgcacaaaacatgggcctgccccagaaccgtatcattttttcacctgttgctcctaaagaggaacacgtcaggagaggccagctggctgatgtctgcttggacactccactctgtaatgggcacaccacagggatggatgtcctctgggcagggacccccatggtgactatgccaggagagactcttgcttctcgagttgcagcatcccagctcacttgcttaggttgtcttgagcttattgctaaaaacagacaagaatatgaagacatagctgtgaagctgggaactgatctagaatacctgaagaaagttcgtggcaaagtctggaagcaaagaatatctagccctctgttcaacaccaaacaatacacaatggaactagagcggctctatctacagatgtgggagcattatgcagctggcaacaaacctgaccacatgattaagcctgttgaagtcactgagtcagcataaataaagactgcacaggagaattacccctatacctgagcctcaaccttctgggggaaagggaactagataacatacttcttacttgtctgtacagtaccttgttgcagatgggtgatatataatggtaatagaatagcacagccagacttgcttcctgcatggtagggagagacacaaaagatgggaaactgcttttccacaaggaatctccgtagaattttgcggcgaccagatggtgcataggtctggaaggtctgatctcccttggtcttccatgggatggttagtgtggaggggagatatagattgtccggccgctttgtgattccatggattgattcagtcttctggatttttttttctttatattttgggtactggagcttttaaaaatgtttggtttcaggtatttttattcatgtgaagtgtatatgattctcttgagataaggttttaagctaaaatgttactccctgttttagtttctgaactctgacagattgacagggactttgctggtgtagtctttttataggttttataaaccacttgagcctatatcagtcgttttagtgtctgacctaatatttggagctatcagtgctttgttgatttagatgatgactcaagattttttctggtccatttcccatttccttttcttccctgacccccataccctcacccttaaaattctcctgtaactcaactaacaaaatcaagcctgattcaaaacatcctagggtgttttaaacacaccatctggtgccaaatgaagatttttaggagtgattactaattatcaagggcacagttgtggtactgtcattgataataatatagtttttttttttttcctaattttgacctgtttcaccagtgttttacccttgactgccccttctatgctgcttccaaaagtgatagtgtgtgtaagatttttaccttcctttctaaagttttttttttttttttttaagtgagtcctgttcttcctatttctttcagcagaaatgaaatcccaggtaagtataagtattcaagtatttgatcagtaagtcacagttatctccagtgcattaaataaccttcatcaagaaataggttataggtaaaatctctgaaggatcatctatgtattcaagtaattattttttagataataactgtcttctggacttggtcttgaagtctgtacagattcagcctcagtagtagcgaactgcactgctgtttggtttggagtacaaattagacttatagtcctcctggaacttgagttattaaaatcataggaataaaattatgggatctcaacaaagggtcgagggtttgaggcttaaacaagccaacatatgaatatatgttttgtctcgctatactgcacttacgctatccagttgcaggtaattttttgtctgctagtagtgttctagattatgtctttccaaagcgctgaggctgtgcacctattctgtagttgcagctgatgcctgaatgtatcctagctgacaaattattgattaataagaacttgaatttctggaagattcttactgttaaccaaattttgagcaaggagtctcaaaggtaattctgaaccagaattacatgttaatgaacagtgtaccttttaacagtgtaaatcacggaatatccgtgaagggatttcttaatttattttttaccggttgattgaaatatcagttaaaggttgccagcatggttgcagataaactgatgtttgaaattcgctgaaatacttaatgtggaataggataatatacttccaatgccctcaaggctgtgaccttacagccattttacatagcacatcattcctcctatagggatgaactttttcctggcacgaaaagtagccgctctggttgaagctttgcttattgtaacaggcttttatttccaggtaatatgtcttggaagacttaattctgattagagatatagatattactggaaactaattgttttttttctattgtactctgctttatcaaagaagtaaaacatttaaatcgtactacagaaattaagatgttgtcttgcgatccttaataaatgaatgatttccctttaa

SEQ ID NO: 421036 - DNA, 8513 bp, Homo sapiens
  misc_feature (3389)..(3390): n is a, c, g, or t
ttttatttaataagaaaaagcttttcattttgaaatctagaatacctccacttttgaaaatctttgatttcccaaatttttcttgctatgcactagttaaaagataaggtattatataatgagcaatagcacagatctcaaactgtttgagttgcatatgggccataccttcttttctgtaacgtgcatacccatgcattaacacttgtcgccttttccagatctgctcactttagcactctggcaattaaacagaacccccttctggcagaagcttattcgaatttggggaatgtgtacaaggaaagagggcagttgcaggaggcaattgagcattatcgacatgcattgcgtctcaaacctgatttcatcgatggttatattaacctggcagccgccttggtagcagcgggtgacatggaaggggcagtacaagcttacgtctctgctcttcagtacaatcctgatttgtactgtgttcgcagtgacctggggaacctgctcaaagccctgggtcgcttggaagaagccaaggtaggtgtttgatagaacacatttaaacatcagtattatgaaaacttgtactttttgccaagtcttcaactcttcattgagctatcttcacaaaacagtcctttgaaactgaggaaaactgacggcacgaatcgcctcagaatagagcagggccaggctttggcatatctgttctaaatctgggggtaaagcaagaacctgaacattttggagcctttctgctgagctagaccatctttataacactgggctccgtcatgatcttatgtgggaataaataacattccttcaaatctgaggcttgcctgctggtgacaagcagagcgcctgtgatttggctcaagactcctatatgatgcaggtgccattgaaaatgctgctcttctaagtcctttgtggcttgtaagtggagaagaatttcatccaaatgttaccctgtaatactggcatttaaaattcttatttaaccttcctcccttcatcttcctcaccctttttacagtggaagaaaggctgttaaaatgattacaaattaataattggaacatcctgtcccttgtccccactcccttcccaagttcctttttcctcttttccaatcctagttgtctaccttcttttcttcctcatttccttcttttattcctccccaccccaaccccttaaaaaaaaaggtcagaaggacaaagctggtttgtttgggaaatggactgatcgaaagaaaacttgccaaagtggaaaggtggcttttagcattctgtgtttccaaataatgaatttgaacaccaggttgggttaattaaagcttttggtataatttaaaattaaatttataaatgcagttgtcttgttacaagccaccttacgcaaccgcgctgcaggggtgaggagtggggagaaaccagaatgcttctgaaactcccacctgttgctctgagccccacgcgcatgctaatgcgtggagtgtatgcgcagagtagctgtctgtttgactgcttcatccagggagggagaaggcttttcagcaccatctaatgttttaaaaggcactagttttaagtgtacagctcataaattctgctgacattttggattaaccttatgtaggttgccagctaatgaattgtaattgatttcaatcttagctgataaatctaattggtaatttatagaacaaatatttgataagctcctattaattgtcaccccaccaagcggacagctaacatgaattgcacttcactgcagctttagagatcggtttaggctgagacattgcgcctgccttaggttgctgacttctttatttcagagctctggagacacctagtttgaaaaatgttattctgtttttttgtgagaacttagtaaacaagaaaatactcttgagtgaaatgcaatgtatttcttttgtaatcagtgcatttgaaaattcaagccagcatattcctagtagatggaagcaaaattaagttgtctttgtagaaaatgaagagcctttcttccagcaaaaatccctgctgtatgcaatagccctgattaaccctctcccttctgcatgtttcccatattacagacttgagactgtcctcattcccatatgtaatagacatccaaagaatttcaattgctttgttgaacttttactaatgatcttgtttttattttctctcttgtttttggtttttcaccattgatattgtatttagaaggtttcaggtgggtgaaacctcctattccatgcgtaaggtgcctcgctgaagggagctcgaggcctggatctagggcagacacacaacctcctcctcctcttccagcaaggaacgcaccgaaaagtcacatgatgagaaatatggtaacgggtttgtaactgccacagcaaaacaatttgcctccatgcctgaatcttctgtcttgtggcttcagaaacagcttaaaataattttatttacaagcaagttatgtaagagaatgttttatactatagccacaattctgtcaaagataagtaaaagttaattgatattaaaaattattagagataatttacttagtaaaagcttctaactcttcttgttgttcattttttttccttttttcttctttgtttggattgcagcattctgctcttctgatgatgcgctgtgaccctgcagtagcgcaaaggctgcgcagcgttaatgcgcattgcgtgcgaatgaacccctgtgaacggttgactagatgagtaatctgattgactggctccctcagtcctattctgtagcctttttggataaaattgggttttaacatacctcgagtccaactaatctcattaaacaaatattctccatgggcctgtctagtagattaatggatctggttggccgtttgctgcgtctaggggtgttctatgtagcgcagcagttcgcagcgattgcgcagtgcgatgctgttaggttgcgcaagcgatgtttgcgctcgcattacagggacctcaacctaggtgcaatcctgtcatgtgaggtttcagcttcagtcctccttgggagacggggcattgtgagaatgtaacttaaagcctggctttatgatatcctacttggcagaaagacatttttctcctcagtagcatagttttgatgttagtgaggaacattgttgaagagcagcatttcccaaaatgtgtttcatagtattctaataaaatgcccaatgaaagaagagttccatggtcaactaagttcagggaaccctgttacactattaaaggcttagggaagtccagtaaagaaacctattttccgaatttatttgatcatgaactccttttttttcagccatacctcttaacacctcatagaacacacttnnggaaacagtgggggtaggaaaactcggcctcaagttgcgccctctaggtagcacttgaaaacatgacaagggcccgtagttgtttggataagagaactccagcatagagccttatagcaactgacttcccagttaagtcccagtgtaagggttggtctttggttggcagaactgaacatggtggtttgcacttgggttctggtggcgcaggcgcaggagcagccagctgtggcagcgcattagttttggcgcaagcgagcctatgctgcagggtcacttttggctggtcagagaaggaataatgatatcaccttcttccccccctccccccaatcttttttttttccctttacaaattttcccctttccctttacctcctttccctcccatcttctttcattaacccctcctaaggcatgttatttgaaagcaattgagacgcaaccgaactttgcagtagcttggagtaatcttggctgtgttttcaatgcacaaggggaaatttggcttgcaattcatcactttgaaaaggctgtcacccttgacccaaactttctggatgcttatatcaatttaggaaatgtcttgaaagaggcacgcatttttgacagagctgtggcagcttatcttcgtgccctaagtttgagtccaaatcacgcagtggtgcacggcaacctggcttgtgtatactatgagcaaggcctgatagatctggcaatagacacctacaggcgggctatcgaactacaaccacatttccctgatgcttactgcaacctagccaatgctctcaaagagaagggcagtgttgctgaagcagaagattgttataatacagctctccgtctgtgtcccacccatgcagactctctgaataacctagccaatatcaaacgagaacagggaaacattgaagaggcagttcgcttgtatcgtaaagcattagaagtcttcccagagtttgctgctgcccattcaaatttagcaagtgtactgcagcagcagggaaaactgcaggaagctctgatgcattataaggaggctattcgaatcagtcctacctttgctgatgcctactctaatatgggaaacactctaaaggagatgcaggatgttcagggagccttgcagtgttatacgcgtgccatccaaattaatcctgcatttgcagatgcacatagcaatctggcttccattcataaggattcagggaatattccagaagccatagcttcttaccgcacggctctgaaacttaagcctgattttcctgatgcttattgtaacttggctcattgcctgcagattgtctgtgattggacagactatgatgagcgaatgaagaagttggtcagtattgtggctgaccagttagagaagaataggttgccttctgtgcatcctcatcatagtatgctatatcctctttctcatggcttcaggaaggctattgctgagaggcacggcaacctgtgcttagataagattaatgttcttcataaaccaccatatgaacatccaaaagacttgaagctcagtgatggtcggctgcgtgtaggatatgtgagttccgactttgggaatcatcctacttctcaccttatgcagtctattccaggcatgcacaatcctgataaatttgaggtgttctgttatgccctgagcccagacgatggcacaaacttccgagtgaaggtgatggcagaagccaatcatttcattgatctttctcagattccatgcaatggaaaagcagctgatcgcatccatcaggatggaattcatatccttgtaaatatgaatggctatactaagggcgctcgaaatgagctttttgctctcaggccagctcctattcaggcaatgtggctgggataccctgggacgagtggtgcgcttttcatggattatattatcactgatcaggaaacttcgccagctgaagttgctgagcagtattccgagaaattggcttatatgccccacactttttttattggtgatcatgctaatatgttccctcacctgaagaaaaaagcagtcatcgattttaagtccaatgggcacatttatgacaatcggatagttctgaatggcatcgacctcaaagcatttcttgatagtctaccagatgtgaaaattgtcaagatgaagtgtcctgatggaggagacaatgcagatagcagtaacacagctcttaatatgcctgttattcctatgaatactattgcagaagcagttattgaaatgattaaccgaggacagattcaaataacaattaatggattcagtattagcaatggactggcaactactcagatcaacaataaggctgcaactggagaggaggttccccgtaccattattgtaaccacccgttctcagtacgggttaccagaagatgccatcgtatactgtaactttaatcagttgtataaaattgacccttctactttgcagatgtgggcaaacattctgaagcgtgttcccaatagtgtactctggctgttgcgttttccagcagtaggagaacctaatattcaacagtatgcacaaaacatgggcctgccccagaaccgtatcattttttcacctgttgctcctaaagaggaacacgtcaggagaggccagctggctgatgtctgcttggacactccactctgtaatgggcacaccacagggatggatgtcctctgggcagggacccccatggtgactatgccaggagagactcttgcttctcgagttgcagcatcccagctcacttgcttaggttgtcttgagcttattgctaaaaacagacaagaatatgaagacatagctgtgaagctgggaactgatctagaatacctgaagaaagttcgtggcaaagtctggaagcaaagaatatctagccctctgttcaacaccaaacaatacacaatggaactagagcggctctatctacagatgtgggagcattatgcagctggcaacaaacctgaccacatgattaagcctgttgaagtcactgagtcagcataaataaagactgcacaggagaattacccctatacctgagcctcaaccttctgggggaaagggaactagataacatacttcttacttgtctgtacagtaccttgttgcagatgggtgatatataatggtaatagaatagcacagccagacttgcttcctgcatggtagggagagacacaaaagatgggaaactgcttttccacaaggaatctccgtagaattttgcggcgaccagatggtgcataggtctggaaggtctgatctcccttggtcttccatgggatggttagtgtggaggggagatatagattgtccggccgctttgtgattccatggattgattcagtcttctggatttttttttctttatattttgggtactggagcttttaaaaatgtttggtttcaggtatttttattcatgtgaagtgtatatgattctcttgagataaggttttaagctaaaatgttactccctgttttagtttctgaactctgacagattgacagggactttgctggtgtagtctttttataggttttataaaccacttgagcctatatcagtcgttttagtgtctgacctaatatttggagctatcagtgctttgttgatttagatgatgactcaagattttttctggtccatttcccatttccttttcttccctgacccccataccctcacccttaaaattctcctgtaactcaactaacaaaatcaagcctgattcaaaacatcctagggtgttttaaacacaccatctggtgccaaatgaagatttttaggagtgattactaattatcaagggcacagttgtggtactgtcattgataataatatagtttttttttttttcctaattttgacctgtttcaccagtgttttacccttgactgccccttctatgctgcttccaaaagtgatagtgtgtgtaagatttttaccttcctttctaaagttttttttttttttttttaagtgagtcctgttcttcctatttctttcagcagaaatgaaatcccaggtaagtataagtattcaagtatttgatcagtaagtcacagttatctccagtgcattaaataaccttcatcaagaaataggttataggtaaaatctctgaaggatcatctatgtattcaagtaattattttttagataataactgtcttctggacttggtcttgaagtctgtacagattcagcctcagtagtagcgaactgcactgctgtttggtttggagtacaaattagacttatagtcctcctggaacttgagttattaaaatcataggaataaaattatgggatctcaacaaagggtcgagggtttgaggcttaaacaagccaacatatgaatatatgttttgtctcgctatactgcacttacgctatccagttgcaggtaattttttgtctgctagtagtgttctagattatgtctttccaaagcgctgaggctgtgcacctattctgtagttgcagctgatgcctgaatgtatcctagctgacaaattattgattaataagaacttgaatttctggaagattcttactgttaaccaaattttgagcaaggagtctcaaaggtaattctgaaccagaattacatgttaatgaacagtgtaccttttaacagtgtaaatcacggaatatccgtgaagggatttcttaatttattttttaccggttgattgaaatatcagttaaaggttgccagcatggttgcagataaactgatgtttgaaattcgctgaaatacttaatgtggaataggataatatacttccaatgccctcaaggctgtgaccttacagccattttacatagcacatcattcctcctatagggatgaactttttcctggcacgaaaagtagccgctctggttgaagctttgcttattgtaacaggcttttatttccaggtaatatgtcttggaagacttaattctgattagagatatagatattactggaaactaattgttttttttctattgtactctgctttatcaaagaagtaaaacatttaaatcgtactacagaaattaagatgttgtcttgcgatccttaataaatgaatgatttccctttaa

SEQ ID NO: 421037 - DNA, 8659 bp, Homo sapiens
  misc_feature (3588)..(3589): n is a, c, g, or t
agcggcatttcaagaccgtactaggtagatggtcaattagagttcccagggtttgaagcctgtaactgctgccgccgctcaagccctccagagcattgctacggctgctgcccttgtactactacctccaaatacgttcttgctggtagtggcggcagcaggaccaattacctcttttttgctctccctcgagaagctccagatggcgtcttccgtgggcaacgtggccgacagcacagaaccaacgaaacgtatgctttccttccaagggttagctgagttggcacatcgagaatatcaggcaggagattttgaggcagctgagagacactgcatgcagctctggagacaagagccagacaatactggtgtgcttttattactttcatctatacacttccagtgtcgaaggctggacagatctgctcactttagcactctggcaattaaacagaacccccttctggcagaagcttattcgaatttggggaatgtgtacaaggaaagagggcagttgcaggaggcaattgagcattatcgacatgcattgcgtctcaaacctgatttcatcgatggttatattaacctggcagccgccttggtagcagcgggtgacatggaaggggcagtacaagcttacgtctctgctcttcagtacaatcctgatttgtactgtgttcgcagtgacctggggaacctgctcaaagccctgggtcgcttggaagaagccaaggtaggtgtttgatagaacacatttaaacatcagtattatgaaaacttgtactttttgccaagtcttcaactcttcattgagctatcttcacaaaacagtcctttgaaactgaggaaaactgacggcacgaatcgcctcagaatagagcagggccaggctttggcatatctgttctaaatctgggggtaaagcaagaacctgaacattttggagcctttctgctgagctagaccatctttataacactgggctccgtcatgatcttatgtgggaataaataacattccttcaaatctgaggcttgcctgctggtgacaagcagagcgcctgtgatttggctcaagactcctatatgatgcaggtgccattgaaaatgctgctcttctaagtcctttgtggcttgtaagtggagaagaatttcatccaaatgttaccctgtaatactggcatttaaaattcttatttaaccttcctcccttcatcttcctcaccctttttacagtggaagaaaggctgttaaaatgattacaaattaataattggaacatcctgtcccttgtccccactcccttcccaagttcctttttcctcttttccaatcctagttgtctaccttcttttcttcctcatttccttcttttattcctccccaccccaaccccttaaaaaaaaaggtcagaaggacaaagctggtttgtttgggaaatggactgatcgaaagaaaacttgccaaagtggaaaggtggcttttagcattctgtgtttccaaataatgaatttgaacaccaggttgggttaattaaagcttttggtataatttaaaattaaatttataaatgcagttgtcttgttacaagccaccttacgcaaccgcgctgcaggggtgaggagtggggagaaaccagaatgcttctgaaactcccacctgttgctctgagccccacgcgcatgctaatgcgtggagtgtatgcgcagagtagctgtctgtttgactgcttcatccagggagggagaaggcttttcagcaccatctaatgttttaaaaggcactagttttaagtgtacagctcataaattctgctgacattttggattaaccttatgtaggttgccagctaatgaattgtaattgatttcaatcttagctgataaatctaattggtaatttatagaacaaatatttgataagctcctattaattgtcaccccaccaagcggacagctaacatgaattgcacttcactgcagctttagagatcggtttaggctgagacattgcgcctgccttaggttgctgacttctttatttcagagctctggagacacctagtttgaaaaatgttattctgtttttttgtgagaacttagtaaacaagaaaatactcttgagtgaaatgcaatgtatttcttttgtaatcagtgcatttgaaaattcaagccagcatattcctagtagatggaagcaaaattaagttgtctttgtagaaaatgaagagcctttcttccagcaaaaatccctgctgtatgcaatagccctgattaaccctctcccttctgcatgtttcccatattacagacttgagactgtcctcattcccatatgtaatagacatccaaagaatttcaattgctttgttgaacttttactaatgatcttgtttttattttctctcttgtttttggtttttcaccattgatattgtatttagaaggtttcaggtgggtgaaacctcctattccatgcgtaaggtgcctcgctgaagggagctcgaggcctggatctagggcagacacacaacctcctcctcctcttccagcaaggaacgcaccgaaaagtcacatgatgagaaatatggtaacgggtttgtaactgccacagcaaaacaatttgcctccatgcctgaatcttctgtcttgtggcttcagaaacagcttaaaataattttatttacaagcaagttatgtaagagaatgttttatactatagccacaattctgtcaaagataagtaaaagttaattgatattaaaaattattagagataatttacttagtaaaagcttctaactcttcttgttgttcattttttttccttttttcttctttgtttggattgcagcattctgctcttctgatgatgcgctgtgaccctgcagtagcgcaaaggctgcgcagcgttaatgcgcattgcgtgcgaatgaacccctgtgaacggttgactagatgagtaatctgattgactggctccctcagtcctattctgtagcctttttggataaaattgggttttaacatacctcgagtccaactaatctcattaaacaaatattctccatgggcctgtctagtagattaatggatctggttggccgtttgctgcgtctaggggtgttctatgtagcgcagcagttcgcagcgattgcgcagtgcgatgctgttaggttgcgcaagcgatgtttgcgctcgcattacagggacctcaacctaggtgcaatcctgtcatgtgaggtttcagcttcagtcctccttgggagacggggcattgtgagaatgtaacttaaagcctggctttatgatatcctacttggcagaaagacatttttctcctcagtagcatagttttgatgttagtgaggaacattgttgaagagcagcatttcccaaaatgtgtttcatagtattctaataaaatgcccaatgaaagaagagttccatggtcaactaagttcagggaaccctgttacactattaaaggcttagggaagtccagtaaagaaacctattttccgaatttatttgatcatgaactccttttttttcagccatacctcttaacacctcatagaacacacttnnggaaacagtgggggtaggaaaactcggcctcaagttgcgccctctaggtagcacttgaaaacatgacaagggcccgtagttgtttggataagagaactccagcatagagccttatagcaactgacttcccagttaagtcccagtgtaagggttggtctttggttggcagaactgaacatggtggtttgcacttgggttctggtggcgcaggcgcaggagcagccagctgtggcagcgcattagttttggcgcaagcgagcctatgctgcagggtcacttttggctggtcagagaaggaataatgatatcaccttcttccccccctccccccaatcttttttttttccctttacaaattttcccctttccctttacctcctttccctcccatcttctttcattaacccctcctaaggcatgttatttgaaagcaattgagacgcaaccgaactttgcagtagcttggagtaatcttggctgtgttttcaatgcacaaggggaaatttggcttgcaattcatcactttgaaaaggctgtcacccttgacccaaactttctggatgcttatatcaatttaggaaatgtcttgaaagaggcacgcatttttgacagagctgtggcagcttatcttcgtgccctaagtttgagtccaaatcacgcagtggtgcacggcaacctggcttgtgtatactatgagcaaggcctgatagatctggcaatagacacctacaggcgggctatcgaactacaaccacatttccctgatgcttactgcaacctagccaatgctctcaaagagaagggcagtgttgctgaagcagaagattgttataatacagctctccgtctgtgtcccacccatgcagactctctgaataacctagccaatatcaaacgagaacagggaaacattgaagaggcagttcgcttgtatcgtaaagcattagaagtcttcccagagtttgctgctgcccattcaaatttagcaagtgtactgcagcagcagggaaaactgcaggaagctctgatgcattataaggaggctattcgaatcagtcctacctttgctgatgcctactctaatatgggaaacactctaaaggagatgcaggatgttcagggagccttgcagtgttatacgcgtgccatccaaattaatcctgcatttgcagatgcacatagcaatctggcttccattcataaggattcagggaatattccagaagccatagcttcttaccgcacggctctgaaacttaagcctgattttcctgatgcttattgtaacttggctcattgcctgcagattgtctgtgattggacagactatgatgagcgaatgaagaagttggtcagtattgtggctgaccagttagagaagaataggttgccttctgtgcatcctcatcatagtatgctatatcctctttctcatggcttcaggaaggctattgctgagaggcacggcaacctgtgcttagataagattaatgttcttcataaaccaccatatgaacatccaaaagacttgaagctcagtgatggtcggctgcgtgtaggatatgtgagttccgactttgggaatcatcctacttctcaccttatgcagtctattccaggcatgcacaatcctgataaatttgaggtgttctgttatgccctgagcccagacgatggcacaaacttccgagtgaaggtgatggcagaagccaatcatttcattgatctttctcagattccatgcaatggaaaagcagctgatcgcatccatcaggatggaattcatatccttgtaaatatgaatggctatactaagggcgctcgaaatgagctttttgctctcaggccagctcctattcaggcaatgtggctgggataccctgggacgagtggtgcgcttttcatggattatattatcactgatcaggaaacttcgccagctgaagttgctgagcagtattccgagaaattggcttatatgccccacactttttttattggtgatcatgctaatatgttccctcacctgaagaaaaaagcagtcatcgattttaagtccaatgggcacatttatgacaatcggatagttctgaatggcatcgacctcaaagcatttcttgatagtctaccagatgtgaaaattgtcaagatgaagtgtcctgatggaggagacaatgcagatagcagtaacacagctcttaatatgcctgttattcctatgaatactattgcagaagcagttattgaaatgattaaccgaggacagattcaaataacaattaatggattcagtattagcaatggactggcaactactcagatcaacaataaggctgcaactggagaggaggttccccgtaccattattgtaaccacccgttctcagtacgggttaccagaagatgccatcgtatactgtaactttaatcagttgtataaaattgacccttctactttgcagatgtgggcaaacattctgaagcgtgttcccaatagtgtactctggctgttgcgttttccagcagtaggagaacctaatattcaacagtatgcacaaaacatgggcctgccccagaaccgtatcattttttcacctgttgctcctaaagaggaacacgtcaggagaggccagctggctgatgtctgcttggacactccactctgtaatgggcacaccacagggatggatgtcctctgggcagggacccccatggtgactatgccaggagagactcttgcttctcgagttgcagcatcccagctcacttgcttaggttgtcttgagcttattgctaaaaacagacaagaatatgaagacatagctgtgaagctgggaactgatctagaatacctgaagaaagttcgtggcaaagtctggaagcaaagaatatctagccctctgttcaacaccaaacaatacacaatggaactagagcggctctatctacagatgtgggagcattatgcagctggcaacaaacctgaccacatgattaagcctgttgaagtcactgagtcagcataaataaagactgcacaggagaattacccctatacctgagcctcaaccttctgggggaaagggaactagataacatacttcttacttgtctgtacagtaccttgttgcagatgggtgatatataatggtaatagaatagcacagccagacttgcttcctgcatggtagggagagacacaaaagatgggaaactgcttttccacaaggaatctccgtagaattttgcggcgaccagatggtgcataggtctggaaggtctgatctcccttggtcttccatgggatggttagtgtggaggggagatatagattgtccggccgctttgtgattccatggattgattcagtcttctggatttttttttctttatattttgggtactggagcttttaaaaatgtttggtttcaggtatttttattcatgtgaagtgtatatgattctcttgagataaggttttaagctaaaatgttactccctgttttagtttctgaactctgacagattgacagggactttgctggtgtagtctttttataggttttataaaccacttgagcctatatcagtcgttttagtgtctgacctaatatttggagctatcagtgctttgttgatttagatgatgactcaagattttttctggtccatttcccatttccttttcttccctgacccccataccctcacccttaaaattctcctgtaactcaactaacaaaatcaagcctgattcaaaacatcctagggtgttttaaacacaccatctggtgccaaatgaagatttttaggagtgattactaattatcaagggcacagttgtggtactgtcattgataataatatagtttttttttttttcctaattttgacctgtttcaccagtgttttacccttgactgccccttctatgctgcttccaaaagtgatagtgtgtgtaagatttttaccttcctttctaaagttttttttttttttttttaagtgagtcctgttcttcctatttctttcagcagaaatgaaatcccaggtaagtataagtattcaagtatttgatcagtaagtcacagttatctccagtgcattaaataaccttcatcaagaaataggttataggtaaaatctctgaaggatcatctatgtattcaagtaattattttttagataataactgtcttctggacttggtcttgaagtctgtacagattcagcctcagtagtagcgaactgcactgctgtttggtttggagtacaaattagacttatagtcctcctggaacttgagttattaaaatcataggaataatatgaatatatgttttgtctcgctatactgcacttacgctatccagttgcaggtaattttttgtctgctagtagtgttctagattatgtctttccaaagcgctgaggctgtgcacctattctgtagttgcagctgatgcctgaatgtatcctagctgacaaattattgattaataagaacttgaatttctggaagattcttactgttaaccaaattttgagcaaggagtctcaaaggtaattctgaaccagaattacatgttaatgaacagtgtaccttttaacagtgtaaatcacggaatatccgtgaagggatttcttaatttattttttaccggttgattgaaatatcagttaaaggttgccagcatggttgcagataaactgatgtttgaaattcgctgaaatacttaatgtggaataggataatatacttccaatgccctcaaggctgtgaccttacagccattttacatagcacatcattcctcctatagggatgaactttttcctggcacgaaaagtagccgctctggttgaagctttgcttattgtaacaggcttttatttccaggtaatatgtcttggaagacttaattctgattagagatatagatattactggaaactaattgttttttttctattgtactctgctttatcaaagaagtaaaacatttaaatcgtactacagaaattaagatgttgtcttgcgatccttaataaatgaatgatttccctttaa

SEQ ID NO: 421038 - DNA, 5411 bp, Homo sapiens
agcggcatttcaagaccgtactaggtagatggtcaattagagttcccagggtttgaagcctgtaactgctgccgccgctcaagccctccagagcattgctacggctgctgcccttgtactactacctccaaatacgttcttgctggtagtggcggcagcaggaccaattacctcttttttgctctccctcgagaagctccagatggcgtcttccgtgggcaacgtggccgacagcacagggttagctgagttggcacatcgagaatatcaggcaggagattttgaggcagctgagagacactgcatgcagctctggagacaagagccagacaatactggtgtgcttttattactttcatctatacacttccagtgtcgaaggctggacagatctgctcactttagcactctggcaattaaacagaacccccttctggcagaagcttattcgaatttggggaatgtgtacaaggaaagagggcagttgcaggaggcaattgagcattatcgacatgcattgcgtctcaaacctgatttcatcgatggttatattaacctggcagccgccttggtagcagcgggtgacatggaaggggcagtacaagcttacgtctctgctcttcagtacaatcctgatttgtactgtgttcgcagtgacctggggaacctgctcaaagccctgggtcgcttggaagaagccaaggcatgttatttgaaagcaattgagacgcaaccgaactttgcagtagcttggagtaatcttggctgtgttttcaatgcacaaggggaaatttggcttgcaattcatcactttgaaaaggctgtcacccttgacccaaactttctggatgcttatatcaatttaggaaatgtcttgaaagaggcacgcatttttgacagagctgtggcagcttatcttcgtgccctaagtttgagtccaaatcacgcagtggtgcacggcaacctggcttgtgtatactatgagcaaggcctgatagatctggcaatagacacctacaggcgggctatcgaactacaaccacatttccctgatgcttactgcaacctagccaatgctctcaaagagaagggcagtgttgctgaagcagaagattgttataatacagctctccgtctgtgtcccacccatgcagactctctgaataacctagccaatatcaaacgagaacagggaaacattgaagaggcagttcgcttgtatcgtaaagcattagaagtcttcccagagtttgctgctgcccattcaaatttagcaagtgtactgcagcagcagggaaaactgcaggaagctctgatgcattataaggaggctattcgaatcagtcctacctttgctgatgcctactctaatatgggaaacactctaaaggagatgcaggatgttcagggagccttgcagtgttatacgcgtgccatccaaattaatcctgcatttgcagatgcacatagcaatctggcttccattcataaggattcagggaatattccagaagccatagcttcttaccgcacggctctgaaacttaagcctgattttcctgatgcttattgtaacttggctcattgcctgcagattgtctgtgattggacagactatgatgagcgaatgaagaagttggtcagtattgtggctgaccagttagagaagaataggttgccttctgtgcatcctcatcatagtatgctatatcctctttctcatggcttcaggaaggctattgctgagaggcacggcaacctgtgcttagataagattaatgttcttcataaaccaccatatgaacatccaaaagacttgaagctcagtgatggtcggctgcgtgtaggatatgtgagttccgactttgggaatcatcctacttctcaccttatgcagtctattccaggcatgcacaatcctgataaatttgaggtgttctgttatgccctgagcccagacgatggcacaaacttccgagtgaaggtgatggcagaagccaatcatttcattgatctttctcagattccatgcaatggaaaagcagctgatcgcatccatcaggatggaattcatatccttgtaaatatgaatggctatactaagggcgctcgaaatgagctttttgctctcaggccagctcctattcaggcaatgtggctgggataccctgggacgagtggtgcgcttttcatggattatattatcactgatcaggaaacttcgccagctgaagttgctgagcagtattccgagaaattggcttatatgccccacactttttttattggtgatcatgctaatatgttccctcacctgaagaaaaaagcagtcatcgattttaagtccaatgggcacatttatgacaatcggatagttctgaatggcatcgacctcaaagcatttcttgatagtctaccagatgtgaaaattgtcaagatgaagtgtcctgatggaggagacaatgcagatagcagtaacacagctcttaatatgcctgttattcctatgaatactattgcagaagcagttattgaaatgattaaccgaggacagattcaaataacaattaatggattcagtattagcaatggactggcaactactcagatcaacaataaggctgcaactggagaggaggttccccgtaccattattgtaaccacccgttctcagtacgggttaccagaagatgccatcgtatactgtaactttaatcagttgtataaaattgacccttctactttgcagatgtgggcaaacattctgaagcgtgttcccaatagtgtactctggctgttgcgttttccagcagtaggagaacctaatattcaacagtatgcacaaaacatgggcctgccccagaaccgtatcattttttcacctgttgctcctaaagaggaacacgtcaggagaggccagctggctgatgtctgcttggacactccactctgtaatgggcacaccacagggatggatgtcctctgggcagggacccccatggtgactatgccaggagagactcttgcttctcgagttgcagcatcccagctcacttgcttaggttgtcttgagcttattgctaaaaacagacaagaatatgaagacatagctgtgaagctgggaactgatctagaatacctgaagaaagttcgtggcaaagtctggaagcaaagaatatctagccctctgttcaacaccaaacaatacacaatggaactagagcggctctatctacagatgtgggagcattatgcagctggcaacaaacctgaccacatgattaagcctgttgaagtcactgagtcagcataaataaagactgcacaggagaattacccctatacctgagcctcaaccttctgggggaaagggaactagataacatacttcttacttgtctgtacagtaccttgttgcagatgggtgatatataatggtaatagaatagcacagccagacttgcttcctgcatggtagggagagacacaaaagatgggaaactgcttttccacaaggaatctccgtagaattttgcggcgaccagatggtgcataggtctggaaggtctgatctcccttggtcttccatgggatggttagtgtggaggggagatatagattgtccggccgctttgtgattccatggattgattcagtcttctggatttttttttctttatattttgggtactggagcttttaaaaatgtttggtttcaggtatttttattcatgtgaagtgtatatgattctcttgagataaggttttaagctaaaatgttactccctgttttagtttctgaactctgacagattgacagggactttgctggtgtagtctttttataggttttataaaccacttgagcctatatcagtcgttttagtgtctgacctaatatttggagctatcagtgctttgttgatttagatgatgactcaagattttttctggtccatttcccatttccttttcttccctgacccccataccctcacccttaaaattctcctgtaactcaactaacaaaatcaagcctgattcaaaacatcctagggtgttttaaacacaccatctggtgccaaatgaagatttttaggagtgattactaattatcaagggcacagttgtggtactgtcattgataataatatagtttttttttttttcctaattttgacctgtttcaccagtgttttacccttgactgccccttctatgctgcttccaaaagtgatagtgtgtgtaagatttttaccttcctttctaaagttttttttttttttttttaagtgagtcctgttcttcctatttctttcagcagaaatgaaatcccaggtaagtataagtattcaagtatttgatcagtaagtcacagttatctccagtgcattaaataaccttcatcaagaaataggttataggtaaaatctctgaaggatcatctatgtattcaagtaattattttttagataataactgtcttctggacttggtcttgaagtctgtacagattcagcctcagtagtagcgaactgcactgctgtttggtttggagtacaaattagacttatagtcctcctggaacttgagttattaaaatcataggaataaaattatgggatctcaacaaagggtcgagggtttgaggcttaaacaagccaacatatgaatatatgttttgtctcgctatactgcacttacgctatccagttgcaggtaattttttgtctgctagtagtgttctagattatgtctttccaaagcgctgaggctgtgcacctattctgtagttgcagctgatgcctgaatgtatcctagctgacaaattattgattaataagaacttgaatttctggaagattcttactgttaaccaaattttgagcaaggagtctcaaaggtaattctgaaccagaattacatgttaatgaacagtgtaccttttaacagtgtaaatcacggaatatccgtgaagggatttcttaatttattttttaccggttgattgaaatatcagttaaaggttgccagcatggttgcagataaactgatgtttgaaattcgctgaaatacttaatgtggaataggataatatacttccaatgccctcaaggctgtgaccttacagccattttacatagcacatcattcctcctatagggatgaactttttcctggcacgaaaagtagccgctctggttgaagctttgcttattgtaacaggcttttatttccaggtaatatgtcttggaagacttaattctgattagagatatagatattactggaaactaattgttttttttctattgtactctgctttatcaaagaagtaaaacatttaaatcgtactacagaaattaagatgttgtcttgcgatccttaataaatgaatgatttccctttaa

SEQ ID NO: 421039 - DNA, 8516 bp, Homo sapiens
  misc_feature (3588)..(3589): n is a, c, g, or t
agcggcatttcaagaccgtactaggtagatggtcaattagagttcccagggtttgaagcctgtaactgctgccgccgctcaagccctccagagcattgctacggctgctgcccttgtactactacctccaaatacgttcttgctggtagtggcggcagcaggaccaattacctcttttttgctctccctcgagaagctccagatggcgtcttccgtgggcaacgtggccgacagcacagaaccaacgaaacgtatgctttccttccaagggttagctgagttggcacatcgagaatatcaggcaggagattttgaggcagctgagagacactgcatgcagctctggagacaagagccagacaatactggtgtgcttttattactttcatctatacacttccagtgtcgaaggctggacagatctgctcactttagcactctggcaattaaacagaacccccttctggcagaagcttattcgaatttggggaatgtgtacaaggaaagagggcagttgcaggaggcaattgagcattatcgacatgcattgcgtctcaaacctgatttcatcgatggttatattaacctggcagccgccttggtagcagcgggtgacatggaaggggcagtacaagcttacgtctctgctcttcagtacaatcctgatttgtactgtgttcgcagtgacctggggaacctgctcaaagccctgggtcgcttggaagaagccaaggtaggtgtttgatagaacacatttaaacatcagtattatgaaaacttgtactttttgccaagtcttcaactcttcattgagctatcttcacaaaacagtcctttgaaactgaggaaaactgacggcacgaatcgcctcagaatagagcagggccaggctttggcatatctgttctaaatctgggggtaaagcaagaacctgaacattttggagcctttctgctgagctagaccatctttataacactgggctccgtcatgatcttatgtgggaataaataacattccttcaaatctgaggcttgcctgctggtgacaagcagagcgcctgtgatttggctcaagactcctatatgatgcaggtgccattgaaaatgctgctcttctaagtcctttgtggcttgtaagtggagaagaatttcatccaaatgttaccctgtaatactggcatttaaaattcttatttaaccttcctcccttcatcttcctcaccctttttacagtggaagaaaggctgttaaaatgattacaaattaataattggaacatcctgtcccttgtccccactcccttcccaagttcctttttcctcttttccaatcctagttgtctaccttcttttcttcctcatttccttcttttattcctccccaccccaaccccttaaaaaaaaaggtcagaaggacaaagctggtttgtttgggaaatggactgatcgaaagaaaacttgccaaagtggaaaggtggcttttagcattctgtgtttccaaataatgaatttgaacaccaggttgggttaattaaagcttttggtataatttaaaattaaatttataaatgcagttgtcttgttacaagccaccttacgcaaccgcgctgcaggggtgaggagtggggagaaaccagaatgcttctgaaactcccacctgttgctctgagccccacgcgcatgctaatgcgtggagtgtatgcgcagagtagctgtctgtttgactgcttcatccagggagggagaaggcttttcagcaccatctaatgttttaaaaggcactagttttaagtgtacagctcataaattctgctgacattttggattaaccttatgtaggttgccagctaatgaattgtaattgatttcaatcttagctgataaatctaattggtaatttatagaacaaatatttgataagctcctattaattgtcaccccaccaagcggacagctaacatgaattgcacttcactgcagctttagagatcggtttaggctgagacattgcgcctgccttaggttgctgacttctttatttcagagctctggagacacctagtttgaaaaatgttattctgtttttttgtgagaacttagtaaacaagaaaatactcttgagtgaaatgcaatgtatttcttttgtaatcagtgcatttgaaaattcaagccagcatattcctagtagatggaagcaaaattaagttgtctttgtagaaaatgaagagcctttcttccagcaaaaatccctgctgtatgcaatagccctgattaaccctctcccttctgcatgtttcccatattacagacttgagactgtcctcattcccatatgtaatagacatccaaagaatttcaattgctttgttgaacttttactaatgatcttgtttttattttctctcttgtttttggtttttcaccattgatattgtatttagaaggtttcaggtgggtgaaacctcctattccatgcgtaaggtgcctcgctgaagggagctcgaggcctggatctagggcagacacacaacctcctcctcctcttccagcaaggaacgcaccgaaaagtcacatgatgagaaatatggtaacgggtttgtaactgccacagcaaaacaatttgcctccatgcctgaatcttctgtcttgtggcttcagaaacagcttaaaataattttatttacaagcaagttatgtaagagaatgttttatactatagccacaattctgtcaaagataagtaaaagttaattgatattaaaaattattagagataatttacttagtaaaagcttctaactcttcttgttgttcattttttttccttttttcttctttgtttggattgcagcattctgctcttctgatgatgcgctgtgaccctgcagtagcgcaaaggctgcgcagcgttaatgcgcattgcgtgcgaatgaacccctgtgaacggttgactagatgagtaatctgattgactggctccctcagtcctattctgtagcctttttggataaaattgggttttaacatacctcgagtccaactaatctcattaaacaaatattctccatgggcctgtctagtagattaatggatctggttggccgtttgctgcgtctaggggtgttctatgtagcgcagcagttcgcagcgattgcgcagtgcgatgctgttaggttgcgcaagcgatgtttgcgctcgcattacagggacctcaacctaggtgcaatcctgtcatgtgaggtttcagcttcagtcctccttgggagacggggcattgtgagaatgtaacttaaagcctggctttatgatatcctacttggcagaaagacatttttctcctcagtagcatagttttgatgttagtgaggaacattgttgaagagcagcatttcccaaaatgtgtttcatagtattctaataaaatgcccaatgaaagaagagttccatggtcaactaagttcagggaaccctgttacactattaaaggcttagggaagtccagtaaagaaacctattttccgaatttatttgatcatgaactccttttttttcagccatacctcttaacacctcatagaacacacttnnggaaacagtgggggtaggaaaactcggcctcaagttgcgccctctaggtagcacttgaaaacatgacaagggcccgtagttgtttggataagagaactccagcatagagccttatagcaactgacttcccagttaagtcccagtgtaagggttggtctttggttggcagaactgaacatggtggtttgcacttgggttctggtggcgcaggcgcaggagcagccagctgtggcagcgcattagttttggcgcaagcgagcctatgctgcagggtcacttttggctggtcagagaaggaataatgatatcaccttcttccccccctccccccaatcttttttttttccctttacaaattttcccctttccctttacctcctttccctcccatcttctttcattaacccctcctaaggcatgttatttgaaagcaattgagacgcaaccgaactttgcagtagcttggagtaatcttggctgtgttttcaatgcacaaggggaaatttggcttgcaattcatcactttgaaaaggctgtcacccttgacccaaactttctggatgcttatatcaatttaggaaatgtcttgaaagaggcacgcatttttgacaggttgctgaagcagaagattgttataatacagctctccgtctgtgtcccacccatgcagactctctgaataacctagccaatatcaaacgagaacagggaaacattgaagaggcagttcgcttgtatcgtaaagcattagaagtcttcccagagtttgctgctgcccattcaaatttagcaagtgtactgcagcagcagggaaaactgcaggaagctctgatgcattataaggaggctattcgaatcagtcctacctttgctgatgcctactctaatatgggaaacactctaaaggagatgcaggatgttcagggagccttgcagtgttatacgcgtgccatccaaattaatcctgcatttgcagatgcacatagcaatctggcttccattcataaggattcagggaatattccagaagccatagcttcttaccgcacggctctgaaacttaagcctgattttcctgatgcttattgtaacttggctcattgcctgcagattgtctgtgattggacagactatgatgagcgaatgaagaagttggtcagtattgtggctgaccagttagagaagaataggttgccttctgtgcatcctcatcatagtatgctatatcctctttctcatggcttcaggaaggctattgctgagaggcacggcaacctgtgcttagataagattaatgttcttcataaaccaccatatgaacatccaaaagacttgaagctcagtgatggtcggctgcgtgtaggatatgtgagttccgactttgggaatcatcctacttctcaccttatgcagtctattccaggcatgcacaatcctgataaatttgaggtgttctgttatgccctgagcccagacgatggcacaaacttccgagtgaaggtgatggcagaagccaatcatttcattgatctttctcagattccatgcaatggaaaagcagctgatcgcatccatcaggatggaattcatatccttgtaaatatgaatggctatactaagggcgctcgaaatgagctttttgctctcaggccagctcctattcaggcaatgtggctgggataccctgggacgagtggtgcgcttttcatggattatattatcactgatcaggaaacttcgccagctgaagttgctgagcagtattccgagaaattggcttatatgccccacactttttttattggtgatcatgctaatatgttccctcacctgaagaaaaaagcagtcatcgattttaagtccaatgggcacatttatgacaatcggatagttctgaatggcatcgacctcaaagcatttcttgatagtctaccagatgtgaaaattgtcaagatgaagtgtcctgatggaggagacaatgcagatagcagtaacacagctcttaatatgcctgttattcctatgaatactattgcagaagcagttattgaaatgattaaccgaggacagattcaaataacaattaatggattcagtattagcaatggactggcaactactcagatcaacaataaggctgcaactggagaggaggttccccgtaccattattgtaaccacccgttctcagtacgggttaccagaagatgccatcgtatactgtaactttaatcagttgtataaaattgacccttctactttgcagatgtgggcaaacattctgaagcgtgttcccaatagtgtactctggctgttgcgttttccagcagtaggagaacctaatattcaacagtatgcacaaaacatgggcctgccccagaaccgtatcattttttcacctgttgctcctaaagaggaacacgtcaggagaggccagctggctgatgtctgcttggacactccactctgtaatgggcacaccacagggatggatgtcctctgggcagggacccccatggtgactatgccaggagagactcttgcttctcgagttgcagcatcccagctcacttgcttaggttgtcttgagcttattgctaaaaacagacaagaatatgaagacatagctgtgaagctgggaactgatctagaatacctgaagaaagttcgtggcaaagtctggaagcaaagaatatctagccctctgttcaacaccaaacaatacacaatggaactagagcggctctatctacagatgtgggagcattatgcagctggcaacaaacctgaccacatgattaagcctgttgaagtcactgagtcagcataaataaagactgcacaggagaattacccctatacctgagcctcaaccttctgggggaaagggaactagataacatacttcttacttgtctgtacagtaccttgttgcagatgggtgatatataatggtaatagaatagcacagccagacttgcttcctgcatggtagggagagacacaaaagatgggaaactgcttttccacaaggaatctccgtagaattttgcggcgaccagatggtgcataggtctggaaggtctgatctcccttggtcttccatgggatggttagtgtggaggggagatatagattgtccggccgctttgtgattccatggattgattcagtcttctggatttttttttctttatattttgggtactggagcttttaaaaatgtttggtttcaggtatttttattcatgtgaagtgtatatgattctcttgagataaggttttaagctaaaatgttactccctgttttagtttctgaactctgacagattgacagggactttgctggtgtagtctttttataggttttataaaccacttgagcctatatcagtcgttttagtgtctgacctaatatttggagctatcagtgctttgttgatttagatgatgactcaagattttttctggtccatttcccatttccttttcttccctgacccccataccctcacccttaaaattctcctgtaactcaactaacaaaatcaagcctgattcaaaacatcctagggtgttttaaacacaccatctggtgccaaatgaagatttttaggagtgattactaattatcaagggcacagttgtggtactgtcattgataataatatagtttttttttttttcctaattttgacctgtttcaccagtgttttacccttgactgccccttctatgctgcttccaaaagtgatagtgtgtgtaagatttttaccttcctttctaaagttttttttttttttttttaagtgagtcctgttcttcctatttctttcagcagaaatgaaatcccaggtaagtataagtattcaagtatttgatcagtaagtcacagttatctccagtgcattaaataaccttcatcaagaaataggttataggtaaaatctctgaaggatcatctatgtattcaagtaattattttttagataataactgtcttctggacttggtcttgaagtctgtacagattcagcctcagtagtagcgaactgcactgctgtttggtttggagtacaaattagacttatagtcctcctggaacttgagttattaaaatcataggaataaaattatgggatctcaacaaagggtcgagggtttgaggcttaaacaagccaacatatgaatatatgttttgtctcgctatactgcacttacgctatccagttgcaggtaattttttgtctgctagtagtgttctagattatgtctttccaaagcgctgaggctgtgcacctattctgtagttgcagctgatgcctgaatgtatcctagctgacaaattattgattaataagaacttgaatttctggaagattcttactgttaaccaaattttgagcaaggagtctcaaaggtaattctgaaccagaattacatgttaatgaacagtgtaccttttaacagtgtaaatcacggaatatccgtgaagggatttcttaatttattttttaccggttgattgaaatatcagttaaaggttgccagcatggttgcagataaactgatgtttgaaattcgctgaaatacttaatgtggaataggataatatacttccaatgccctcaaggctgtgaccttacagccattttacatagcacatcattcctcctatagggatgaactttttcctggcacgaaaagtagccgctctggttgaagctttgcttattgtaacaggcttttatttccaggtaatatgtcttggaagacttaattctgattagagatatagatattactggaaactaattgttttttttctattgtactctgctttatcaaagaagtaaaacatttaaatcgtactacagaaattaagatgttgtcttgcgatccttaataaatgaatgatttccctttaa

SEQ ID NO: 421040 - DNA, 4456 bp, Homo sapiens
ggttgagggtaagaataccaaaaaatatcaattttctgtagcattaccagccattaggcttaattaaacaattattagaacagtatcagtggaggctttatgattctgtacagtttttgaagactttgttttgttttctaggttgctgaagcagaagattgttataatacagctctccgtctgtgtcccacccatgcagactctctgaataacctagccaatatcaaacgagaacagggaaacattgaagaggcagttcgcttgtatcgtaaagcattagaagtcttcccagagtttgctgctgcccattcaaatttagcaagtgtactgcagcagcagggaaaactgcaggaagctctgatgcattataaggaggctattcgaatcagtcctacctttgctgatgcctactctaatatgggaaacactctaaaggagatgcaggatgttcagggagccttgcagtgttatacgcgtgccatccaaattaatcctgcatttgcagatgcacatagcaatctggcttccattcataaggattcagggaatattccagaagccatagcttcttaccgcacggctctgaaacttaagcctgattttcctgatgcttattgtaacttggctcattgcctgcagattgtctgtgattggacagactatgatgagcgaatgaagaagttggtcagtattgtggctgaccagttagagaagaataggttgccttctgtgcatcctcatcatagtatgctatatcctctttctcatggcttcaggaaggctattgctgagaggcacggcaacctgtgcttagataagattaatgttcttcataaaccaccatatgaacatccaaaagacttgaagctcagtgatggtcggctgcgtgtaggatatgtgagttccgactttgggaatcatcctacttctcaccttatgcagtctattccaggcatgcacaatcctgataaatttgaggtgttctgttatgccctgagcccagacgatggcacaaacttccgagtgaaggtgatggcagaagccaatcatttcattgatctttctcagattccatgcaatggaaaagcagctgatcgcatccatcaggatggaattcatatccttgtaaatatgaatggctatactaagggcgctcgaaatgagctttttgctctcaggccagctcctattcaggcaatgtggctgggataccctgggacgagtggtgcgcttttcatggattatattatcactgatcaggaaacttcgccagctgaagttgctgagcagtattccgagaaattggcttatatgccccacactttttttattggtgatcatgctaatatgttccctcacctgaagaaaaaagcagtcatcgattttaagtccaatgggcacatttatgacaatcggatagttctgaatggcatcgacctcaaagcatttcttgatagtctaccagatgtgaaaattgtcaagatgaagtgtcctgatggaggagacaatgcagatagcagtaacacagctcttaatatgcctgttattcctatgaatactattgcagaagcagttattgaaatgattaaccgaggacagattcaaataacaattaatggattcagtattagcaatggactggcaactactcagatcaacaataaggctgcaactggagaggaggttccccgtaccattattgtaaccacccgttctcagtacgggttaccagaagatgccatcgtatactgtaactttaatcagttgtataaaattgacccttctactttgcagatgtgggcaaacattctgaagcgtgttcccaatagtgtactctggctgttgcgttttccagcagtaggagaacctaatattcaacagtatgcacaaaacatgggcctgccccagaaccgtatcattttttcacctgttgctcctaaagaggaacacgtcaggagaggccagctggctgatgtctgcttggacactccactctgtaatgggcacaccacagggatggatgtcctctgggcagggacccccatggtgactatgccaggagagactcttgcttctcgagttgcagcatcccagctcacttgcttaggttgtcttgagcttattgctaaaaacagacaagaatatgaagacatagctgtgaagctgggaactgatctagaatacctgaagaaagttcgtggcaaagtctggaagcaaagaatatctagccctctgttcaacaccaaacaatacacaatggaactagagcggctctatctacagatgtgggagcattatgcagctggcaacaaacctgaccacatgattaagcctgttgaagtcactgagtcagcataaataaagactgcacaggagaattacccctatacctgagcctcaaccttctgggggaaagggaactagataacatacttcttacttgtctgtacagtaccttgttgcagatgggtgatatataatggtaatagaatagcacagccagacttgcttcctgcatggtagggagagacacaaaagatgggaaactgcttttccacaaggaatctccgtagaattttgcggcgaccagatggtgcataggtctggaaggtctgatctcccttggtcttccatgggatggttagtgtggaggggagatatagattgtccggccgctttgtgattccatggattgattcagtcttctggatttttttttctttatattttgggtactggagcttttaaaaatgtttggtttcaggtatttttattcatgtgaagtgtatatgattctcttgagataaggttttaagctaaaatgttactccctgttttagtttctgaactctgacagattgacagggactttgctggtgtagtctttttataggttttataaaccacttgagcctatatcagtcgttttagtgtctgacctaatatttggagctatcagtgctttgttgatttagatgatgactcaagattttttctggtccatttcccatttccttttcttccctgacccccataccctcacccttaaaattctcctgtaactcaactaacaaaatcaagcctgattcaaaacatcctagggtgttttaaacacaccatctggtgccaaatgaagatttttaggagtgattactaattatcaagggcacagttgtggtactgtcattgataataatatagtttttttttttttcctaattttgacctgtttcaccagtgttttacccttgactgccccttctatgctgcttccaaaagtgatagtgtgtgtaagatttttaccttcctttctaaagttttttttttttttttttaagtgagtcctgttcttcctatttctttcagcagaaatgaaatcccaggtaagtataagtattcaagtatttgatcagtaagtcacagttatctccagtgcattaaataaccttcatcaagaaataggttataggtaaaatctctgaaggatcatctatgtattcaagtaattattttttagataataactgtcttctggacttggtcttgaagtctgtacagattcagcctcagtagtagcgaactgcactgctgtttggtttggagtacaaattagacttatagtcctcctggaacttgagttattaaaatcataggaataaaattatgggatctcaacaaagggtcgagggtttgaggcttaaacaagccaacatatgaatatatgttttgtctcgctatactgcacttacgctatccagttgcaggtaattttttgtctgctagtagtgttctagattatgtctttccaaagcgctgaggctgtgcacctattctgtagttgcagctgatgcctgaatgtatcctagctgacaaattattgattaataagaacttgaatttctggaagattcttactgttaaccaaattttgagcaaggagtctcaaaggtaattctgaaccagaattacatgttaatgaacagtgtaccttttaacagtgtaaatcacggaatatccgtgaagggatttcttaatttattttttaccggttgattgaaatatcagttaaaggttgccagcatggttgcagataaactgatgtttgaaattcgctgaaatacttaatgtggaataggataatatacttccaatgccctcaaggctgtgaccttacagccattttacatagcacatcattcctcctatagggatgaactttttcctggcacgaaaagtagccgctctggttgaagctttgcttattgtaacaggcttttatttccaggtaatatgtcttggaagacttaattctgattagagatatagatattactggaaactaattgttttttttctattgtactctgctttatcaaagaagtaaaacatttaaatcgtactacagaaattaagatgttgtcttgcgatccttaataaatgaatgatttccctttaa

SEQ ID NO: 421041 - DNA, 4135 bp, Homo sapiens
cggacgcgtgggtcgacccacgcgatcgcccacgcgtccggcattataatggaggctattcgaatcagtcctacctttgctgatgcctactctaatatgggaaacactctaaaggagatgcaggatgttcagggagccttgcagtgttatacgcgtgccatccaaattaatcctgcatttgcagatgcacatagcaatctggcttccattcataaggattcagggaatattccagaagccatagcttcttaccgcacggctctgaaacttaagcctgattttcctgatgcttattgtaacttggctcattgcctgcagattgtctgtgattggacagactatgatgagcgaatgaagaagttggtcagtattgtggctgaccagttagagaagaataggttgccttctgtgcatcctcatcatagtatgctatatcctctttctcatggcttcaggaaggctattgctgagaggcacggcaacctgtgcttagataagattaatgttcttcataaaccaccatatgaacatccaaaagacttgaagctcagtgatggtcggctgcgtgtaggatatgtgagttccgactttgggaatcatcctacttctcaccttatgcagtctattccaggcatgcacaatcctgataaatttgaggtgttctgttatgccctgagcccagacgatggcacaaacttccgagtgaaggtgatggcagaagccaatcatttcattgatctttctcagattccatgcaatggaaaagcagctgatcgcatccatcaggatggaattcatatccttgtaaatatgaatggctatactaagggcgctcgaaatgagctttttgctctcaggccagctcctattcaggcaatgtggctgggataccctgggacgagtggtgcgcttttcatggattatattatcactgatcaggaaacttcgccagctgaagttgctgagcagtattccgagaaattggcttatatgccccacactttttttattggtgatcatgctaatatgttccctcacctgaagaaaaaagcagtcatcgattttaagtccaatgggcacatttatgacaatcggatagttctgaatggcatcgacctcaaagcatttcttgatagtctaccagatgtgaaaattgtcaagatgaagtgtcctgatggaggagacaatgcagatagcagtaacacagctcttaatatgcctgttattcctatgaatactattgcagaagcagttattgaaatgattaaccgaggacagattcaaataacaattaatggattcagtattagcaatggactggcaactactcagatcaacaataaggctgcaactggagaggaggttccccgtaccattattgtaaccacccgttctcagtacgggttaccagaagatgccatcgtatactgtaactttaatcagttgtataaaattgacccttctactttgcagatgtgggcaaacattctgaagcgtgttcccaatagtgtactctggctgttgcgttttccagcagtaggagaacctaatattcaacagtatgcacaaaacatgggcctgccccagaaccgtatcattttttcacctgttgctcctaaagaggaacacgtcaggagaggccagctggctgatgtctgcttggacactccactctgtaatgggcacaccacagggatggatgtcctctgggcagggacccccatggtgactatgccaggagagactcttgcttctcgagttgcagcatcccagctcacttgcttaggttgtcttgagcttattgctaaaaacagacaagaatatgaagacatagctgtgaagctgggaactgatctagaatacctgaagaaagttcgtggcaaagtctggaagcaaagaatatctagccctctgttcaacaccaaacaatacacaatggaactagagcggctctatctacagatgtgggagcattatgcagctggcaacaaacctgaccacatgattaagcctgttgaagtcactgagtcagcataaataaagactgcacaggagaattacccctatacctgagcctcaaccttctgggggaaagggaactagataacatacttcttacttgtctgtacagtaccttgttgcagatgggtgatatataatggtaatagaatagcacagccagacttgcttcctgcatggtagggagagacacaaaagatgggaaactgcttttccacaaggaatctccgtagaattttgcggcgaccagatggtgcataggtctggaaggtctgatctcccttggtcttccatgggatggttagtgtggaggggagatatagattgtccggccgctttgtgattccatggattgattcagtcttctggatttttttttctttatattttgggtactggagcttttaaaaatgtttggtttcaggtatttttattcatgtgaagtgtatatgattctcttgagataaggttttaagctaaaatgttactccctgttttagtttctgaactctgacagattgacagggactttgctggtgtagtctttttataggttttataaaccacttgagcctatatcagtcgttttagtgtctgacctaatatttggagctatcagtgctttgttgatttagatgatgactcaagattttttctggtccatttcccatttccttttcttccctgacccccataccctcacccttaaaattctcctgtaactcaactaacaaaatcaagcctgattcaaaacatcctagggtgttttaaacacaccatctggtgccaaatgaagatttttaggagtgattactaattatcaagggcacagttgtggtactgtcattgataataatatagtttttttttttttcctaattttgacctgtttcaccagtgttttacccttgactgccccttctatgctgcttccaaaagtgatagtgtgtgtaagatttttaccttcctttctaaagttttttttttttttttttaagtgagtcctgttcttcctatttctttcagcagaaatgaaatcccaggtaagtataagtattcaagtatttgatcagtaagtcacagttatctccagtgcattaaataaccttcatcaagaaataggttataggtaaaatctctgaaggatcatctatgtattcaagtaattattttttagataataactgtcttctggacttggtcttgaagtctgtacagattcagcctcagtagtagcgaactgcactgctgtttggtttggagtacaaattagacttatagtcctcctggaacttgagttattaaaatcataggaataaaattatgggatctcaacaaagggtcgagggtttgaggcttaaacaagccaacatatgaatatatgttttgtctcgctatactgcacttacgctatccagttgcaggtaattttttgtctgctagtagtgttctagattatgtctttccaaagcgctgaggctgtgcacctattctgtagttgcagctgatgcctgaatgtatcctagctgacaaattattgattaataagaacttgaatttctggaagattcttactgttaaccaaattttgagcaaggagtctcaaaggtaattctgaaccagaattacatgttaatgaacagtgtaccttttaacagtgtaaatcacggaatatccgtgaagggatttcttaatttattttttaccggttgattgaaatatcagttaaaggttgccagcatggttgcagataaactgatgtttgaaattcgctgaaatacttaatgtggaataggataatatacttccaatgccctcaaggctgtgaccttacagccattttacatagcacatcattcctcctatagggatgaactttttcctggcacgaaaagtagccgctctggttgaagctttgcttattgtaacaggcttttatttccaggtaatatgtcttggaagacttaattctgattagagatatagatattactggaaactaattgttttttttctattgtactctgctttatcaaagaagtaaaacatttaaatcgtactacagaaattaagatgttgtcttgcgatccttaataaatgaatgatttccctttaa

SEQ ID NO: 421042 - DNA, 3996 bp, Homo sapiens
acagggcttttgcgccctgacagtggcaaggcctggctgtggatggatggaactcctttcacttctgaactgttccatattataatagatgtcaccagcccaagaagcagagactgtgtggccatccttaatggcctgattttcctgatgcttattgtaacttggctcattgcctgcagattgtctgtgattggacagactatgatgagcgaatgaagaagttggtcagtattgtggctgaccagttagagaagaataggttgccttctgtgcatcctcatcatagtatgctatatcctctttctcatggcttcaggaaggctattgctgagaggcacggcaacctgtgcttagataagattaatgttcttcataaaccaccatatgaacatccaaaagacttgaagctcagtgatggtcggctgcgtgtaggatatgtgagttccgactttgggaatcatcctacttctcaccttatgcagtctattccaggcatgcacaatcctgataaatttgaggtgttctgttatgccctgagcccagacgatggcacaaacttccgagtgaaggtgatggcagaagccaatcatttcattgatctttctcagattccatgcaatggaaaagcagctgatcgcatccatcaggatggaattcatatccttgtaaatatgaatggctatactaagggcgctcgaaatgagctttttgctctcaggccagctcctattcaggcaatgtggctgggataccctgggacgagtggtgcgcttttcatggattatattatcactgatcaggaaacttcgccagctgaagttgctgagcagtattccgagaaattggcttatatgccccacactttttttattggtgatcatgctaatatgttccctcacctgaagaaaaaagcagtcatcgattttaagtccaatgggcacatttatgacaatcggatagttctgaatggcatcgacctcaaagcatttcttgatagtctaccagatgtgaaaattgtcaagatgaagtgtcctgatggaggagacaatgcagatagcagtaacacagctcttaatatgcctgttattcctatgaatactattgcagaagcagttattgaaatgattaaccgaggacagattcaaataacaattaatggattcagtattagcaatggactggcaactactcagatcaacaataaggctgcaactggagaggaggttccccgtaccattattgtaaccacccgttctcagtacgggttaccagaagatgccatcgtatactgtaactttaatcagttgtataaaattgacccttctactttgcagatgtgggcaaacattctgaagcgtgttcccaatagtgtactctggctgttgcgttttccagcagtaggagaacctaatattcaacagtatgcacaaaacatgggcctgccccagaaccgtatcattttttcacctgttgctcctaaagaggaacacgtcaggagaggccagctggctgatgtctgcttggacactccactctgtaatgggcacaccacagggatggatgtcctctgggcagggacccccatggtgactatgccaggagagactcttgcttctcgagttgcagcatcccagctcacttgcttaggttgtcttgagcttattgctaaaaacagacaagaatatgaagacatagctgtgaagctgggaactgatctagaatacctgaagaaagttcgtggcaaagtctggaagcaaagaatatctagccctctgttcaacaccaaacaatacacaatggaactagagcggctctatctacagatgtgggagcattatgcagctggcaacaaacctgaccacatgattaagcctgttgaagtcactgagtcagcataaataaagactgcacaggagaattacccctatacctgagcctcaaccttctgggggaaagggaactagataacatacttcttacttgtctgtacagtaccttgttgcagatgggtgatatataatggtaatagaatagcacagccagacttgcttcctgcatggtagggagagacacaaaagatgggaaactgcttttccacaaggaatctccgtagaattttgcggcgaccagatggtgcataggtctggaaggtctgatctcccttggtcttccatgggatggttagtgtggaggggagatatagattgtccggccgctttgtgattccatggattgattcagtcttctggatttttttttctttatattttgggtactggagcttttaaaaatgtttggtttcaggtatttttattcatgtgaagtgtatatgattctcttgagataaggttttaagctaaaatgttactccctgttttagtttctgaactctgacagattgacagggactttgctggtgtagtctttttataggttttataaaccacttgagcctatatcagtcgttttagtgtctgacctaatatttggagctatcagtgctttgttgatttagatgatgactcaagattttttctggtccatttcccatttccttttcttccctgacccccataccctcacccttaaaattctcctgtaactcaactaacaaaatcaagcctgattcaaaacatcctagggtgttttaaacacaccatctggtgccaaatgaagatttttaggagtgattactaattatcaagggcacagttgtggtactgtcattgataataatatagtttttttttttttcctaattttgacctgtttcaccagtgttttacccttgactgccccttctatgctgcttccaaaagtgatagtgtgtgtaagatttttaccttcctttctaaagttttttttttttttttttaagtgagtcctgttcttcctatttctttcagcagaaatgaaatcccaggtaagtataagtattcaagtatttgatcagtaagtcacagttatctccagtgcattaaataaccttcatcaagaaataggttataggtaaaatctctgaaggatcatctatgtattcaagtaattattttttagataataactgtcttctggacttggtcttgaagtctgtacagattcagcctcagtagtagcgaactgcactgctgtttggtttggagtacaaattagacttatagtcctcctggaacttgagttattaaaatcataggaataaaattatgggatctcaacaaagggtcgagggtttgaggcttaaacaagccaacatatgaatatatgttttgtctcgctatactgcacttacgctatccagttgcaggtaattttttgtctgctagtagtgttctagattatgtctttccaaagcgctgaggctgtgcacctattctgtagttgcagctgatgcctgaatgtatcctagctgacaaattattgattaataagaacttgaatttctggaagattcttactgttaaccaaattttgagcaaggagtctcaaaggtaattctgaaccagaattacatgttaatgaacagtgtaccttttaacagtgtaaatcacggaatatccgtgaagggatttcttaatttattttttaccggttgattgaaatatcagttaaaggttgccagcatggttgcagataaactgatgtttgaaattcgctgaaatacttaatgtggaataggataatatacttccaatgccctcaaggctgtgaccttacagccattttacatagcacatcattcctcctatagggatgaactttttcctggcacgaaaagtagccgctctggttgaagctttgcttattgtaacaggcttttatttccaggtaatatgtcttggaagacttaattctgattagagatatagatattactggaaactaattgttttttttctattgtactctgctttatcaaagaagtaaaacatttaaatcgtactacagaaattaagatgttgtcttgcgatccttaataaatgaatgatttccctttaa

SEQ ID NO: 421043 - DNA, 8312 bp, Homo sapiens
  misc_feature (3588)..(3589): n is a, c, g, or t
agcggcatttcaagaccgtactaggtagatggtcaattagagttcccagggtttgaagcctgtaactgctgccgccgctcaagccctccagagcattgctacggctgctgcccttgtactactacctccaaatacgttcttgctggtagtggcggcagcaggaccaattacctcttttttgctctccctcgagaagctccagatggcgtcttccgtgggcaacgtggccgacagcacagaaccaacgaaacgtatgctttccttccaagggttagctgagttggcacatcgagaatatcaggcaggagattttgaggcagctgagagacactgcatgcagctctggagacaagagccagacaatactggtgtgcttttattactttcatctatacacttccagtgtcgaaggctggacagatctgctcactttagcactctggcaattaaacagaacccccttctggcagaagcttattcgaatttggggaatgtgtacaaggaaagagggcagttgcaggaggcaattgagcattatcgacatgcattgcgtctcaaacctgatttcatcgatggttatattaacctggcagccgccttggtagcagcgggtgacatggaaggggcagtacaagcttacgtctctgctcttcagtacaatcctgatttgtactgtgttcgcagtgacctggggaacctgctcaaagccctgggtcgcttggaagaagccaaggtaggtgtttgatagaacacatttaaacatcagtattatgaaaacttgtactttttgccaagtcttcaactcttcattgagctatcttcacaaaacagtcctttgaaactgaggaaaactgacggcacgaatcgcctcagaatagagcagggccaggctttggcatatctgttctaaatctgggggtaaagcaagaacctgaacattttggagcctttctgctgagctagaccatctttataacactgggctccgtcatgatcttatgtgggaataaataacattccttcaaatctgaggcttgcctgctggtgacaagcagagcgcctgtgatttggctcaagactcctatatgatgcaggtgccattgaaaatgctgctcttctaagtcctttgtggcttgtaagtggagaagaatttcatccaaatgttaccctgtaatactggcatttaaaattcttatttaaccttcctcccttcatcttcctcaccctttttacagtggaagaaaggctgttaaaatgattacaaattaataattggaacatcctgtcccttgtccccactcccttcccaagttcctttttcctcttttccaatcctagttgtctaccttcttttcttcctcatttccttcttttattcctccccaccccaaccccttaaaaaaaaaggtcagaaggacaaagctggtttgtttgggaaatggactgatcgaaagaaaacttgccaaagtggaaaggtggcttttagcattctgtgtttccaaataatgaatttgaacaccaggttgggttaattaaagcttttggtataatttaaaattaaatttataaatgcagttgtcttgttacaagccaccttacgcaaccgcgctgcaggggtgaggagtggggagaaaccagaatgcttctgaaactcccacctgttgctctgagccccacgcgcatgctaatgcgtggagtgtatgcgcagagtagctgtctgtttgactgcttcatccagggagggagaaggcttttcagcaccatctaatgttttaaaaggcactagttttaagtgtacagctcataaattctgctgacattttggattaaccttatgtaggttgccagctaatgaattgtaattgatttcaatcttagctgataaatctaattggtaatttatagaacaaatatttgataagctcctattaattgtcaccccaccaagcggacagctaacatgaattgcacttcactgcagctttagagatcggtttaggctgagacattgcgcctgccttaggttgctgacttctttatttcagagctctggagacacctagtttgaaaaatgttattctgtttttttgtgagaacttagtaaacaagaaaatactcttgagtgaaatgcaatgtatttcttttgtaatcagtgcatttgaaaattcaagccagcatattcctagtagatggaagcaaaattaagttgtctttgtagaaaatgaagagcctttcttccagcaaaaatccctgctgtatgcaatagccctgattaaccctctcccttctgcatgtttcccatattacagacttgagactgtcctcattcccatatgtaatagacatccaaagaatttcaattgctttgttgaacttttactaatgatcttgtttttattttctctcttgtttttggtttttcaccattgatattgtatttagaaggtttcaggtgggtgaaacctcctattccatgcgtaaggtgcctcgctgaagggagctcgaggcctggatctagggcagacacacaacctcctcctcctcttccagcaaggaacgcaccgaaaagtcacatgatgagaaatatggtaacgggtttgtaactgccacagcaaaacaatttgcctccatgcctgaatcttctgtcttgtggcttcagaaacagcttaaaataattttatttacaagcaagttatgtaagagaatgttttatactatagccacaattctgtcaaagataagtaaaagttaattgatattaaaaattattagagataatttacttagtaaaagcttctaactcttcttgttgttcattttttttccttttttcttctttgtttggattgcagcattctgctcttctgatgatgcgctgtgaccctgcagtagcgcaaaggctgcgcagcgttaatgcgcattgcgtgcgaatgaacccctgtgaacggttgactagatgagtaatctgattgactggctccctcagtcctattctgtagcctttttggataaaattgggttttaacatacctcgagtccaactaatctcattaaacaaatattctccatgggcctgtctagtagattaatggatctggttggccgtttgctgcgtctaggggtgttctatgtagcgcagcagttcgcagcgattgcgcagtgcgatgctgttaggttgcgcaagcgatgtttgcgctcgcattacagggacctcaacctaggtgcaatcctgtcatgtgaggtttcagcttcagtcctccttgggagacggggcattgtgagaatgtaacttaaagcctggctttatgatatcctacttggcagaaagacatttttctcctcagtagcatagttttgatgttagtgaggaacattgttgaagagcagcatttcccaaaatgtgtttcatagtattctaataaaatgcccaatgaaagaagagttccatggtcaactaagttcagggaaccctgttacactattaaaggcttagggaagtccagtaaagaaacctattttccgaatttatttgatcatgaactccttttttttcagccatacctcttaacacctcatagaacacacttnnggaaacagtgggggtaggaaaactcggcctcaagttgcgccctctaggtagcacttgaaaacatgacaagggcccgtagttgtttggataagagaactccagcatagagccttatagcaactgacttcccagttaagtcccagtgtaagggttggtctttggttggcagaactgaacatggtggtttgcacttgggttctggtggcgcaggcgcaggagcagccagctgtggcagcgcattagttttggcgcaagcgagcctatgctgcagggtcacttttggctggtcagagaaggaataatgatatcaccttcttccccccctccccccaatcttttttttttccctttacaaattttcccctttccctttacctcctttccctcccatcttctttcattaacccctcctaaggcatgttatttgaaagcaattgagacgcaaccgaactttgcagtagcttggagtaatcttggctgtgttttcaatgcacaaggggaaatttggcttgcaattcatcactttgaaaaggctgtcacccttgacccaaactttctggatgcttatatcaatttaggaaatgtcttgaaagaggcacgcatttttgacagagctgtggcagcttatcttcgtgccctaagtttgagtccaaatcacgcagtggtgcacggcaacctggcttgtgtatactatgagcaaggcctgatagatctggcaatagacacctacaggcgggctatcgaactacaaccacatttccctgatgcttactgcaacctagccaatgctctcaaagagaagggcagtgttgctgaagcagaagattgttataatacagctctccgtctgtgtcccacccatgcagactctctgaataacctagccaatatcaaacgagaacagggaaacattgaagaggcagttcgcttgtatcgtaaagcattagaagtcttcccagagtttgctgctgcccattcaaatttagcaagtgtactgcagcagcagggaaaactgcaggaagctctgatgcattataaggaggctattcgaatcagtcctacctttgctgatgcctactctaatatgggaaacactctaaaggagatgcaggatgttcagggagccttgcagtgttatacgcgtgccatccaaattaatcctgcatttgcagatgcacatagcaatctggcttccattcataaggattcagggaatattccagaagccatagcttcttaccgcacggctctgaaacttaagcctgattttcctgatgcttattgtaacttggctcattgcctgcagattgtctgtgattggacagactatgatgagcgaatgaagaagttggtcagtattgtggctgaccagttagagaagaataggttgccttctgtgcatcctcatcatagtatgctatatcctctttctcatggcttcaggaaggctattgctgagaggcacggcaacctgtgcttagataagattaatgttcttcataaaccaccatatgaacatccaaaagacttgaagctcagtgatggtcggctgcgtgtaggatatgtgagttccgactttgggaatcatcctacttctcaccttatgcagtctattccaggcatgcacaatcctgataaatttgaggtgttctgttatgccctgagcccagacgatggcacaaacttccgagtgaaggtgatggcagaagccaatcatttcattgatctttctcagattccatgcaatggaaaagcagctgatcgcatccatcaggatggaattcatatccttgtaaatatgaatggctatactaagggcgctcgaaatgagctttttgctctcaggccagctcctattcaggcaatgtggctgggataccctgggacgagtggtgcgcttttcatggattatattatcactgatcaggaaacttcgccagctgaagttgctgagcagtattccgagaaattggcttatatgccccacactttttttattggtgatcatgctaatatgttccctcacctgaagaaaaaagcagtcatcgattttaagtccaatgggcacatttatgacaatcggatagttctgaatggcatcgacctcaaagcatttcttgatagtctaccagatgtgaaaattgtcaagatgaagtgtcctgatggaggagacaatgcagatagcagtaacacagctcttaatatgcctgttattcctatgaatactattgcagaagcagttattgaaatgattaaccgaggacagattcaaataacaattaatggattcagtattagcaatggactggcaactactcagatcaacaataaggctgcaactggagaggaggttccccgtaccattattgtaaccacccgttctcagtacgggttaccagaagatgccatcgtatactgtaactttaatcagttgtataaaattgacccttctactttgcagatgtgggcaaacattctgaagcgtgttcccaatagtgtactctggctgttgcgttttccagcagtaggagaacctaatattcaacagtatgcacaaaacatgggcctgccccagaaccgtatcattttttcacctgttgctcctaaagaggaacacgtcaggagaggccagctggctgatgtctgcttggacactccactctgtaatgggcacaccacagggatggatgtcctctgggcagggacccccatggtgactatgccaggagagactcttgcttctcgagttgcagcatcccagctcacttgcttaggttgtcttgagcttattgctaaaaacagacaagaatatgaagacatagctgtgaagctgggaactgatctagaatacctgaagaaagttcgtggcaaagtctggaagcaaagaatatctagccctctgttcaacaccaaacaatacacaatggaactagagcggctctatctacagatgtgggagcattatgcagctggcaacaaacctgaccacatgattaagcctgttgaagtcactgagtcagcataaataaagactgcacaggagaattacccctatacctgagcctcaaccttctgggggaaagggaactagataacatacttcttacttgtctgtacagtaccttgttgcagatgggtgatatataatggtaatagaatagcacagccagacttgcttcctgcatggtagggagagacacaaaagatgggaaactgcttttccacaaggaatctccgtagaattttgcggcgaccagatggtgcataggtctggaaggtctgatctcccttggtcttccatgggatggttagtgtggaggggagatatagattgtccggccgctttgtgattccatggattgattcagtcttctggatttttttttctttatattttgggtactggagcttttaaaaatgtttggtttcaggtatttttattcatgtgaagtgtatatgattctcttgagataaggttttaagctaaaatgttactccctgttttagtttctgaactctgacagattgacagggactttgctggtgtagtctttttataggttttataaaccacttgagcctatatcagtcgttttagtgtctgacctaatatttggagctatcagtgctttgttgatttagatgatgactcaagattttttctggtccatttcccatttccttttcttccctgacccccataccctcacccttaaaattctcctgtaactcaactaacaaaatcaagcctgattcaaaacatcctagggtgttttaaacacaccatctggtgccaaatgaagatttttaggagtgattactaattatcaagggcacagttgtggtactgtcattgataataatatagtttttttttttttcctaattttgacctgtttcaccagtgttttacccttgactgccccttctatgctgcttccaaaagtgatagtgtgtgtaagatttttaccttcctttctaaagttttttttttttttttttaagtgagtcctgttcttcctatttctttcagcagaaatgaaatcccaggtaagtataagtattcaagtatttgatcagtaagtcacagttatctccagtgcattaaataaccttcatcaagaaataggttataggtaaaatctctgaaggatcatctatgtattcaagtaattattttttagataataactgtcttctggacttggtcttgaagtctgtacagattcagcctcagtagtagcgaactgcactgctgtttggtttggagtacaaattagacttatagtcctcctggaacttgagttattaaaatcataggaataaaattatgggatctcaacaaagggtcgagggtttgaggcttaaacaagccaacatatgaatatatgttttgtctcgctatactgcacttacgctatccagttgcaggtaattttttgtctgctagtagtgttctagattatgtctttccaaagcgctgaggctgtgcacctattctgtagttgcagctgatgcctgaatgtatcctagctgacaaattattgattaataagaacttgaatttctggaagattcttactgttaaccaaattttgagcaaggagtctcaaaggtaattctgaaccagaattacatgttaatgaacagtgtaccttttaacagtgtaaatcccttcacggatattccgtgatttacactgttaaaaggtacactgttcatt

SEQ ID NO: 421044 - DNA, 8089 bp, Homo sapiens
  misc_feature (3588)..(3589): n is a, c, g, or t
agcggcatttcaagaccgtactaggtagatggtcaattagagttcccagggtttgaagcctgtaactgctgccgccgctcaagccctccagagcattgctacggctgctgcccttgtactactacctccaaatacgttcttgctggtagtggcggcagcaggaccaattacctcttttttgctctccctcgagaagctccagatggcgtcttccgtgggcaacgtggccgacagcacagaaccaacgaaacgtatgctttccttccaagggttagctgagttggcacatcgagaatatcaggcaggagattttgaggcagctgagagacactgcatgcagctctggagacaagagccagacaatactggtgtgcttttattactttcatctatacacttccagtgtcgaaggctggacagatctgctcactttagcactctggcaattaaacagaacccccttctggcagaagcttattcgaatttggggaatgtgtacaaggaaagagggcagttgcaggaggcaattgagcattatcgacatgcattgcgtctcaaacctgatttcatcgatggttatattaacctggcagccgccttggtagcagcgggtgacatggaaggggcagtacaagcttacgtctctgctcttcagtacaatcctgatttgtactgtgttcgcagtgacctggggaacctgctcaaagccctgggtcgcttggaagaagccaaggtaggtgtttgatagaacacatttaaacatcagtattatgaaaacttgtactttttgccaagtcttcaactcttcattgagctatcttcacaaaacagtcctttgaaactgaggaaaactgacggcacgaatcgcctcagaatagagcagggccaggctttggcatatctgttctaaatctgggggtaaagcaagaacctgaacattttggagcctttctgctgagctagaccatctttataacactgggctccgtcatgatcttatgtgggaataaataacattccttcaaatctgaggcttgcctgctggtgacaagcagagcgcctgtgatttggctcaagactcctatatgatgcaggtgccattgaaaatgctgctcttctaagtcctttgtggcttgtaagtggagaagaatttcatccaaatgttaccctgtaatactggcatttaaaattcttatttaaccttcctcccttcatcttcctcaccctttttacagtggaagaaaggctgttaaaatgattacaaattaataattggaacatcctgtcccttgtccccactcccttcccaagttcctttttcctcttttccaatcctagttgtctaccttcttttcttcctcatttccttcttttattcctccccaccccaaccccttaaaaaaaaaggtcagaaggacaaagctggtttgtttgggaaatggactgatcgaaagaaaacttgccaaagtggaaaggtggcttttagcattctgtgtttccaaataatgaatttgaacaccaggttgggttaattaaagcttttggtataatttaaaattaaatttataaatgcagttgtcttgttacaagccaccttacgcaaccgcgctgcaggggtgaggagtggggagaaaccagaatgcttctgaaactcccacctgttgctctgagccccacgcgcatgctaatgcgtggagtgtatgcgcagagtagctgtctgtttgactgcttcatccagggagggagaaggcttttcagcaccatctaatgttttaaaaggcactagttttaagtgtacagctcataaattctgctgacattttggattaaccttatgtaggttgccagctaatgaattgtaattgatttcaatcttagctgataaatctaattggtaatttatagaacaaatatttgataagctcctattaattgtcaccccaccaagcggacagctaacatgaattgcacttcactgcagctttagagatcggtttaggctgagacattgcgcctgccttaggttgctgacttctttatttcagagctctggagacacctagtttgaaaaatgttattctgtttttttgtgagaacttagtaaacaagaaaatactcttgagtgaaatgcaatgtatttcttttgtaatcagtgcatttgaaaattcaagccagcatattcctagtagatggaagcaaaattaagttgtctttgtagaaaatgaagagcctttcttccagcaaaaatccctgctgtatgcaatagccctgattaaccctctcccttctgcatgtttcccatattacagacttgagactgtcctcattcccatatgtaatagacatccaaagaatttcaattgctttgttgaacttttactaatgatcttgtttttattttctctcttgtttttggtttttcaccattgatattgtatttagaaggtttcaggtgggtgaaacctcctattccatgcgtaaggtgcctcgctgaagggagctcgaggcctggatctagggcagacacacaacctcctcctcctcttccagcaaggaacgcaccgaaaagtcacatgatgagaaatatggtaacgggtttgtaactgccacagcaaaacaatttgcctccatgcctgaatcttctgtcttgtggcttcagaaacagcttaaaataattttatttacaagcaagttatgtaagagaatgttttatactatagccacaattctgtcaaagataagtaaaagttaattgatattaaaaattattagagataatttacttagtaaaagcttctaactcttcttgttgttcattttttttccttttttcttctttgtttggattgcagcattctgctcttctgatgatgcgctgtgaccctgcagtagcgcaaaggctgcgcagcgttaatgcgcattgcgtgcgaatgaacccctgtgaacggttgactagatgagtaatctgattgactggctccctcagtcctattctgtagcctttttggataaaattgggttttaacatacctcgagtccaactaatctcattaaacaaatattctccatgggcctgtctagtagattaatggatctggttggccgtttgctgcgtctaggggtgttctatgtagcgcagcagttcgcagcgattgcgcagtgcgatgctgttaggttgcgcaagcgatgtttgcgctcgcattacagggacctcaacctaggtgcaatcctgtcatgtgaggtttcagcttcagtcctccttgggagacggggcattgtgagaatgtaacttaaagcctggctttatgatatcctacttggcagaaagacatttttctcctcagtagcatagttttgatgttagtgaggaacattgttgaagagcagcatttcccaaaatgtgtttcatagtattctaataaaatgcccaatgaaagaagagttccatggtcaactaagttcagggaaccctgttacactattaaaggcttagggaagtccagtaaagaaacctattttccgaatttatttgatcatgaactccttttttttcagccatacctcttaacacctcatagaacacacttnnggaaacagtgggggtaggaaaactcggcctcaagttgcgccctctaggtagcacttgaaaacatgacaagggcccgtagttgtttggataagagaactccagcatagagccttatagcaactgacttcccagttaagtcccagtgtaagggttggtctttggttggcagaactgaacatggtggtttgcacttgggttctggtggcgcaggcgcaggagcagccagctgtggcagcgcattagttttggcgcaagcgagcctatgctgcagggtcacttttggctggtcagagaaggaataatgatatcaccttcttccccccctccccccaatcttttttttttccctttacaaattttcccctttccctttacctcctttccctcccatcttctttcattaacccctcctaaggcatgttatttgaaagcaattgagacgcaaccgaactttgcagtagcttggagtaatcttggctgtgttttcaatgcacaaggggaaatttggcttgcaattcatcactttgaaaaggctgtcacccttgacccaaactttctggatgcttatatcaatttaggaaatgtcttgaaagaggcacgcatttttgacagagctgtggcagcttatcttcgtgccctaagtttgagtccaaatcacgcagtggtgcacggcaacctggcttgtgtatactatgagcaaggcctgatagatctggcaatagacacctacaggcgggctatcgaactacaaccacatttccctgatgcttactgcaacctagccaatgctctcaaagagaagggcagtgttgctgaagcagaagattgttataatacagctctccgtctgtgtcccacccatgcagactctctgaataacctagccaatatcaaacgagaacagggaaacattgaagaggcagttcgcttgtatcgtaaagcattagaagtcttcccagagtttgctgctgcccattcaaatttagcaagtgtactgcagcagcagggaaaactgcaggaagctctgatgcattataaggaggctattcgaatcagtcctacctttgctgatgcctactctaatatgggaaacactctaaaggagatgcaggatgttcagggagccttgcagtgttatacgcgtgccatccaaattaatcctgcatttgcagatgcacatagcaatctggcttccattcataaggattcagggaatattccagaagccatagcttcttaccgcacggctctgaaacttaagcctgattttcctgatgcttattgtaacttggctcattgcctgcagattgtctgtgattggacagactatgatgagcgaatgaagaagttggtcagtattgtggctgaccagttagagaagaataggttgccttctgtgcatcctcatcatagtatgctatatcctctttctcatggcttcaggaaggctattgctgagaggcacggcaacctgtgcttagataagattaatgttcttcataaaccaccatatgaacatccaaaagacttgaagctcagtgatggtcggctgcgtgtaggatatgtgagttccgactttgggaatcatcctacttctcaccttatgcagtctattccaggcatgcacaatcctgataaatttgaggtgttctgttatgccctgagcccagacgatggcacaaacttccgagtgaaggtgatggcagaagccaatcatttcattgatctttctcagattccatgcaatggaaaagcagctgatcgcatccatcaggatggaattcatatccttgtaaatatgaatggctatactaagggcgctcgaaatgagctttttgctctcaggccagctcctattcaggcaatgtggctgggataccctgggacgagtggtgcgcttttcatggattatattatcactgatcaggaaacttcgccagctgaagttgctgagcagtattccgagaaattggcttatatgccccacactttttttattggtgatcatgctaatatgttccctcacctgaagaaaaaagcagtcatcgattttaagtccaatgggcacatttatgacaatcggatagttctgaatggcatcgacctcaaagcatttcttgatagtctaccagatgtgaaaattgtcaagatgaagtgtcctgatggaggagacaatgcagatagcagtaacacagctcttaatatgcctgttattcctatgaatactattgcagaagcagttattgaaatgattaaccgaggacagattcaaataacaattaatggattcagtattagcaatggactggcaactactcagatcaacaataaggctgcaactggagaggaggttccccgtaccattattgtaaccacccgttctcagtacgggttaccagaagatgccatcgtatactgtaactttaatcagttgtataaaattgacccttctactttgcagatgtgggcaaacattctgaagcgtgttcccaatagtgtactctggctgttgcgttttccagcagtaggagaacctaatattcaacagtatgcacaaaacatgggcctgccccagaaccgtatcattttttcacctgttgctcctaaagaggaacacgtcaggagaggccagctggctgatgtctgcttggacactccactctgtaatgggcacaccacagggatggatgtcctctgggcagggacccccatggtgactatgccaggagagactcttgcttctcgagttgcagcatcccagctcacttgcttaggttgtcttgagcttattgctaaaaacagacaagaatatgaagacatagctgtgaagctgggaactgatctagaatacctgaagaaagttcgtggcaaagtctggaagcaaagaatatctagccctctgttcaacaccaaacaatacacaatggaactagagcggctctatctacagatgtgggagcattatgcagctggcaacaaacctgaccacatgattaagcctgttgaagtcactgagtcagcataaataaagactgcacaggagaattacccctatacctgagcctcaaccttctgggggaaagggaactagataacatacttcttacttgtctgtacagtaccttgttgcagatgggtgatatataatggtaatagaatagcacagccagacttgcttcctgcatggtagggagagacacaaaagatgggaaactgcttttccacaaggaatctccgtagaattttgcggcgaccagatggtgcataggtctggaaggtctgatctcccttggtcttccatgggatggttagtgtggaggggagatatagattgtccggccgctttgtgattccatggattgattcagtcttctggatttttttttctttatattttgggtactggagcttttaaaaatgtttggtttcaggtatttttattcatgtgaagtgtatatgattctcttgagataaggttttaagctaaaatgttactccctgttttagtttctgaactctgacagattgacagggactttgctggtgtagtctttttataggttttataaaccacttgagcctatatcagtcgttttagtgtctgacctaatatttggagctatcagtgctttgttgatttagatgatgactcaagattttttctggtccatttcccatttccttttcttccctgacccccataccctcacccttaaaattctcctgtaactcaactaacaaaatcaagcctgattcaaaacatcctagggtgttttaaacacaccatctggtgccaaatgaagatttttaggagtgattactaattatcaagggcacagttgtggtactgtcattgataataatatagtttttttttttttcctaattttgacctgtttcaccagtgttttacccttgactgccccttctatgctgcttccaaaagtgatagtgtgtgtaagatttttaccttcctttctaaagttttttttttttttttttaagtgagtcctgttcttcctatttctttcagcagaaatgaaatcccaggtaagtataagtattcaagtatttgatcagtaagtcacagttatctccagtgcattaaataaccttcatcaagaaataggttataggtaaaatctctgaaggatcatctatgtattcaagtaattattttttagataataactgtcttctggacttggtcttgaagtctgtacagattcagcctcagtagtagcgaactgcactgctgtttggtttggagtacaaattagacttatagtcctcctggaacttgagttattaaaatcataggaataaaattatgggatctcaacaaagggtcgagggtttgaggcttaaacaagccaacatatgaatatatgttttgtttgccaatagggattagatatacaatggaggagaaatgggcgcaatgagggcttatgtttccggcggggtggactatgtgtggaggtatctgagtttttccgg

SEQ ID NO: 421045 - DNA, 8658 bp, Homo sapiens
  misc_feature (3588)..(3589): n is a, c, g, or t
agcggcatttcaagaccgtactaggtagatggtcaattagagttcccagggtttgaagcctgtaactgctgccgccgctcaagccctccagagcattgctacggctgctgcccttgtactactacctccaaatacgttcttgctggtagtggcggcagcaggaccaattacctcttttttgctctccctcgagaagctccagatggcgtcttccgtgggcaacgtggccgacagcacagaaccaacgaaacgtatgctttccttccaagggttagctgagttggcacatcgagaatatcaggcaggagattttgaggcagctgagagacactgcatgcagctctggagacaagagccagacaatactggtgtgcttttattactttcatctatacacttccagtgtcgaaggctggacagatctgctcactttagcactctggcaattaaacagaacccccttctggcagaagcttattcgaatttggggaatgtgtacaaggaaagagggcagttgcaggaggcaattgagcattatcgacatgcattgcgtctcaaacctgatttcatcgatggttatattaacctggcagccgccttggtagcagcgggtgacatggaaggggcagtacaagcttacgtctctgctcttcagtacaatcctgatttgtactgtgttcgcagtgacctggggaacctgctcaaagccctgggtcgcttggaagaagccaaggtaggtgtttgatagaacacatttaaacatcagtattatgaaaacttgtactttttgccaagtcttcaactcttcattgagctatcttcacaaaacagtcctttgaaactgaggaaaactgacggcacgaatcgcctcagaatagagcagggccaggctttggcatatctgttctaaatctgggggtaaagcaagaacctgaacattttggagcctttctgctgagctagaccatctttataacactgggctccgtcatgatcttatgtgggaataaataacattccttcaaatctgaggcttgcctgctggtgacaagcagagcgcctgtgatttggctcaagactcctatatgatgcaggtgccattgaaaatgctgctcttctaagtcctttgtggcttgtaagtggagaagaatttcatccaaatgttaccctgtaatactggcatttaaaattcttatttaaccttcctcccttcatcttcctcaccctttttacagtggaagaaaggctgttaaaatgattacaaattaataattggaacatcctgtcccttgtccccactcccttcccaagttcctttttcctcttttccaatcctagttgtctaccttcttttcttcctcatttccttcttttattcctccccaccccaaccccttaaaaaaaaaggtcagaaggacaaagctggtttgtttgggaaatggactgatcgaaagaaaacttgccaaagtggaaaggtggcttttagcattctgtgtttccaaataatgaatttgaacaccaggttgggttaattaaagcttttggtataatttaaaattaaatttataaatgcagttgtcttgttacaagccaccttacgcaaccgcgctgcaggggtgaggagtggggagaaaccagaatgcttctgaaactcccacctgttgctctgagccccacgcgcatgctaatgcgtggagtgtatgcgcagagtagctgtctgtttgactgcttcatccagggagggagaaggcttttcagcaccatctaatgttttaaaaggcactagttttaagtgtacagctcataaattctgctgacattttggattaaccttatgtaggttgccagctaatgaattgtaattgatttcaatcttagctgataaatctaattggtaatttatagaacaaatatttgataagctcctattaattgtcaccccaccaagcggacagctaacatgaattgcacttcactgcagctttagagatcggtttaggctgagacattgcgcctgccttaggttgctgacttctttatttcagagctctggagacacctagtttgaaaaatgttattctgtttttttgtgagaacttagtaaacaagaaaatactcttgagtgaaatgcaatgtatttcttttgtaatcagtgcatttgaaaattcaagccagcatattcctagtagatggaagcaaaattaagttgtctttgtagaaaatgaagagcctttcttccagcaaaaatccctgctgtatgcaatagccctgattaaccctctcccttctgcatgtttcccatattacagacttgagactgtcctcattcccatatgtaatagacatccaaagaatttcaattgctttgttgaacttttactaatgatcttgtttttattttctctcttgtttttggtttttcaccattgatattgtatttagaaggtttcaggtgggtgaaacctcctattccatgcgtaaggtgcctcgctgaagggagctcgaggcctggatctagggcagacacacaacctcctcctcctcttccagcaaggaacgcaccgaaaagtcacatgatgagaaatatggtaacgggtttgtaactgccacagcaaaacaatttgcctccatgcctgaatcttctgtcttgtggcttcagaaacagcttaaaataattttatttacaagcaagttatgtaagagaatgttttatactatagccacaattctgtcaaagataagtaaaagttaattgatattaaaaattattagagataatttacttagtaaaagcttctaactcttcttgttgttcattttttttccttttttcttctttgtttggattgcagcattctgctcttctgatgatgcgctgtgaccctgcagtagcgcaaaggctgcgcagcgttaatgcgcattgcgtgcgaatgaacccctgtgaacggttgactagatgagtaatctgattgactggctccctcagtcctattctgtagcctttttggataaaattgggttttaacatacctcgagtccaactaatctcattaaacaaatattctccatgggcctgtctagtagattaatggatctggttggccgtttgctgcgtctaggggtgttctatgtagcgcagcagttcgcagcgattgcgcagtgcgatgctgttaggttgcgcaagcgatgtttgcgctcgcattacagggacctcaacctaggtgcaatcctgtcatgtgaggtttcagcttcagtcctccttgggagacggggcattgtgagaatgtaacttaaagcctggctttatgatatcctacttggcagaaagacatttttctcctcagtagcatagttttgatgttagtgaggaacattgttgaagagcagcatttcccaaaatgtgtttcatagtattctaataaaatgcccaatgaaagaagagttccatggtcaactaagttcagggaaccctgttacactattaaaggcttagggaagtccagtaaagaaacctattttccgaatttatttgatcatgaactccttttttttcagccatacctcttaacacctcatagaacacacttnnggaaacagtgggggtaggaaaactcggcctcaagttgcgccctctaggtagcacttgaaaacatgacaagggcccgtagttgtttggataagagaactccagcatagagccttatagcaactgacttcccagttaagtcccagtgtaagggttggtctttggttggcagaactgaacatggtggtttgcacttgggttctggtggcgcaggcgcaggagcagccagctgtggcagcgcattagttttggcgcaagcgagcctatgctgcagggtcacttttggctggtcagagaaggaataatgatatcaccttcttccccccctccccccaatcttttttttttccctttacaaattttcccctttccctttacctcctttccctcccatcttctttcattaacccctcctaaggcatgttatttgaaagcaattgagacgcaaccgaactttgcagtagcttggagtaatcttggctgtgttttcaatgcacaaggggaaatttggcttgcaattcatcactttgaaaaggctgtcacccttgacccaaactttctggatgcttatatcaatttaggaaatgtcttgaaagaggcacgcatttttgacagagctgtggcagcttatcttcgtgccctaagtttgagtccaaatcacgcagtggtgcacggcaacctggcttgtgtatactatgagcaaggcctgatagatctggcaatagacacctacaggcgggctatcgaactacaaccacatttccctgatgcttactgcaacctagccaatgctctcaaagagaagggcagtgttgctgaagcagaagattgttataatacagctctccgtctgtgtcccacccatgcagactctctgaataacctagccaatatcaaacgagaacagggaaacattgaagaggcagttcgcttgtatcgtaaagcattagaagtcttcccagagtttgctgctgcccattcaaatttagcaagtgtactgcagcagcagggaaaactgcaggaagctctgatgcattataaggaggctattcgaatcagtcctacctttgctgatgcctactctaatatgggaaacactctaaaggagatgcaggatgttcagggagccttgcagtgttatacgcgtgccatccaaattaatcctgcatttgcagatgcacatagcaatctggcttccattcataaggattcagggaatattccagaagccatagcttcttaccgcacggctctgaaacttaagcctgattttcctgatgcttattgtaacttggctcattgcctgcagattgtctgtgattggacagactatgatgagcgaatgaagaagttggtcagtattgtggctgaccagttagagaagaataggttgccttctgtgcatcctcatcatagtatgctatatcctctttctcatggcttcaggaaggctattgctgagaggcacggcaacctgtgcttagataagattaatgttcttcataaaccaccatatgaacatccaaaagacttgaagctcagtgatggtcggctgcgtgtaggatatgtgagttccgactttgggaatcatcctacttctcaccttatgcagtctattccaggcatgcacaatcctgataaatttgaggtgttctgttatgccctgagcccagacgatggcacaaacttccgagtgaaggtgatggcagaagccaatcatttcattgatctttctcagattccatgcaatggaaaagcagctgatcgcatccatcaggatggaattcatatccttgtaaatatgaatggctatactaagggcgctcgaaatgagctttttgctctcaggccagctcctattcaggcaatgtggctgggataccctgggacgagtggtgcgcttttcatggattatattatcactgatcaggaaacttcgccagctgaagttgctgagcagtattccgagaaattggcttatatgccccacactttttttattggtgatcatgctaatatgttccctcacctgaagaaaaaagcagtcatcgattttaagtccaatgggcacatttatgacaatcggatagttctgaatggcatcgacctcaaagcatttcttgatagtctaccagatgtgaaaattgtcaagatgaagtgtcctgatggaggagacaatgcagatagcagtaacacagctcttaatatgcctgttattcctatgaatactattgcagaagcagttattgaaatgattaaccgaggacagattcaaataacaattaatggattcagtattagcaatggactggcaactactcagatcaacaataaggctgcaactggagaggaggttccccgtaccattattgtaaccacccgttctcagtacgggttaccagaagatgccatcgtatactgtaactttaatcagttgtataaaattgacccttctactttgcagatgtgggcaaacattctgaagcgtgttcccaatagtgtactctggctgttgcgttttccagcagtaggagaacctaatattcaacagtatgcacaaaacatgggcctgccccagaaccgtatcattttttcacctgttgctcctaaagaggaacacgtcaggagaggccagctggctgatgtctgcttggacactccactctgtaatgggcacaccacagggatggatgtcctctgggcagggacccccatggtgactatgccaggagagactcttgcttctcgagttgcagcatcccagctcacttgcttaggttgtcttgagcttattgctaacctgaagaaagttcgtggcaaagtctggaagcaaagaatatctagccctctgttcaacaccaaacaatacacaatggaactagagcggctctatctacagatgtgggagcattatgcagctggcaacaaacctgaccacatgattaagcctgttgaagtcactgagtcagcataaataaagactgcacaggagaattacccctatacctgagcctcaaccttctgggggaaagggaactagataacatacttcttacttgtctgtacagtaccttgttgcagatgggtgatatataatggtaatagaatagcacagccagacttgcttcctgcatggtagggagagacacaaaagatgggaaactgcttttccacaaggaatctccgtagaattttgcggcgaccagatggtgcataggtctggaaggtctgatctcccttggtcttccatgggatggttagtgtggaggggagatatagattgtccggccgctttgtgattccatggattgattcagtcttctggatttttttttctttatattttgggtactggagcttttaaaaatgtttggtttcaggtatttttattcatgtgaagtgtatatgattctcttgagataaggttttaagctaaaatgttactccctgttttagtttctgaactctgacagattgacagggactttgctggtgtagtctttttataggttttataaaccacttgagcctatatcagtcgttttagtgtctgacctaatatttggagctatcagtgctttgttgatttagatgatgactcaagattttttctggtccatttcccatttccttttcttccctgacccccataccctcacccttaaaattctcctgtaactcaactaacaaaatcaagcctgattcaaaacatcctagggtgttttaaacacaccatctggtgccaaatgaagatttttaggagtgattactaattatcaagggcacagttgtggtactgtcattgataataatatagtttttttttttttcctaattttgacctgtttcaccagtgttttacccttgactgccccttctatgctgcttccaaaagtgatagtgtgtgtaagatttttaccttcctttctaaagttttttttttttttttttaagtgagtcctgttcttcctatttctttcagcagaaatgaaatcccaggtaagtataagtattcaagtatttgatcagtaagtcacagttatctccagtgcattaaataaccttcatcaagaaataggttataggtaaaatctctgaaggatcatctatgtattcaagtaattattttttagataataactgtcttctggacttggtcttgaagtctgtacagattcagcctcagtagtagcgaactgcactgctgtttggtttggagtacaaattagacttatagtcctcctggaacttgagttattaaaatcataggaataaaattatgggatctcaacaaagggtcgagggtttgaggcttaaacaagccaacatatgaatatatgttttgtctcgctatactgcacttacgctatccagttgcaggtaattttttgtctgctagtagtgttctagattatgtctttccaaagcgctgaggctgtgcacctattctgtagttgcagctgatgcctgaatgtatcctagctgacaaattattgattaataagaacttgaatttctggaagattcttactgttaaccaaattttgagcaaggagtctcaaaggtaattctgaaccagaattacatgttaatgaacagtgtaccttttaacagtgtaaatcacggaatatccgtgaagggatttcttaatttattttttaccggttgattgaaatatcagttaaaggttgccagcatggttgcagataaactgatgtttgaaattcgctgaaatacttaatgtggaataggataatatacttccaatgccctcaaggctgtgaccttacagccattttacatagcacatcattcctcctatagggatgaactttttcctggcacgaaaagtagccgctctggttgaagctttgcttattgtaacaggcttttatttccaggtaatatgtcttggaagacttaattctgattagagatatagatattactggaaactaattgttttttttctattgtactctgctttatcaaagaagtaaaacatttaaatcgtactacagaaattaagatgttgtcttgcgatccttaataaatgaatgatttccctttaa

SEQ ID NO: 421046 - DNA, 2440 bp, Homo sapiens
cctagaggaccccagacagcggaccccatggtgactatgccaggagagactcttgcttctcgagttgcagcatcccagctcacttgcttaggttgtcttgagcttattgctaaaaacagacaagaatatgaagacatagctgtgaagctgggaactgatctagaatacctgaagaaagttcgtggcaaagtctggaagcaaagaatatctagccctctgttcaacaccaaacaatacacaatggaactagagcggctctatctacagatgtgggagcattatgcagctggcaacaaacctgaccacatgattaagcctgttgaagtcactgagtcagcataaataaagactgcacaggagaattacccctatacctgagcctcaaccttctgggggaaagggaactagataacatacttcttacttgtctgtacagtaccttgttgcagatgggtgatatataatggtaatagaatagcacagccagacttgcttcctgcatggtagggagagacacaaaagatgggaaactgcttttccacaaggaatctccgtagaattttgcggcgaccagatggtgcataggtctggaaggtctgatctcccttggtcttccatgggatggttagtgtggaggggagatatagattgtccggccgctttgtgattccatggattgattcagtcttctggatttttttttctttatattttgggtactggagcttttaaaaatgtttggtttcaggtatttttattcatgtgaagtgtatatgattctcttgagataaggttttaagctaaaatgttactccctgttttagtttctgaactctgacagattgacagggactttgctggtgtagtctttttataggttttataaaccacttgagcctatatcagtcgttttagtgtctgacctaatatttggagctatcagtgctttgttgatttagatgatgactcaagattttttctggtccatttcccatttccttttcttccctgacccccataccctcacccttaaaattctcctgtaactcaactaacaaaatcaagcctgattcaaaacatcctagggtgttttaaacacaccatctggtgccaaatgaagatttttaggagtgattactaattatcaagggcacagttgtggtactgtcattgataataatatagtttttttttttttcctaattttgacctgtttcaccagtgttttacccttgactgccccttctatgctgcttccaaaagtgatagtgtgtgtaagatttttaccttcctttctaaagttttttttttttttttttaagtgagtcctgttcttcctatttctttcagcagaaatgaaatcccaggtaagtataagtattcaagtatttgatcagtaagtcacagttatctccagtgcattaaataaccttcatcaagaaataggttataggtaaaatctctgaaggatcatctatgtattcaagtaattattttttagataataactgtcttctggacttggtcttgaagtctgtacagattcagcctcagtagtagcgaactgcactgctgtttggtttggagtacaaattagacttatagtcctcctggaacttgagttattaaaatcataggaataaaattatgggatctcaacaaagggtcgagggtttgaggcttaaacaagccaacatatgaatatatgttttgtctcgctatactgcacttacgctatccagttgcaggtaattttttgtctgctagtagtgttctagattatgtctttccaaagcgctgaggctgtgcacctattctgtagttgcagctgatgcctgaatgtatcctagctgacaaattattgattaataagaacttgaatttctggaagattcttactgttaaccaaattttgagcaaggagtctcaaaggtaattctgaaccagaattacatgttaatgaacagtgtaccttttaacagtgtaaatcacggaatatccgtgaagggatttcttaatttattttttaccggttgattgaaatatcagttaaaggttgccagcatggttgcagataaactgatgtttgaaattcgctgaaatacttaatgtggaataggataatatacttccaatgccctcaaggctgtgaccttacagccattttacatagcacatcattcctcctatagggatgaactttttcctggcacgaaaagtagccgctctggttgaagctttgcttattgtaacaggcttttatttccaggtaatatgtcttggaagacttaattctgattagagatatagatattactggaaactaattgttttttttctattgtactctgctttatcaaagaagtaaaacatttaaatcgtactacagaaattaagatgttgtcttgcgatccttaataaatgaatgatttccctttaa

SEQ ID NO: 421047 - DNA, 2457 bp, Homo sapiens
cctcggttgaagatcttagaggacccctccttctggtgactcccatggtgactatgccaggagagactcttgcttctcgagttgcagcatcccagctcacttgcttaggttgtcttgagcttattgctaaaaacagacaagaatatgaagacatagctgtgaagctgggaactgatctagaatacctgaagaaagttcgtggcaaagtctggaagcaaagaatatctagccctctgttcaacaccaaacaatacacaatggaactagagcggctctatctacagatgtgggagcattatgcagctggcaacaaacctgaccacatgattaagcctgttgaagtcactgagtcagcataaataaagactgcacaggagaattacccctatacctgagcctcaaccttctgggggaaagggaactagataacatacttcttacttgtctgtacagtaccttgttgcagatgggtgatatataatggtaatagaatagcacagccagacttgcttcctgcatggtagggagagacacaaaagatgggaaactgcttttccacaaggaatctccgtagaattttgcggcgaccagatggtgcataggtctggaaggtctgatctcccttggtcttccatgggatggttagtgtggaggggagatatagattgtccggccgctttgtgattccatggattgattcagtcttctggatttttttttctttatattttgggtactggagcttttaaaaatgtttggtttcaggtatttttattcatgtgaagtgtatatgattctcttgagataaggttttaagctaaaatgttactccctgttttagtttctgaactctgacagattgacagggactttgctggtgtagtctttttataggttttataaaccacttgagcctatatcagtcgttttagtgtctgacctaatatttggagctatcagtgctttgttgatttagatgatgactcaagattttttctggtccatttcccatttccttttcttccctgacccccataccctcacccttaaaattctcctgtaactcaactaacaaaatcaagcctgattcaaaacatcctagggtgttttaaacacaccatctggtgccaaatgaagatttttaggagtgattactaattatcaagggcacagttgtggtactgtcattgataataatatagtttttttttttttcctaattttgacctgtttcaccagtgttttacccttgactgccccttctatgctgcttccaaaagtgatagtgtgtgtaagatttttaccttcctttctaaagttttttttttttttttttaagtgagtcctgttcttcctatttctttcagcagaaatgaaatcccaggtaagtataagtattcaagtatttgatcagtaagtcacagttatctccagtgcattaaataaccttcatcaagaaataggttataggtaaaatctctgaaggatcatctatgtattcaagtaattattttttagataataactgtcttctggacttggtcttgaagtctgtacagattcagcctcagtagtagcgaactgcactgctgtttggtttggagtacaaattagacttatagtcctcctggaacttgagttattaaaatcataggaataaaattatgggatctcaacaaagggtcgagggtttgaggcttaaacaagccaacatatgaatatatgttttgtctcgctatactgcacttacgctatccagttgcaggtaattttttgtctgctagtagtgttctagattatgtctttccaaagcgctgaggctgtgcacctattctgtagttgcagctgatgcctgaatgtatcctagctgacaaattattgattaataagaacttgaatttctggaagattcttactgttaaccaaattttgagcaaggagtctcaaaggtaattctgaaccagaattacatgttaatgaacagtgtaccttttaacagtgtaaatcacggaatatccgtgaagggatttcttaatttattttttaccggttgattgaaatatcagttaaaggttgccagcatggttgcagataaactgatgtttgaaattcgctgaaatacttaatgtggaataggataatatacttccaatgccctcaaggctgtgaccttacagccattttacatagcacatcattcctcctatagggatgaactttttcctggcacgaaaagtagccgctctggttgaagctttgcttattgtaacaggcttttatttccaggtaatatgtcttggaagacttaattctgattagagatatagatattactggaaactaattgttttttttctattgtactctgctttatcaaagaagtaaaacatttaaatcgtactacagaaattaagatgttgtcttgcgatccttaataaatgaatgatttccctttaa

SEQ ID NO: 421048 - DNA, 8432 bp, Homo sapiens
  misc_feature (3588)..(3589): n is a, c, g, or t
agcggcatttcaagaccgtactaggtagatggtcaattagagttcccagggtttgaagcctgtaactgctgccgccgctcaagccctccagagcattgctacggctgctgcccttgtactactacctccaaatacgttcttgctggtagtggcggcagcaggaccaattacctcttttttgctctccctcgagaagctccagatggcgtcttccgtgggcaacgtggccgacagcacagaaccaacgaaacgtatgctttccttccaagggttagctgagttggcacatcgagaatatcaggcaggagattttgaggcagctgagagacactgcatgcagctctggagacaagagccagacaatactggtgtgcttttattactttcatctatacacttccagtgtcgaaggctggacagatctgctcactttagcactctggcaattaaacagaacccccttctggcagaagcttattcgaatttggggaatgtgtacaaggaaagagggcagttgcaggaggcaattgagcattatcgacatgcattgcgtctcaaacctgatttcatcgatggttatattaacctggcagccgccttggtagcagcgggtgacatggaaggggcagtacaagcttacgtctctgctcttcagtacaatcctgatttgtactgtgttcgcagtgacctggggaacctgctcaaagccctgggtcgcttggaagaagccaaggtaggtgtttgatagaacacatttaaacatcagtattatgaaaacttgtactttttgccaagtcttcaactcttcattgagctatcttcacaaaacagtcctttgaaactgaggaaaactgacggcacgaatcgcctcagaatagagcagggccaggctttggcatatctgttctaaatctgggggtaaagcaagaacctgaacattttggagcctttctgctgagctagaccatctttataacactgggctccgtcatgatcttatgtgggaataaataacattccttcaaatctgaggcttgcctgctggtgacaagcagagcgcctgtgatttggctcaagactcctatatgatgcaggtgccattgaaaatgctgctcttctaagtcctttgtggcttgtaagtggagaagaatttcatccaaatgttaccctgtaatactggcatttaaaattcttatttaaccttcctcccttcatcttcctcaccctttttacagtggaagaaaggctgttaaaatgattacaaattaataattggaacatcctgtcccttgtccccactcccttcccaagttcctttttcctcttttccaatcctagttgtctaccttcttttcttcctcatttccttcttttattcctccccaccccaaccccttaaaaaaaaaggtcagaaggacaaagctggtttgtttgggaaatggactgatcgaaagaaaacttgccaaagtggaaaggtggcttttagcattctgtgtttccaaataatgaatttgaacaccaggttgggttaattaaagcttttggtataatttaaaattaaatttataaatgcagttgtcttgttacaagccaccttacgcaaccgcgctgcaggggtgaggagtggggagaaaccagaatgcttctgaaactcccacctgttgctctgagccccacgcgcatgctaatgcgtggagtgtatgcgcagagtagctgtctgtttgactgcttcatccagggagggagaaggcttttcagcaccatctaatgttttaaaaggcactagttttaagtgtacagctcataaattctgctgacattttggattaaccttatgtaggttgccagctaatgaattgtaattgatttcaatcttagctgataaatctaattggtaatttatagaacaaatatttgataagctcctattaattgtcaccccaccaagcggacagctaacatgaattgcacttcactgcagctttagagatcggtttaggctgagacattgcgcctgccttaggttgctgacttctttatttcagagctctggagacacctagtttgaaaaatgttattctgtttttttgtgagaacttagtaaacaagaaaatactcttgagtgaaatgcaatgtatttcttttgtaatcagtgcatttgaaaattcaagccagcatattcctagtagatggaagcaaaattaagttgtctttgtagaaaatgaagagcctttcttccagcaaaaatccctgctgtatgcaatagccctgattaaccctctcccttctgcatgtttcccatattacagacttgagactgtcctcattcccatatgtaatagacatccaaagaatttcaattgctttgttgaacttttactaatgatcttgtttttattttctctcttgtttttggtttttcaccattgatattgtatttagaaggtttcaggtgggtgaaacctcctattccatgcgtaaggtgcctcgctgaagggagctcgaggcctggatctagggcagacacacaacctcctcctcctcttccagcaaggaacgcaccgaaaagtcacatgatgagaaatatggtaacgggtttgtaactgccacagcaaaacaatttgcctccatgcctgaatcttctgtcttgtggcttcagaaacagcttaaaataattttatttacaagcaagttatgtaagagaatgttttatactatagccacaattctgtcaaagataagtaaaagttaattgatattaaaaattattagagataatttacttagtaaaagcttctaactcttcttgttgttcattttttttccttttttcttctttgtttggattgcagcattctgctcttctgatgatgcgctgtgaccctgcagtagcgcaaaggctgcgcagcgttaatgcgcattgcgtgcgaatgaacccctgtgaacggttgactagatgagtaatctgattgactggctccctcagtcctattctgtagcctttttggataaaattgggttttaacatacctcgagtccaactaatctcattaaacaaatattctccatgggcctgtctagtagattaatggatctggttggccgtttgctgcgtctaggggtgttctatgtagcgcagcagttcgcagcgattgcgcagtgcgatgctgttaggttgcgcaagcgatgtttgcgctcgcattacagggacctcaacctaggtgcaatcctgtcatgtgaggtttcagcttcagtcctccttgggagacggggcattgtgagaatgtaacttaaagcctggctttatgatatcctacttggcagaaagacatttttctcctcagtagcatagttttgatgttagtgaggaacattgttgaagagcagcatttcccaaaatgtgtttcatagtattctaataaaatgcccaatgaaagaagagttccatggtcaactaagttcagggaaccctgttacactattaaaggcttagggaagtccagtaaagaaacctattttccgaatttatttgatcatgaactccttttttttcagccatacctcttaacacctcatagaacacacttnnggaaacagtgggggtaggaaaactcggcctcaagttgcgccctctaggtagcacttgaaaacatgacaagggcccgtagttgtttggataagagaactccagcatagagccttatagcaactgacttcccagttaagtcccagtgtaagggttggtctttggttggcagaactgaacatggtggtttgcacttgggttctggtggcgcaggcgcaggagcagccagctgtggcagcgcattagttttggcgcaagcgagcctatgctgcagggtcacttttggctggtcagagaaggaataatgatatcaccttcttccccccctccccccaatcttttttttttccctttacaaattttcccctttccctttacctcctttccctcccatcttctttcattaacccctcctaaggcatgttatttgaaagcaattgagacgcaaccgaactttgcagtagcttggagtaatcttggctgtgttttcaatgcacaaggggaaatttggcttgcaattcatcactttgaaaaggctgtcacccttgacccaaactttctggatgcttatatcaatttaggaaatgtcttgaaagaggcacgcatttttgacagagctgtggcagcttatcttcgtgccctaagtttgagtccaaatcacgcagtggtgcacggcaacctggcttgtgtatactatgagcaaggcctgatagatctggcaatagacacctacaggcgggctatcgaactacaaccacatttccctgatgcttactgcaacctagccaatgctctcaaagagaagggcagtgttgctgaagcagaagattgttataatacagctctccgtctgtgtcccacccatgcagactctctgaataacctagccaatatcaaacgagaacagggaaacattgaagaggcagttcgcttgtatcgtaaagcattagaagtcttcccagagtttgctgctgcccattcaaatttagcaagtgtactgcagcagcagggaaaactgcaggaagctctgatgcattataaggaggctattcgaatcagtcctacctttgctgatgcctactctaatatgggaaacactctaaaggagatgcaggatgttcagggagccttgcagtgttatacgcgtgccatccaaattaatcctgcatttgcagatgcacatagcaatctggcttccattcataaggattcagggaatattccagaagccatagcttcttaccgcacggctctgaaacttaagcctgattttcctgatgcttattgtaacttggctcattgcctgcagattgtctgtgattggacagactatgatgagcgaatgaagaagttggtcagtattgtggctgaccagttagagaagaataggttgccttctgtgcatcctcatcatagtatgctatatcctctttctcatggcttcaggaaggctattgctgagaggcacggcaacctgtgcttagataagattaatgttcttcataaaccaccatatgaacatccaaaagacttgaagctcagtgatggtcggctgcgtgtaggatatgtgagttccgactttgggaatcatcctacttctcaccttatgcagtctattccaggcatgcacaatcctgataaatttgaggtgttctgttatgccctgagcccagacgatggcacaaacttccgagtgaaggtgatggcagaagccaatcatttcattgatctttctcagattccatgcaatggaaaagcagctgatcgcatccatcaggatggaattcatatccttgtaaatatgaatggctatactaagggcgctcgaaatgagctttttgctctcaggccagctcctattcaggcaatgtggctgggataccctgggacgagtggtgcgcttttcatggattatattatcactgatcaggaaacttcgccagctgaagttgctgagcagtattccgagaaattggcttatatgccccacactttttttattggtgatcatgctaatatgttccctcacctgaagaaaaaagcagtcatcgattttaagtccaatgggcacatttatgacaatcggatagttctgaatggcatcgacctcaaagcatttcttgatagtctaccagatgtgaaaattgtcaagatgaagtgtcctgatggaggagacaatgcagatagcagtaacacagctcttaatatgcctgttattcctatgaatactattgcagaagcagttattgaaatgattaaccgaggacagattcaaataacaattaatggattcagtattagcaatggactggcaactactcagatcaacaataaggctgcaactggagaggaggttccccgtaccattattgtaaccacccgttctcagtacgggttaccagaagatgccatcgtatactgtaactttaatcagttgtataaaattgacccttctactttgcagatgtgggcaaacattctgaagcgtgttcccaatagtgtactctggctgttgcgttttccagcagtaggagaacctaatattcaacagtatgcacaaaacatgggcctgccccagaaccgtatcattttttcacctgttgctcctaaagaggaacacgtcaggagaggccagctggctgatgtctgcttggacactccactctgtaatgggcacaccacagggatggatgtcctctgggcagggacccccatggtgactatgccaggagagactcttgcttctcgagttgcagcatcccagctcacttgcttaggttgtcttgagcttattgctaaaaacagacaagaatatgaagacatagctgtgaagctgggaactgatctagaatacctgaagaaagttcgtggcaaagtctggaagcaaagaatatctagccctctgttcaacaccaaacaatacacaatggaactagagcggctctatctacagatgtgggagcattatgcagctggcaacaaacctgaccacatgattaagcctgttgaagtcactgagtcagcataaataaagactgcacaggagaattacccctatacctgagcctcaaccttctgggggaaagggaactagataacatacttcttacttgtctgtacagtaccttgttgcagatgggtgatatataatggtaatagaatagcacagccagacttgcttcctgcatggtagggagagacacaaaagatgggaaactgcttttccacaaggaatctccgtagaattttgcggcgaccagatggtgcataggtctggaaggtctgatctcccttggtcttccatgggatggttagtgtggaggggagatatagattgtccggccgctttgtgattccatggattgattcagtcttctggatttttttttctttatattttgggtactggagcttttaaaaatgtttggtttcaggtatttttattcatgtgaagtgtatatgattctcttgagataaggttttaagctaaaatgttactccctgttttagtttctgaactctgacagattgacagggactttgctggtgtagtctttttataggttttataaaccacttgagcctatatcagtcgttttagtgtctgacctaatatttggagctatcagtgctttgttgatttagatgatgactcaagattttttctggtccatttcccatttccttttcttccctgacccccataccctcacccttaaaattctcctgtaactcaactaacaaaatcaagcctgattcaaaacatcctagggtgttttaaacacaccatctggtgccaaatgaagatttttaggagtgattactaattatcaagggcacagttgtggtactgtcattgataataatatagtttttttttttttcctaattttgacctgtttcaccagtgttttacccttgactgccccttctatgctgcttccaaaagtgatagtgtgtgtaagatttttaccttcctttctaaagttttttttttttttttttaaaggggaggcccggggtctccactatttttttcacacgcagagaattggaaatccccgagggataaggtttaagtgtttcccaaggtatttgggactcaggaaagtgtcacaggttattctccacagggggtttaaatatacccctttcatctcaagagaaactgggcgttattggggtaaaacaccctcggagaggggagcccttcttagtggtgcccctcaaggtaatttatttttttctaaagatataatatacacggggtgttcgggagaactgggggcctgagaacgtcttgtgtacagagttttcagcgccttcaggttaggatacgcagaatcgggcccttggctttgtggggcgtcggggcgtctcccacacttttaaccctttattaggccttccgggggacctttgggttttctacactcccttgggcgaatctccacttttgggggctcctaccccaaggcggctcggggcgttcggggggtcttaacaacggccacccttttttggtctcttcctcgtgggggcgcgcagcaaataagggggccattagcgcatacccaaggtgggaggggagaaaagtggggggcggggcacagaaggcggtgtctagcatttgtgtgctttcccacaggccgtggagcgctgtgcgcccctatttgtgtgtgttggcacgggtggatgccccgaaaggtgtctcctaaggcggacccacttttggggcttctacaggaccgttgaacttcgggggcagactcttgtgggtggacccccattctggcgcaggggggtcccaggggattctttgcacccacatttggctgtgtgcgca

SEQ ID NO: 421049 - DNA, 2255 bp, Homo sapiens
gagctcggccccccacaccacctgagtcaacaacttaatatgactagcttacacaatggaactagagcggctctatctacagatgtgggagcattatgcagctggcaacaaacctgaccacatgattaagcctgttgaagtcactgagtcagcataaataaagactgcacaggagaattacccctatacctgagcctcaaccttctgggggaaagggaactagataacatacttcttacttgtctgtacagtaccttgttgcagatgggtgatatataatggtaatagaatagcacagccagacttgcttcctgcatggtagggagagacacaaaagatgggaaactgcttttccacaaggaatctccgtagaattttgcggcgaccagatggtgcataggtctggaaggtctgatctcccttggtcttccatgggatggttagtgtggaggggagatatagattgtccggccgctttgtgattccatggattgattcagtcttctggatttttttttctttatattttgggtactggagcttttaaaaatgtttggtttcaggtatttttattcatgtgaagtgtatatgattctcttgagataaggttttaagctaaaatgttactccctgttttagtttctgaactctgacagattgacagggactttgctggtgtagtctttttataggttttataaaccacttgagcctatatcagtcgttttagtgtctgacctaatatttggagctatcagtgctttgttgatttagatgatgactcaagattttttctggtccatttcccatttccttttcttccctgacccccataccctcacccttaaaattctcctgtaactcaactaacaaaatcaagcctgattcaaaacatcctagggtgttttaaacacaccatctggtgccaaatgaagatttttaggagtgattactaattatcaagggcacagttgtggtactgtcattgataataatatagtttttttttttttcctaattttgacctgtttcaccagtgttttacccttgactgccccttctatgctgcttccaaaagtgatagtgtgtgtaagatttttaccttcctttctaaagttttttttttttttttttaagtgagtcctgttcttcctatttctttcagcagaaatgaaatcccaggtaagtataagtattcaagtatttgatcagtaagtcacagttatctccagtgcattaaataaccttcatcaagaaataggttataggtaaaatctctgaaggatcatctatgtattcaagtaattattttttagataataactgtcttctggacttggtcttgaagtctgtacagattcagcctcagtagtagcgaactgcactgctgtttggtttggagtacaaattagacttatagtcctcctggaacttgagttattaaaatcataggaataaaattatgggatctcaacaaagggtcgagggtttgaggcttaaacaagccaacatatgaatatatgttttgtctcgctatactgcacttacgctatccagttgcaggtaattttttgtctgctagtagtgttctagattatgtctttccaaagcgctgaggctgtgcacctattctgtagttgcagctgatgcctgaatgtatcctagctgacaaattattgattaataagaacttgaatttctggaagattcttactgttaaccaaattttgagcaaggagtctcaaaggtaattctgaaccagaattacatgttaatgaacagtgtaccttttaacagtgtaaatcacggaatatccgtgaagggatttcttaatttattttttaccggttgattgaaatatcagttaaaggttgccagcatggttgcagataaactgatgtttgaaattcgctgaaatacttaatgtggaataggataatatacttccaatgccctcaaggctgtgaccttacagccattttacatagcacatcattcctcctatagggatgaactttttcctggcacgaaaagtagccgctctggttgaagctttgcttattgtaacaggcttttatttccaggtaatatgtcttggaagacttaattctgattagagatatagatattactggaaactaattgttttttttctattgtactctgctttatcaaagaagtaaaacatttaaatcgtactacagaaattaagatgttgtcttgcgatccttaataaatgaatgatttccctttaa

SEQ ID NO: 421050 - DNA, 6809 bp, Homo sapiens
  misc_feature (3588)..(3589): n is a, c, g, or t
  misc_feature (6786)..(6787): n is a, c, g, or t
  misc_feature (6802)..(6802): n is a, c, g, or t
agcggcatttcaagaccgtactaggtagatggtcaattagagttcccagggtttgaagcctgtaactgctgccgccgctcaagccctccagagcattgctacggctgctgcccttgtactactacctccaaatacgttcttgctggtagtggcggcagcaggaccaattacctcttttttgctctccctcgagaagctccagatggcgtcttccgtgggcaacgtggccgacagcacagaaccaacgaaacgtatgctttccttccaagggttagctgagttggcacatcgagaatatcaggcaggagattttgaggcagctgagagacactgcatgcagctctggagacaagagccagacaatactggtgtgcttttattactttcatctatacacttccagtgtcgaaggctggacagatctgctcactttagcactctggcaattaaacagaacccccttctggcagaagcttattcgaatttggggaatgtgtacaaggaaagagggcagttgcaggaggcaattgagcattatcgacatgcattgcgtctcaaacctgatttcatcgatggttatattaacctggcagccgccttggtagcagcgggtgacatggaaggggcagtacaagcttacgtctctgctcttcagtacaatcctgatttgtactgtgttcgcagtgacctggggaacctgctcaaagccctgggtcgcttggaagaagccaaggtaggtgtttgatagaacacatttaaacatcagtattatgaaaacttgtactttttgccaagtcttcaactcttcattgagctatcttcacaaaacagtcctttgaaactgaggaaaactgacggcacgaatcgcctcagaatagagcagggccaggctttggcatatctgttctaaatctgggggtaaagcaagaacctgaacattttggagcctttctgctgagctagaccatctttataacactgggctccgtcatgatcttatgtgggaataaataacattccttcaaatctgaggcttgcctgctggtgacaagcagagcgcctgtgatttggctcaagactcctatatgatgcaggtgccattgaaaatgctgctcttctaagtcctttgtggcttgtaagtggagaagaatttcatccaaatgttaccctgtaatactggcatttaaaattcttatttaaccttcctcccttcatcttcctcaccctttttacagtggaagaaaggctgttaaaatgattacaaattaataattggaacatcctgtcccttgtccccactcccttcccaagttcctttttcctcttttccaatcctagttgtctaccttcttttcttcctcatttccttcttttattcctccccaccccaaccccttaaaaaaaaaggtcagaaggacaaagctggtttgtttgggaaatggactgatcgaaagaaaacttgccaaagtggaaaggtggcttttagcattctgtgtttccaaataatgaatttgaacaccaggttgggttaattaaagcttttggtataatttaaaattaaatttataaatgcagttgtcttgttacaagccaccttacgcaaccgcgctgcaggggtgaggagtggggagaaaccagaatgcttctgaaactcccacctgttgctctgagccccacgcgcatgctaatgcgtggagtgtatgcgcagagtagctgtctgtttgactgcttcatccagggagggagaaggcttttcagcaccatctaatgttttaaaaggcactagttttaagtgtacagctcataaattctgctgacattttggattaaccttatgtaggttgccagctaatgaattgtaattgatttcaatcttagctgataaatctaattggtaatttatagaacaaatatttgataagctcctattaattgtcaccccaccaagcggacagctaacatgaattgcacttcactgcagctttagagatcggtttaggctgagacattgcgcctgccttaggttgctgacttctttatttcagagctctggagacacctagtttgaaaaatgttattctgtttttttgtgagaacttagtaaacaagaaaatactcttgagtgaaatgcaatgtatttcttttgtaatcagtgcatttgaaaattcaagccagcatattcctagtagatggaagcaaaattaagttgtctttgtagaaaatgaagagcctttcttccagcaaaaatccctgctgtatgcaatagccctgattaaccctctcccttctgcatgtttcccatattacagacttgagactgtcctcattcccatatgtaatagacatccaaagaatttcaattgctttgttgaacttttactaatgatcttgtttttattttctctcttgtttttggtttttcaccattgatattgtatttagaaggtttcaggtgggtgaaacctcctattccatgcgtaaggtgcctcgctgaagggagctcgaggcctggatctagggcagacacacaacctcctcctcctcttccagcaaggaacgcaccgaaaagtcacatgatgagaaatatggtaacgggtttgtaactgccacagcaaaacaatttgcctccatgcctgaatcttctgtcttgtggcttcagaaacagcttaaaataattttatttacaagcaagttatgtaagagaatgttttatactatagccacaattctgtcaaagataagtaaaagttaattgatattaaaaattattagagataatttacttagtaaaagcttctaactcttcttgttgttcattttttttccttttttcttctttgtttggattgcagcattctgctcttctgatgatgcgctgtgaccctgcagtagcgcaaaggctgcgcagcgttaatgcgcattgcgtgcgaatgaacccctgtgaacggttgactagatgagtaatctgattgactggctccctcagtcctattctgtagcctttttggataaaattgggttttaacatacctcgagtccaactaatctcattaaacaaatattctccatgggcctgtctagtagattaatggatctggttggccgtttgctgcgtctaggggtgttctatgtagcgcagcagttcgcagcgattgcgcagtgcgatgctgttaggttgcgcaagcgatgtttgcgctcgcattacagggacctcaacctaggtgcaatcctgtcatgtgaggtttcagcttcagtcctccttgggagacggggcattgtgagaatgtaacttaaagcctggctttatgatatcctacttggcagaaagacatttttctcctcagtagcatagttttgatgttagtgaggaacattgttgaagagcagcatttcccaaaatgtgtttcatagtattctaataaaatgcccaatgaaagaagagttccatggtcaactaagttcagggaaccctgttacactattaaaggcttagggaagtccagtaaagaaacctattttccgaatttatttgatcatgaactccttttttttcagccatacctcttaacacctcatagaacacacttnnggaaacagtgggggtaggaaaactcggcctcaagttgcgccctctaggtagcacttgaaaacatgacaagggcccgtagttgtttggataagagaactccagcatagagccttatagcaactgacttcccagttaagtcccagtgtaagggttggtctttggttggcagaactgaacatggtggtttgcacttgggttctggtggcgcaggcgcaggagcagccagctgtggcagcgcattagttttggcgcaagcgagcctatgctgcagggtcacttttggctggtcagagaaggaataatgatatcaccttcttccccccctccccccaatcttttttttttccctttacaaattttcccctttccctttacctcctttccctcccatcttctttcattaacccctcctaaggcatgttatttgaaagcaattgagacgcaaccgaactttgcagtagcttggagtaatcttggctgtgttttcaatgcacaaggggaaatttggcttgcaattcatcactttgaaaaggctgtcacccttgacccaaactttctggatgcttatatcaatttaggaaatgtcttgaaagaggcacgcatttttgacagagctgtggcagcttatcttcgtgccctaagtttgagtccaaatcacgcagtggtgcacggcaacctggcttgtgtatactatgagcaaggcctgatagatctggcaatagacacctacaggcgggctatcgaactacaaccacatttccctgatgcttactgcaacctagccaatgctctcaaagagaagggcagtgttgctgaagcagaagattgttataatacagctctccgtctgtgtcccacccatgcagactctctgaataacctagccaatatcaaacgagaacagggaaacattgaagaggcagttcgcttgtatcgtaaagcattagaagtcttcccagagtttgctgctgcccattcaaatttagcaagtgtactgcagcagcagggaaaactgcaggaagctctgatgcattataaggaggctattcgaatcagtcctacctttgctgatgcctactctaatatgggaaacactctaaaggagatgcaggatgttcagggagccttgcagtgttatacgcgtgccatccaaattaatcctgcatttgcagatgcacatagcaatctggcttccattcataaggattcagggaatattccagaagccatagcttcttaccgcacggctctgaaacttaagcctgattttcctgatgcttattgtaacttggctcattgcctgcagattgtctgtgattggacagactatgatgagcgaatgaagaagttggtcagtattgtggctgaccagttagagaagaataggttgccttctgtgcatcctcatcatagtatgctatatcctctttctcatggcttcaggaaggctattgctgagaggcacggcaacctgtgcttagataagattaatgttcttcataaaccaccatatgaacatccaaaagacttgaagctcagtgatggtcggctgcgtgtaggatatgtgagttccgactttgggaatcatcctacttctcaccttatgcagtctattccaggcatgcacaatcctgataaatttgaggtgttctgttatgccctgagcccagacgatggcacaaacttccgagtgaaggtgatggcagaagccaatcatttcattgatctttctcagattccatgcaatggaaaagcagctgatcgcatccatcaggatggaattcatatccttgtaaatatgaatggctatactaagggcgctcgaaatgagctttttgctctcaggccagctcctattcaggcaatgtggctgggataccctgggacgagtggtgcgcttttcatggattatattatcactgatcaggaaacttcgccagctgaagttgctgagcagtattccgagaaattggcttatatgccccacactttttttattggtgatcatgctaatatgttccctcacctgaagaaaaaagcagtcatcgattttaagtccaatgggcacatttatgacaatcggatagttctgaatggcatcgacctcaaagcatttcttgatagtctaccagatgtgaaaattgtcaagatgaagtgtcctgatggaggagacaatgcagatagcagtaacacagctcttaatatgcctgttattcctatgaatactattgcagaagcagttattgaaatgattaaccgaggacagattcaaataacaattaatggattcagtattagcaatggactggcaactactcagatcaacaataaggctgcaactggagaggaggttccccgtaccattattgtaaccacccgttctcagtacgggttaccagaagatgccatcgtatactgtaactttaatcagttgtataaaattgacccttctactttgcagatgtgggcaaacattctgaagcgtgttcccaatagtgtactctggctgttgcgttttccagcagtaggagaacctaatattcaacagtatgcacaaaacatgggcctgccccagaaccgtatcattttttcacctgttgctcctaaagaggaacacgtcaggagaggccagctggctgatgtctgcttggacactccactctgtaatgggcacaccacagggatggatgtcctctgggcagggacccccatggtgactatgccaggagagactcttgcttctcgagttgcagcatcccagctcacttgcttaggttgtcttgagcttattgctaaaaacagacaagaatatgaagacatagctgtgaagctgggaactgatctagaatacctgaagaaagttcgtggcaaagtctggaagcaaagaatatctagccctctgttcaacaccaaacaatacacaatggaactagagcggctctatctacagatgtgggagcattatgcagctggcaacaaacctgaccacatgattaagcctgttgaagtcactgagtcagcataaataaactgcatggtagggagagacacaaaagatgggaaactgcttttccacaaggaatctccgtagaattttgcggcgaccagatggtgcataggtctggaaggtctgatctcccttggtcttccatgggatggttagtgtggaggggagatatagattgtccggccaaacnnaaacccaacggcaancactatt

SEQ ID NO: 421051 - DNA, 1068 bp, Homo sapiens
agcggcatttcaagaccgtactaggtagatggtcaattagagttcccagggtttgaagcctgtaactgctgccgccgctcaagccctccagagcattgctacggctgctgcccttgtactactacctccaaatacgttcttgctggtagtggcggcagcaggaccaattacctcttttttgctctccctcgagaagctccagatggcgtcttccgtgggcaacgtggccgacagcacagaaccaacgaaacgtatgctttccttccaagggttagctgagttggcacatcgagaatatcaggcaggagattttgaggcagctgagagacactgcatgcagctctggagacaagagccagacaatactggtgtgcttttattactttcatctatacacttccagtgtcgaaggctggacagatctgctcactttagcactctggcaattaaacagaacccccttctggcagaagcttattcgaatttggggaatgtgtacaaggaaagagggcagttgcaggaggcaattgagcattatcgacatgcattgcgtctcaaacctgatttcatcgatggttatattaacctggcagccgccttggtagcagcgggtgacatggaaggggcagtacaagcttacgtctctgctcttcagtacaatcctgtgagtaaaattttaatggttactttcccttcctagaaacccagaaagaaacatagtgtgatatttcagacactaaagtaggttttcacatggaataaagtcaaaagtttagaaatgcgtatgtacttaaaatggtgaaattgcttttagctggtctgcgttatgctaaaatatttgttttatttagcaagttatattaaaaagcataaaaattcttattgcaagaaactacatcaattttaaaataacacgtataaagtacagagcacatgacttttttctgttgtgattaactttggataaattctgataagtgtttgcaagttaattgattttcaaggaatggtggataatgggtcttaatctgtaaaatctgtaatataaaatagtttgaaacaagatgc

SEQ ID NO: 421052 - DNA, 1947 bp, Homo sapiens
agcggcatttcaagaccgtactaggtagatggtcaattagagttcccagggtttgaagcctgtaactgctgccgccgctcaagccctccagagcattgctacggctgctgcccttgtactactacctccaaatacgttcttgctggtagtggcggcagcaggaccaattacctcttttttgctctccctcgagaagctccagatggcgtcttccgtgggcaacgtggccgacagcacagggttagctgagttggcacatcgagaatatcaggcaggagattttgaggcagctgagagacactgcatgcagctctggagacaagagccagacaatactggtgtgcttttattactttcatctatacacttccagtgtcgaaggctggacagatctgctcactttagcactctggcaattaaacagaacccccttctggcagaagcttattcgaatttggggaatgtgtacaaggaaagagggcagttgcaggaggcaattgagcattatcgacatgcattgcgtctcaaacctgatttcatcgatggttatattaacctggcagccgccttggtagcagcgggtgacatggaaggggcagtacaagcttacgtctctgctcttcagtacaatcctgatttgtactgtgttcgcagtgacctggggaacctgctcaaagccctgggtcgcttggaagaagccaaggtaggtgtttgatagaacacatttaaacatcagtattatgaaaacttgtactttttgccaagtcttcaactcttcattgagctatcttcacaaaacagtcctttgaaactgaggaaaactgacggcacgaatcgcctcagaatagagcagggccaggctttggcatatctgttctaaatctgggggtaaagcaagaacctgaacattttggagcctttctgctgagctagaccatctttataacactgggctccgtcatgatcttatgtgggaataaataacattccttcaaatctgaggcttgcctgctggtgacaagcagagcgcctgtgatttggctcaagactcctatatgatgcaggtgccattgaaaatgctgctcttctaagtcctttgtggcttgtaagtggagaagaatttcatccaaatgttaccctgtaatactggcatttaaaattcttatttaaccttcctcccttcatcttcctcaccctttttacagtggaagaaaggctgttaaaatgattacaaattaataattggaacatcctgtcccttgtccccactcccttcccaagttcctttttcctcttttccaatcctagttgtctaccttcttttcttcctcatttccttcttttattcctccccaccccaaccccttaaaaaaaaaggtcagaaggacaaagctggtttgtttgggaaatggactgatcgaaagaaaacttgccaaagtggaaaggtggcttttagcattctgtgtttccaaataatgaatttgaacaccaggttgggttaattaaagcttttggtataatttaaaattaaatttataaatgcagttgtcttgttacaagccaccttacgcaaccgcgctgcaggggtgaggagtggggagaaaccagaatgcttctgaaactcccacctgttgctctgagccccacgcgcatgctaatgcgtggagtgtatgcgcagagtagctgtctgtttgactgcttcatccagggagggagaaggcttttcagcaccatctaatgttttaaaaggcactagttttaagtgtacagctcataaattctgctgacattttggattaaccttatgtaggttgccagctaatgaattgtaattgatttcaatcttagctgataaatctaattggtaatttatagaacaaatatttgataagctcctattaattgtcaccccaccaagccatgtgaataaaataatctggaagtagc

SEQ ID NO: 421053 - DNA, 8682 bp, Homo sapiens
  misc_feature (3558)..(3559): n is a, c, g, or t
agcggcatttcaagaccgtactaggtagatggtcaattagagttcccagggtttgaagcctgtaactgctgccgccgctcaagccctccagagcattgctacggctgctgcccttgtactactacctccaaatacgttcttgctggtagtggcggcagcaggaccaattacctcttttttgctctccctcgagaagctccagatggcgtcttccgtgggcaacgtggccgacagcacagggttagctgagttggcacatcgagaatatcaggcaggagattttgaggcagctgagagacactgcatgcagctctggagacaagagccagacaatactggtgtgcttttattactttcatctatacacttccagtgtcgaaggctggacagatctgctcactttagcactctggcaattaaacagaacccccttctggcagaagcttattcgaatttggggaatgtgtacaaggaaagagggcagttgcaggaggcaattgagcattatcgacatgcattgcgtctcaaacctgatttcatcgatggttatattaacctggcagccgccttggtagcagcgggtgacatggaaggggcagtacaagcttacgtctctgctcttcagtacaatcctgatttgtactgtgttcgcagtgacctggggaacctgctcaaagccctgggtcgcttggaagaagccaaggtaggtgtttgatagaacacatttaaacatcagtattatgaaaacttgtactttttgccaagtcttcaactcttcattgagctatcttcacaaaacagtcctttgaaactgaggaaaactgacggcacgaatcgcctcagaatagagcagggccaggctttggcatatctgttctaaatctgggggtaaagcaagaacctgaacattttggagcctttctgctgagctagaccatctttataacactgggctccgtcatgatcttatgtgggaataaataacattccttcaaatctgaggcttgcctgctggtgacaagcagagcgcctgtgatttggctcaagactcctatatgatgcaggtgccattgaaaatgctgctcttctaagtcctttgtggcttgtaagtggagaagaatttcatccaaatgttaccctgtaatactggcatttaaaattcttatttaaccttcctcccttcatcttcctcaccctttttacagtggaagaaaggctgttaaaatgattacaaattaataattggaacatcctgtcccttgtccccactcccttcccaagttcctttttcctcttttccaatcctagttgtctaccttcttttcttcctcatttccttcttttattcctccccaccccaaccccttaaaaaaaaaggtcagaaggacaaagctggtttgtttgggaaatggactgatcgaaagaaaacttgccaaagtggaaaggtggcttttagcattctgtgtttccaaataatgaatttgaacaccaggttgggttaattaaagcttttggtataatttaaaattaaatttataaatgcagttgtcttgttacaagccaccttacgcaaccgcgctgcaggggtgaggagtggggagaaaccagaatgcttctgaaactcccacctgttgctctgagccccacgcgcatgctaatgcgtggagtgtatgcgcagagtagctgtctgtttgactgcttcatccagggagggagaaggcttttcagcaccatctaatgttttaaaaggcactagttttaagtgtacagctcataaattctgctgacattttggattaaccttatgtaggttgccagctaatgaattgtaattgatttcaatcttagctgataaatctaattggtaatttatagaacaaatatttgataagctcctattaattgtcaccccaccaagcggacagctaacatgaattgcacttcactgcagctttagagatcggtttaggctgagacattgcgcctgccttaggttgctgacttctttatttcagagctctggagacacctagtttgaaaaatgttattctgtttttttgtgagaacttagtaaacaagaaaatactcttgagtgaaatgcaatgtatttcttttgtaatcagtgcatttgaaaattcaagccagcatattcctagtagatggaagcaaaattaagttgtctttgtagaaaatgaagagcctttcttccagcaaaaatccctgctgtatgcaatagccctgattaaccctctcccttctgcatgtttcccatattacagacttgagactgtcctcattcccatatgtaatagacatccaaagaatttcaattgctttgttgaacttttactaatgatcttgtttttattttctctcttgtttttggtttttcaccattgatattgtatttagaaggtttcaggtgggtgaaacctcctattccatgcgtaaggtgcctcgctgaagggagctcgaggcctggatctagggcagacacacaacctcctcctcctcttccagcaaggaacgcaccgaaaagtcacatgatgagaaatatggtaacgggtttgtaactgccacagcaaaacaatttgcctccatgcctgaatcttctgtcttgtggcttcagaaacagcttaaaataattttatttacaagcaagttatgtaagagaatgttttatactatagccacaattctgtcaaagataagtaaaagttaattgatattaaaaattattagagataatttacttagtaaaagcttctaactcttcttgttgttcattttttttccttttttcttctttgtttggattgcagcattctgctcttctgatgatgcgctgtgaccctgcagtagcgcaaaggctgcgcagcgttaatgcgcattgcgtgcgaatgaacccctgtgaacggttgactagatgagtaatctgattgactggctccctcagtcctattctgtagcctttttggataaaattgggttttaacatacctcgagtccaactaatctcattaaacaaatattctccatgggcctgtctagtagattaatggatctggttggccgtttgctgcgtctaggggtgttctatgtagcgcagcagttcgcagcgattgcgcagtgcgatgctgttaggttgcgcaagcgatgtttgcgctcgcattacagggacctcaacctaggtgcaatcctgtcatgtgaggtttcagcttcagtcctccttgggagacggggcattgtgagaatgtaacttaaagcctggctttatgatatcctacttggcagaaagacatttttctcctcagtagcatagttttgatgttagtgaggaacattgttgaagagcagcatttcccaaaatgtgtttcatagtattctaataaaatgcccaatgaaagaagagttccatggtcaactaagttcagggaaccctgttacactattaaaggcttagggaagtccagtaaagaaacctattttccgaatttatttgatcatgaactccttttttttcagccatacctcttaacacctcatagaacacacttnnggaaacagtgggggtaggaaaactcggcctcaagttgcgccctctaggtagcacttgaaaacatgacaagggcccgtagttgtttggataagagaactccagcatagagccttatagcaactgacttcccagttaagtcccagtgtaagggttggtctttggttggcagaactgaacatggtggtttgcacttgggttctggtggcgcaggcgcaggagcagccagctgtggcagcgcattagttttggcgcaagcgagcctatgctgcagggtcacttttggctggtcagagaaggaataatgatatcaccttcttccccccctccccccaatcttttttttttccctttacaaattttcccctttccctttacctcctttccctcccatcttctttcattaacccctcctaaggcatgttatttgaaagcaattgagacgcaaccgaactttgcagtagcttggagtaatcttggctgtgttttcaatgcacaaggggaaatttggcttgcaattcatcactttgaaaaggctgtcacccttgacccaaactttctggatgcttatatcaatttaggaaatgtcttgaaagaggcacgcatttttgacagagctgtggcagcttatcttcgtgccctaagtttgagtccaaatcacgcagtggtgcacggcaacctggcttgtgtatactatgagcaaggcctgatagatctggcaatagacacctacaggcgggctatcgaactacaaccacatttccctgatgcttactgcaacctagccaatgctctcaaagagaagggcagtgttgctgaagcagaagattgttataatacagctctccgtctgtgtcccacccatgcagactctctgaataacctagccaatatcaaacgagaacagggaaacattgaagaggcagttcgcttgtatcgtaaagcattagaagtcttcccagagtttgctgctgcccattcaaatttagcaagtgtactgcagcagcagggaaaactgcaggaagctctgatgcattataaggaggctattcgaatcagtcctacctttgctgatgcctactctaatatgggaaacactctaaaggagatgcaggatgttcagggagccttgcagtgttatacgcgtgccatccaaattaatcctgcatttgcagatgcacatagcaatctggcttccattcataaggattcagggaatattccagaagccatagcttcttaccgcacggctctgaaacttaagcctgattttcctgatgcttattgtaacttggctcattgcctgcagattgtctgtgattggacagactatgatgagcgaatgaagaagttggtcagtattgtggctgaccagttagagaagaataggttgccttctgtgcatcctcatcatagtatgctatatcctctttctcatggcttcaggaaggctattgctgagaggcacggcaacctgtgcttagataagattaatgttcttcataaaccaccatatgaacatccaaaagacttgaagctcagtgatggtcggctgcgtgtaggatatgtgagttccgactttgggaatcatcctacttctcaccttatgcagtctattccaggcatgcacaatcctgataaatttgaggtgttctgttatgccctgagcccagacgatggcacaaacttccgagtgaaggtgatggcagaagccaatcatttcattgatctttctcagattccatgcaatggaaaagcagctgatcgcatccatcaggatggaattcatatccttgtaaatatgaatggctatactaagggcgctcgaaatgagctttttgctctcaggccagctcctattcaggcaatgtggctgggataccctgggacgagtggtgcgcttttcatggattatattatcactgatcaggaaacttcgccagctgaagttgctgagcagtattccgagaaattggcttatatgccccacactttttttattggtgatcatgctaatatgttccctcacctgaagaaaaaagcagtcatcgattttaagtccaatgggcacatttatgacaatcggatagttctgaatggcatcgacctcaaagcatttcttgatagtctaccagatgtgaaaattgtcaagatgaagtgtcctgatggaggagacaatgcagatagcagtaacacagctcttaatatgcctgttattcctatgaatactattgcagaagcagttattgaaatgattaaccgaggacagattcaaataacaattaatggattcagtattagcaatggactggcaactactcagatcaacaataaggctgcaactggagaggaggttccccgtaccattattgtaaccacccgttctcagtacgggttaccagaagatgccatcgtatactgtaactttaatcagttgtataaaattgacccttctactttgcagatgtgggcaaacattctgaagcgtgttcccaatagtgtactctggctgttgcgttttccagcagtaggagaacctaatattcaacagtatgcacaaaacatgggcctgccccagaaccgtatcattttttcacctgttgctcctaaagaggaacacgtcaggagaggccagctggctgatgtctgcttggacactccactctgtaatgggcacaccacagggatggatgtcctctgggcagggacccccatggtgactatgccaggagagactcttgcttctcgagttgcagcatcccagctcacttgcttaggttgtcttgagcttattgctaaaaacagacaagaatatgaagacatagctgtgaagctgggaactgatctagaatacctgaagaaagttcgtggcaaagtctggaagcaaagaatatctagccctctgttcaacaccaaacaatacacaatggaactagagcggctctatctacagatgtgggagcattatgcagctggcaacaaacctgaccacatgattaagcctgttgaagtcactgagtcagcataaataaagactgcacaggagaattacccctatacctgagcctcaaccttctgggggaaagggaactagataacatacttcttacttgtctgtacagtaccttgttgcagatgggtgatatataatggtaatagaatagcacagccagacttgcttcctgcatggtagggagagacacaaaagatgggaaactgcttttccacaaggaatctccgtagaattttgcggcgaccagatggtgcataggtctggaaggtctgatctcccttggtcttccatgggatggttagtgtggaggggagatatagattgtccggccgctttgtgattccatggattgattcagtcttctggatttttttttctttatattttgggtactggagcttttaaaaatgtttggtttcaggtatttttattcatgtgaagtgtatatgattctcttgagataaggttttaagctaaaatgttactccctgttttagtttctgaactctgacagattgacagggactttgctggtgtagtctttttataggttttataaaccacttgagcctatatcagtcgttttagtgtctgacctaatatttggagctatcagtgctttgttgatttagatgatgactcaagattttttctggtccatttcccatttccttttcttccctgacccccataccctcacccttaaaattctcctgtaactcaactaacaaaatcaagcctgattcaaaacatcctagggtgttttaaacacaccatctggtgccaaatgaagatttttaggagtgattactaattatcaagggcacagttgtggtactgtcattgataataatatagtttttttttttttcctaattttgacctgtttcaccagtgttttacccttgactgccccttctatgctgcttccaaaagtgatagtgtgtgtaagatttttaccttcctttctaaagttttttttttttttttttaagtgagtcctgttcttcctatttctttcagcagaaatgaaatcccaggtaagtataagtattcaagtatttgatcagtaagtcacagttatctccagtgcattaaataaccttcatcaagaaataggttataggtaaaatctctgaaggatcatctatgtattcaagtaattattttttagataataactgtcttctggacttggtcttgaagtctgtacagattcagcctcagtagtagcgaactgcactgctgtttggtttggagtacaaattagacttatagtcctcctggaacttgagttattaaaatcataggaataaaattatgggatctcaacaaagggtcgagggtttgaggcttaaacaagccaacatatgaatatatgttttgtctcgctatactgcacttacgctatccagttgcaggtaattttttgtctgctagtagtgttctagattatgtctttccaaagcgctgaggctgtgcacctattctgtagttgcagctgatgcctgaatgtatcctagctgacaaattattgattaataagaacttgaatttctggaagattcttactgttaaccaaattttgagcaaggagtctcaaaggtaattctgaaccagaattacatgttaatgaacagtgtaccttttaacagtgtaaatcacggaatatccgtgaagggatttcttaatttattttttaccggttgattgaaatatcagttaaaggttgccagcatggttgcagataaactgatgtttgaaattcgctgaaatacttaatgtggaataggataatatacttccaatgccctcaaggctgtgaccttacagccattttacatagcacatcattcctcctatagggatgaactttttcctggcacgaaaagtagccgctctggttgaagctttgcttattgtaacaggcttttatttccaggtaatatgtcttggaagacttaattctgattagagatatagatattactggaaactaattgttttttttctattgtactctgctttatcaaagaagtaaaacatttaaatcgtactacagaaattaagatgttgtcttgcgatccttaataaatgaatgatttccctttaa

SEQ ID NO: 421054 - DNA, 7136 bp, Homo sapiens
  misc_feature (2012)..(2013): n is a, c, g, or t
agcggcatttcaagaccgtactaggtagatggtcaattagagttcccagggtttgaagcctgtaactgctgccgccgctcaagccctccagagcattgctacggctgctgcccttgtactactacctccaaatacgttcttgctggtagtggcggcagcaggaccaattacctcttttttgctctccctcgagaagctccagatggcgtcttccgtgggcaacgtggccgacagcacagaaccaacgaaacgtatgctttccttccaagggttagctgagttggcacatcgagaatatcaggcaggagattttgaggcagctgagagacactgcatgcagctctggagacaagagccagacaatactggtgtgcttttattactttcatctatacacttccagtgtcgaaggctggacagatctgctcactttagcactctggcaattaaacagaacccccttctggcagaagcttattcgaatttggggaatgtgtacaaggaaagagggcagttgcaggaggcaattgagcattatcgacatgcattgcgtctcaaacctgatttcatcgatggttatattaacctggcagccgccttggtagcagcgggtgacatggaaggggcagtacaagcttacgtctctgctcttcagtacaatcctgatttgtactgtgttcgcagtgacctggggaacctgctcaaagccctgggtcgcttggaagaagccaagacttgagactgtcctcattcccatatgtaatagacatccaaagaatttcaattgctttgttgaacttttactaatgatcttgtttttattttctctcttgtttttggtttttcaccattgatattgtatttagaaggtttcaggtgggtgaaacctcctattccatgcgtaaggtgcctcgctgaagggagctcgaggcctggatctagggcagacacacaacctcctcctcctcttccagcaaggaacgcaccgaaaagtcacatgatgagaaatatggtaacgggtttgtaactgccacagcaaaacaatttgcctccatgcctgaatcttctgtcttgtggcttcagaaacagcttaaaataattttatttacaagcaagttatgtaagagaatgttttatactatagccacaattctgtcaaagataagtaaaagttaattgatattaaaaattattagagataatttacttagtaaaagcttctaactcttcttgttgttcattttttttccttttttcttctttgtttggattgcagcattctgctcttctgatgatgcgctgtgaccctgcagtagcgcaaaggctgcgcagcgttaatgcgcattgcgtgcgaatgaacccctgtgaacggttgactagatgagtaatctgattgactggctccctcagtcctattctgtagcctttttggataaaattgggttttaacatacctcgagtccaactaatctcattaaacaaatattctccatgggcctgtctagtagattaatggatctggttggccgtttgctgcgtctaggggtgttctatgtagcgcagcagttcgcagcgattgcgcagtgcgatgctgttaggttgcgcaagcgatgtttgcgctcgcattacagggacctcaacctaggtgcaatcctgtcatgtgaggtttcagcttcagtcctccttgggagacggggcattgtgagaatgtaacttaaagcctggctttatgatatcctacttggcagaaagacatttttctcctcagtagcatagttttgatgttagtgaggaacattgttgaagagcagcatttcccaaaatgtgtttcatagtattctaataaaatgcccaatgaaagaagagttccatggtcaactaagttcagggaaccctgttacactattaaaggcttagggaagtccagtaaagaaacctattttccgaatttatttgatcatgaactccttttttttcagccatacctcttaacacctcatagaacacacttnnggaaacagtgggggtaggaaaactcggcctcaagttgcgccctctaggtagcacttgaaaacatgacaagggcccgtagttgtttggataagagaactccagcatagagccttatagcaactgacttcccagttaagtcccagtgtaagggttggtctttggttggcagaactgaacatggtggtttgcacttgggttctggtggcgcaggcgcaggagcagccagctgtggcagcgcattagttttggcgcaagcgagcctatgctgcagggtcacttttggctggtcagagaaggaataatgatatcaccttcttccccccctccccccaatcttttttttttccctttacaaattttcccctttccctttacctcctttccctcccatcttctttcattaacccctcctaaggcatgttatttgaaagcaattgagacgcaaccgaactttgcagtagcttggagtaatcttggctgtgttttcaatgcacaaggggaaatttggcttgcaattcatcactttgaaaaggctgtcacccttgacccaaactttctggatgcttatatcaatttaggaaatgtcttgaaagaggcacgcatttttgacagagctgtggcagcttatcttcgtgccctaagtttgagtccaaatcacgcagtggtgcacggcaacctggcttgtgtatactatgagcaaggcctgatagatctggcaatagacacctacaggcgggctatcgaactacaaccacatttccctgatgcttactgcaacctagccaatgctctcaaagagaagggcagtgttgctgaagcagaagattgttataatacagctctccgtctgtgtcccacccatgcagactctctgaataacctagccaatatcaaacgagaacagggaaacattgaagaggcagttcgcttgtatcgtaaagcattagaagtcttcccagagtttgctgctgcccattcaaatttagcaagtgtactgcagcagcagggaaaactgcaggaagctctgatgcattataaggaggctattcgaatcagtcctacctttgctgatgcctactctaatatgggaaacactctaaaggagatgcaggatgttcagggagccttgcagtgttatacgcgtgccatccaaattaatcctgcatttgcagatgcacatagcaatctggcttccattcataaggattcagggaatattccagaagccatagcttcttaccgcacggctctgaaacttaagcctgattttcctgatgcttattgtaacttggctcattgcctgcagattgtctgtgattggacagactatgatgagcgaatgaagaagttggtcagtattgtggctgaccagttagagaagaataggttgccttctgtgcatcctcatcatagtatgctatatcctctttctcatggcttcaggaaggctattgctgagaggcacggcaacctgtgcttagataagattaatgttcttcataaaccaccatatgaacatccaaaagacttgaagctcagtgatggtcggctgcgtgtaggatatgtgagttccgactttgggaatcatcctacttctcaccttatgcagtctattccaggcatgcacaatcctgataaatttgaggtgttctgttatgccctgagcccagacgatggcacaaacttccgagtgaaggtgatggcagaagccaatcatttcattgatctttctcagattccatgcaatggaaaagcagctgatcgcatccatcaggatggaattcatatccttgtaaatatgaatggctatactaagggcgctcgaaatgagctttttgctctcaggccagctcctattcaggcaatgtggctgggataccctgggacgagtggtgcgcttttcatggattatattatcactgatcaggaaacttcgccagctgaagttgctgagcagtattccgagaaattggcttatatgccccacactttttttattggtgatcatgctaatatgttccctcacctgaagaaaaaagcagtcatcgattttaagtccaatgggcacatttatgacaatcggatagttctgaatggcatcgacctcaaagcatttcttgatagtctaccagatgtgaaaattgtcaagatgaagtgtcctgatggaggagacaatgcagatagcagtaacacagctcttaatatgcctgttattcctatgaatactattgcagaagcagttattgaaatgattaaccgaggacagattcaaataacaattaatggattcagtattagcaatggactggcaactactcagatcaacaataaggctgcaactggagaggaggttccccgtaccattattgtaaccacccgttctcagtacgggttaccagaagatgccatcgtatactgtaactttaatcagttgtataaaattgacccttctactttgcagatgtgggcaaacattctgaagcgtgttcccaatagtgtactctggctgttgcgttttccagcagtaggagaacctaatattcaacagtatgcacaaaacatgggcctgccccagaaccgtatcattttttcacctgttgctcctaaagaggaacacgtcaggagaggccagctggctgatgtctgcttggacactccactctgtaatgggcacaccacagggatggatgtcctctgggcagggacccccatggtgactatgccaggagagactcttgcttctcgagttgcagcatcccagctcacttgcttaggttgtcttgagcttattgctaaaaacagacaagaatatgaagacatagctgtgaagctgggaactgatctagaatacctgaagaaagttcgtggcaaagtctggaagcaaagaatatctagccctctgttcaacaccaaacaatacacaatggaactagagcggctctatctacagatgtgggagcattatgcagctggcaacaaacctgaccacatgattaagcctgttgaagtcactgagtcagcataaataaagactgcacaggagaattacccctatacctgagcctcaaccttctgggggaaagggaactagataacatacttcttacttgtctgtacagtaccttgttgcagatgggtgatatataatggtaatagaatagcacagccagacttgcttcctgcatggtagggagagacacaaaagatgggaaactgcttttccacaaggaatctccgtagaattttgcggcgaccagatggtgcataggtctggaaggtctgatctcccttggtcttccatgggatggttagtgtggaggggagatatagattgtccggccgctttgtgattccatggattgattcagtcttctggatttttttttctttatattttgggtactggagcttttaaaaatgtttggtttcaggtatttttattcatgtgaagtgtatatgattctcttgagataaggttttaagctaaaatgttactccctgttttagtttctgaactctgacagattgacagggactttgctggtgtagtctttttataggttttataaaccacttgagcctatatcagtcgttttagtgtctgacctaatatttggagctatcagtgctttgttgatttagatgatgactcaagattttttctggtccatttcccatttccttttcttccctgacccccataccctcacccttaaaattctcctgtaactcaactaacaaaatcaagcctgattcaaaacatcctagggtgttttaaacacaccatctggtgccaaatgaagatttttaggagtgattactaattatcaagggcacagttgtggtactgtcattgataataatatagtttttttttttttcctaattttgacctgtttcaccagtgttttacccttgactgccccttctatgctgcttccaaaagtgatagtgtgtgtaagatttttaccttcctttctaaagttttttttttttttttttaagtgagtcctgttcttcctatttctttcagcagaaatgaaatcccaggtaagtataagtattcaagtatttgatcagtaagtcacagttatctccagtgcattaaataaccttcatcaagaaataggttataggtaaaatctctgaaggatcatctatgtattcaagtaattattttttagataataactgtcttctggacttggtcttgaagtctgtacagattcagcctcagtagtagcgaactgcactgctgtttggtttggagtacaaattagacttatagtcctcctggaacttgagttattaaaatcataggaataaaattatgggatctcaacaaagggtcgagggtttgaggcttaaacaagccaacatatgaatatatgttttgtctcgctatactgcacttacgctatccagttgcaggtaattttttgtctgctagtagtgttctagattatgtctttccaaagcgctgaggctgtgcacctattctgtagttgcagctgatgcctgaatgtatcctagctgacaaattattgattaataagaacttgaatttctggaagattcttactgttaaccaaattttgagcaaggagtctcaaaggtaattctgaaccagaattacatgttaatgaacagtgtaccttttaacagtgtaaatcacggaatatccgtgaagggatttcttaatttattttttaccggttgattgaaatatcagttaaaggttgccagcatggttgcagataaactgatgtttgaaattcgctgaaatacttaatgtggaataggataatatacttccaatgccctcaaggctgtgaccttacagccattttacatagcacatcattcctcctatagggatgaactttttcctggcacgaaaagtagccgctctggttgaagctttgcttattgtaacaggcttttatttccaggtaatatgtcttggaagacttaattctgattagagatatagatattactggaaactaattgttttttttctattgtactctgctttatcaaagaagtaaaacatttaaatcgtactacagaaattaagatgttgtcttgcgatccttaataaatgaatgatttccctttaa

SEQ ID NO: 421055 - DNA, 8662 bp, Homo sapiens
  misc_feature (3588)..(3589): n is a, c, g, or t
agcggcatttcaagaccgtactaggtagatggtcaattagagttcccagggtttgaagcctgtaactgctgccgccgctcaagccctccagagcattgctacggctgctgcccttgtactactacctccaaatacgttcttgctggtagtggcggcagcaggaccaattacctcttttttgctctccctcgagaagctccagatggcgtcttccgtgggcaacgtggccgacagcacagaaccaacgaaacgtatgctttccttccaagggttagctgagttggcacatcgagaatatcaggcaggagattttgaggcagctgagagacactgcatgcagctctggagacaagagccagacaatactggtgtgcttttattactttcatctatacacttccagtgtcgaaggctggacagatctgctcactttagcactctggcaattaaacagaacccccttctggcagaagcttattcgaatttggggaatgtgtacaaggaaagagggcagttgcaggaggcaattgagcattatcgacatgcattgcgtctcaaacctgatttcatcgatggttatattaacctggcagccgccttggtagcagcgggtgacatggaaggggcagtacaagcttacgtctctgctcttcagtacaatcctgatttgtactgtgttcgcagtgacctggggaacctgctcaaagccctgggtcgcttggaagaagccaaggtaggtgtttgatagaacacatttaaacatcagtattatgaaaacttgtactttttgccaagtcttcaactcttcattgagctatcttcacaaaacagtcctttgaaactgaggaaaactgacggcacgaatcgcctcagaatagagcagggccaggctttggcatatctgttctaaatctgggggtaaagcaagaacctgaacattttggagcctttctgctgagctagaccatctttataacactgggctccgtcatgatcttatgtgggaataaataacattccttcaaatctgaggcttgcctgctggtgacaagcagagcgcctgtgatttggctcaagactcctatatgatgcaggtgccattgaaaatgctgctcttctaagtcctttgtggcttgtaagtggagaagaatttcatccaaatgttaccctgtaatactggcatttaaaattcttatttaaccttcctcccttcatcttcctcaccctttttacagtggaagaaaggctgttaaaatgattacaaattaataattggaacatcctgtcccttgtccccactcccttcccaagttcctttttcctcttttccaatcctagttgtctaccttcttttcttcctcatttccttcttttattcctccccaccccaaccccttaaaaaaaaaggtcagaaggacaaagctggtttgtttgggaaatggactgatcgaaagaaaacttgccaaagtggaaaggtggcttttagcattctgtgtttccaaataatgaatttgaacaccaggttgggttaattaaagcttttggtataatttaaaattaaatttataaatgcagttgtcttgttacaagccaccttacgcaaccgcgctgcaggggtgaggagtggggagaaaccagaatgcttctgaaactcccacctgttgctctgagccccacgcgcatgctaatgcgtggagtgtatgcgcagagtagctgtctgtttgactgcttcatccagggagggagaaggcttttcagcaccatctaatgttttaaaaggcactagttttaagtgtacagctcataaattctgctgacattttggattaaccttatgtaggttgccagctaatgaattgtaattgatttcaatcttagctgataaatctaattggtaatttatagaacaaatatttgataagctcctattaattgtcaccccaccaagcggacagctaacatgaattgcacttcactgcagctttagagatcggtttaggctgagacattgcgcctgccttaggttgctgacttctttatttcagagctctggagacacctagtttgaaaaatgttattctgtttttttgtgagaacttagtaaacaagaaaatactcttgagtgaaatgcaatgtatttcttttgtaatcagtgcatttgaaaattcaagccagcatattcctagtagatggaagcaaaattaagttgtctttgtagaaaatgaagagcctttcttccagcaaaaatccctgctgtatgcaatagccctgattaaccctctcccttctgcatgtttcccatattacagacttgagactgtcctcattcccatatgtaatagacatccaaagaatttcaattgctttgttgaacttttactaatgatcttgtttttattttctctcttgtttttggtttttcaccattgatattgtatttagaaggtttcaggtgggtgaaacctcctattccatgcgtaaggtgcctcgctgaagggagctcgaggcctggatctagggcagacacacaacctcctcctcctcttccagcaaggaacgcaccgaaaagtcacatgatgagaaatatggtaacgggtttgtaactgccacagcaaaacaatttgcctccatgcctgaatcttctgtcttgtggcttcagaaacagcttaaaataattttatttacaagcaagttatgtaagagaatgttttatactatagccacaattctgtcaaagataagtaaaagttaattgatattaaaaattattagagataatttacttagtaaaagcttctaactcttcttgttgttcattttttttccttttttcttctttgtttggattgcagcattctgctcttctgatgatgcgctgtgaccctgcagtagcgcaaaggctgcgcagcgttaatgcgcattgcgtgcgaatgaacccctgtgaacggttgactagatgagtaatctgattgactggctccctcagtcctattctgtagcctttttggataaaattgggttttaacatacctcgagtccaactaatctcattaaacaaatattctccatgggcctgtctagtagattaatggatctggttggccgtttgctgcgtctaggggtgttctatgtagcgcagcagttcgcagcgattgcgcagtgcgatgctgttaggttgcgcaagcgatgtttgcgctcgcattacagggacctcaacctaggtgcaatcctgtcatgtgaggtttcagcttcagtcctccttgggagacggggcattgtgagaatgtaacttaaagcctggctttatgatatcctacttggcagaaagacatttttctcctcagtagcatagttttgatgttagtgaggaacattgttgaagagcagcatttcccaaaatgtgtttcatagtattctaataaaatgcccaatgaaagaagagttccatggtcaactaagttcagggaaccctgttacactattaaaggcttagggaagtccagtaaagaaacctattttccgaatttatttgatcatgaactccttttttttcagccatacctcttaacacctcatagaacacacttnnggaaacagtgggggtaggaaaactcggcctcaagttgcgccctctaggtagcacttgaaaacatgacaagggcccgtagttgtttggataagagaactccagcatagagccttatagcaactgacttcccagttaagtcccagtgtaagggttggtctttggttggcagaactgaacatggtggtttgcacttgggttctggtggcgcaggcgcaggagcagccagctgtggcagcgcattagttttggcgcaagcgagcctatgctgcagggtcacttttggctggtcagagaaggaataatgatatcaccttcttccccccctccccccaatcttttttttttccctttacaaattttcccctttccctttacctcctttccctcccatcttctttcattaacccctcctaaggcatgttatttgaaagcaattgagacgcaaccgaactttgcagtagcttggagtaatcttggctgtgttttcaatgcacaaggggaaatttggcttgcaattcatcactttgaaaaggctgtcacccttgacccaaactttctggatgcttatatcaatttaggaaatgtcttgaaagaggcacgcatttttgacagagctgtggcagcttatcttcgtgccctaagtttgagtccaaatcacgcagtggtgcacggcaacctggcttgtgtatactatgagcaaggcctgatagatctggcaatagacacctacaggcgggctatcgaactacaaccacatttccctgatgcttactgcaacctagccaatgctctcaaagagaagggcagtgttgctgaagcagaagattgttataatacagctctccgtctgtgtcccacccatgcagactctctgaataacctagccaatatcaaacgagaacagggaaacattgaagaggcagttcgcttgtatcgtaaagcattagaagtcttcccagagtttgctgctgcccattcaaatttagcaagtgtactgcagcagcagggaaaactgcaggaagctctgatgcattataaggaggctattcgaatcagtcctacctttgctgatgcctactctaatatgggaaacactctaaaggagatgcaggatgttcagggagccttgcagtgttatacgcgtgccatccaaattaatcctgcatttgcagatgcacatagcaatctggcttccattcataaggattcagggaatattccagaagccatagcttcttaccgcacggctctgaaacttaagcctgattttcctgatgcttattgtaacttggctcattgcctgcagattgtctgtgattggacagactatgatgagcgaatgaagaagttggtcagtattgtggctgaccagttagagaagaataggttgccttctgtgcatcctcatcatagtatgctatatcctctttctcatggcttcaggaaggctattgctgagaggcacggcaacctgtgcttagataagattaatgttcttcataaaccaccatatgaacatccaaaagacttgaagctcagtgatggtcggctgcgtgtaggatatgtgagttccgactttgggaatcatcctacttctcaccttatgcagtctattccaggcatgcacaatcctgataaatttgaggtgttctgttatgccctgagcccagacgatggcacaaacttccgagtgaaggtgatggcagaagccaatcatttcattgatctttctcagattccatgcaatggaaaagcagctgatcgcatccatcaggatggaattcatatccttgtaaatatgaatggctatactaagggcgctcgaaatgagctttttgctctcaggccagctcctattcaggcaatgtggctgggataccctgggacgagtggtgcgcttttcatggattatattatcactgatcaggaaacttcgccagctgaagttgctgagcagtattccgagaaattggcttatatgccccacactttttttattggtgatcatgctaatatgttccctcacctgaagaaaaaagcagtcatcgattttaagtccaatgggcacatttatgacaatcggatagttctgaatggcatcgacctcaaagcatttcttgatagtctaccagatgtgaaaattgtcaagatgaagtgtcctgatggaggagacaatgcagatagcagtaacacagctcttaatatgcctgttattcctatgaatactattgcagaagcagttattgaaatgattaaccgaggacagattcaaataacaattaatggattcagtattagcaatggactggcaactactcagatcaacaataaggctgcaactggagaggaggttccccgtaccattattgtaaccacccgttctcagtacgggttaccagaagatgccatcgtatactgtaactttaatcagttgtataaaattgacccttctactttgcagatgtgggcaaacattctgaagcgtgttcccaatagtgtactctggctgttgcgttttccagcagtaggagaacctaatattcaacagtatgcacaaaacatgggcctgccccagaaccgtatcattttttcacctgttgctcctaaagaggaacacgtcaggagaggccagctggctgatgtctgcttggacactccactctgtaatgggcacaccacagggatggatgtcctctgggcagggacccccatggtgactatgccaggagagactcttgcttctcgagttgcagcatcccagctcacttgcttaggttgtcttgagcttattgctaaaaacagacaagaatatgaagacatagctgtgaagctgggaactgatctagaatacctgaagaaagttcgtggcaaagtctggaagcaaagaatatctagccctctgttcaacaccaaacaatacacaatggaactagagcggctctatctacagatgtgggagcattatgcagctggcaacaaacctgaccacatgattaagcctgttgaagtcactgagtcagcataaataaagactgcacaggagaattacccctatacctgagcctcaaccttctgggggaaagggaactagataacatacttcttacttgtctgtacagtaccttgttgcagatgggtgatatataatggtaatagaatagcacagccagacttgcttcctgcatggtagggagagacacaaaagatgggaaactgcttttccacaaggaatctccgtagaattttgcggcgaccagatggtgcataggtctggaaggtctgatctcccttggtcttccatgggatggttagtgtggaggggagatatagattgtccggccgctttgtgattccatggattgattcagtcttctggatttttttttctttatattttgggtactggagcttttaaaaatgtttggtttcaggtatttttattcatgtgaagtgtatatgattctcttgagataaggttttaagctaaaatgttactccctgttttagtttctgaactctgacagattgacagggactttgctggtgtagtctttttataggttttataaaccacttgagcctatatcagtcgttttagtgtctgacctaatatttggagctatcagtgctttgttgatttagatgatgactcaagattttttctggtccatttcccatttccttttcttccctgacccccataccctcacccttaaaattctcctgtaactcaactaacaaaatcaagcctgattcaaaacatcctagggtgttttaaacacaccatctggtgccaaatgaagatttttaggagtgattactaattatcaagggcacagttgtggtactgtcattgataataatatagtttttttttttttcctaattttgacctgtttcaccagtgttttacccttgactgccccttctatgctgcttccaaaagtgatagtgtgtgtaagatttttaccttcctttctaaagttttttttttttttttttaagtgagtcctgttcttcctatttctttcagcagaaatgaaatcccaggtaagtataagtattcaagtatttgatcagtaagtcacagttatctccagtgcattaaataaccttcatcaagaaataggttataggtaaaatctctgaaggatcatctatgtattcaagtaattattttttagataataactgtcttctggacttggtcttgaagtctgtacagattcagcctcagtagtagcgaactgcactgctgtttggtttggagtacaaattagacttatagtcctcctggaacttgagttattaaaatcataggaataaaattatgggatctcaacaaagggtcgagggtttgaggcttaaacaagccaacatatgaatatatgttttgtctcgctatactgcacttacgctatccagttgcaggtaattttttgtctgctagtagtgttctagattatgtctttccaaagcgctgaggctgtgcacctattctgtagttgcagctgatgcctgaatgtatcctagctgacaaattattgattaataagaacttgaatttctggaagattcttactgttaaccaaattttgagcaaggagtctcaaaggtaattctgaaccagaattacatgttaatgaacagtgtaccttttaacagtgtaaatcacggaatatccgtgaagggatttcttaatttattttttaccggttgattgaaatatcagttaaaggttgccagcatggttgcagataaactgatgtttgaaattcgctgaaatacttaatgtggaataggataatatacttccaatgccctcaaggctgtgaccttacagccattttacatagcacatcattcctcctatagggatgaactttttcctggcacgaaaagtagccgctctggttgaagctttgcttattgtaacaggcttttatttccaggtaatatgtcttggaagacttaattctgattagagatatagatattactggaaactaattgttttttttctattgtactctgctttatcaaagaagtaaaacatttaaatcgtactacaga

SEQ ID NO: 421056 - DNA, 8655 bp, Homo sapiens
  misc_feature (3588)..(3589): n is a, c, g, or t
agcggcatttcaagaccgtactaggtagatggtcaattagagttcccagggtttgaagcctgtaactgctgccgccgctcaagccctccagagcattgctacggctgctgcccttgtactactacctccaaatacgttcttgctggtagtggcggcagcaggaccaattacctcttttttgctctccctcgagaagctccagatggcgtcttccgtgggcaacgtggccgacagcacagaaccaacgaaacgtatgctttccttccaagggttagctgagttggcacatcgagaatatcaggcaggagattttgaggcagctgagagacactgcatgcagctctggagacaagagccagacaatactggtgtgcttttattactttcatctatacacttccagtgtcgaaggctggacagatctgctcactttagcactctggcaattaaacagaacccccttctggcagaagcttattcgaatttggggaatgtgtacaaggaaagagggcagttgcaggaggcaattgagcattatcgacatgcattgcgtctcaaacctgatttcatcgatggttatattaacctggcagccgccttggtagcagcgggtgacatggaaggggcagtacaagcttacgtctctgctcttcagtacaatcctgatttgtactgtgttcgcagtgacctggggaacctgctcaaagccctgggtcgcttggaagaagccaaggtaggtgtttgatagaacacatttaaacatcagtattatgaaaacttgtactttttgccaagtcttcaactcttcattgagctatcttcacaaaacagtcctttgaaactgaggaaaactgacggcacgaatcgcctcagaatagagcagggccaggctttggcatatctgttctaaatctgggggtaaagcaagaacctgaacattttggagcctttctgctgagctagaccatctttataacactgggctccgtcatgatcttatgtgggaataaataacattccttcaaatctgaggcttgcctgctggtgacaagcagagcgcctgtgatttggctcaagactcctatatgatgcaggtgccattgaaaatgctgctcttctaagtcctttgtggcttgtaagtggagaagaatttcatccaaatgttaccctgtaatactggcatttaaaattcttatttaaccttcctcccttcatcttcctcaccctttttacagtggaagaaaggctgttaaaatgattacaaattaataattggaacatcctgtcccttgtccccactcccttcccaagttcctttttcctcttttccaatcctagttgtctaccttcttttcttcctcatttccttcttttattcctccccaccccaaccccttaaaaaaaaaggtcagaaggacaaagctggtttgtttgggaaatggactgatcgaaagaaaacttgccaaagtggaaaggtggcttttagcattctgtgtttccaaataatgaatttgaacaccaggttgggttaattaaagcttttggtataatttaaaattaaatttataaatgcagttgtcttgttacaagccaccttacgcaaccgcgctgcaggggtgaggagtggggagaaaccagaatgcttctgaaactcccacctgttgctctgagccccacgcgcatgctaatgcgtggagtgtatgcgcagagtagctgtctgtttgactgcttcatccagggagggagaaggcttttcagcaccatctaatgttttaaaaggcactagttttaagtgtacagctcataaattctgctgacattttggattaaccttatgtaggttgccagctaatgaattgtaattgatttcaatcttagctgataaatctaattggtaatttatagaacaaatatttgataagctcctattaattgtcaccccaccaagcggacagctaacatgaattgcacttcactgcagctttagagatcggtttaggctgagacattgcgcctgccttaggttgctgacttctttatttcagagctctggagacacctagtttgaaaaatgttattctgtttttttgtgagaacttagtaaacaagaaaatactcttgagtgaaatgcaatgtatttcttttgtaatcagtgcatttgaaaattcaagccagcatattcctagtagatggaagcaaaattaagttgtctttgtagaaaatgaagagcctttcttccagcaaaaatccctgctgtatgcaatagccctgattaaccctctcccttctgcatgtttcccatattacagacttgagactgtcctcattcccatatgtaatagacatccaaagaatttcaattgctttgttgaacttttactaatgatcttgtttttattttctctcttgtttttggtttttcaccattgatattgtatttagaaggtttcaggtgggtgaaacctcctattccatgcgtaaggtgcctcgctgaagggagctcgaggcctggatctagggcagacacacaacctcctcctcctcttccagcaaggaacgcaccgaaaagtcacatgatgagaaatatggtaacgggtttgtaactgccacagcaaaacaatttgcctccatgcctgaatcttctgtcttgtggcttcagaaacagcttaaaataattttatttacaagcaagttatgtaagagaatgttttatactatagccacaattctgtcaaagataagtaaaagttaattgatattaaaaattattagagataatttacttagtaaaagcttctaactcttcttgttgttcattttttttccttttttcttctttgtttggattgcagcattctgctcttctgatgatgcgctgtgaccctgcagtagcgcaaaggctgcgcagcgttaatgcgcattgcgtgcgaatgaacccctgtgaacggttgactagatgagtaatctgattgactggctccctcagtcctattctgtagcctttttggataaaattgggttttaacatacctcgagtccaactaatctcattaaacaaatattctccatgggcctgtctagtagattaatggatctggttggccgtttgctgcgtctaggggtgttctatgtagcgcagcagttcgcagcgattgcgcagtgcgatgctgttaggttgcgcaagcgatgtttgcgctcgcattacagggacctcaacctaggtgcaatcctgtcatgtgaggtttcagcttcagtcctccttgggagacggggcattgtgagaatgtaacttaaagcctggctttatgatatcctacttggcagaaagacatttttctcctcagtagcatagttttgatgttagtgaggaacattgttgaagagcagcatttcccaaaatgtgtttcatagtattctaataaaatgcccaatgaaagaagagttccatggtcaactaagttcagggaaccctgttacactattaaaggcttagggaagtccagtaaagaaacctattttccgaatttatttgatcatgaactccttttttttcagccatacctcttaacacctcatagaacacacttnnggaaacagtgggggtaggaaaactcggcctcaagttgcgccctctaggtagcacttgaaaacatgacaagggcccgtagttgtttggataagagaactccagcatagagccttatagcaactgacttcccagttaagtcccagtgtaagggttggtctttggttggcagaactgaacatggtggtttgcacttgggttctggtggcgcaggcgcaggagcagccagctgtggcagcgcattagttttggcgcaagcgagcctatgctgcagggtcacttttggctggtcagagaaggaataatgatatcaccttcttccccccctccccccaatcttttttttttccctttacaaattttcccctttccctttacctcctttccctcccatcttctttcattaacccctcctaaggcatgttatttgaaagcaattgagacgcaaccgaactttgcagtagcttggagtaatcttggctgtgttttcaatgcacaaggggaaatttggcttgcaattcatcactttgaaaaggctgtcacccttgacccaaactttctggatgcttatatcaatttaggaaatgtcttgaaagaggcacgcatttttgacagagctgtggcagcttatcttcgtgccctaagtttgagtccaaatcacgcagtggtgcacggcaacctggcttgtgtatactatgagcaaggcctgatagatctggcaatagacacctacaggcgggctatcgaactacaaccacatttccctgatgcttactgcaacctagccaatgctctcaaagagaagggcagtgttgctgaagcagaagattgttataatacagctctccgtctgtgtcccacccatgcagactctctgaataacctagccaatatcaaacgagaacagggaaacattgaagaggcagttcgcttgtatcgtaaagcattagaagtcttcccagagtttgctgctgcccattcaaatttagcaagtgtactgcagcagcagggaaaactgcaggaagctctgatgcattataaggaggctattcgaatcagtcctacctttgctgatgcctactctaatatgggaaacactctaaaggagatgcaggatgttcagggagccttgcagtgttatacgcgtgccatccaaattaatcctgcatttgcagatgcacatagcaatctggcttccattcataaggattcagggaatattccagaagccatagcttcttaccgcacggctctgaaacttaagcctgattttcctgatgcttattgtaacttggctcattgcctgcagattgtctgtgattggacagactatgatgagcgaatgaagaagttggtcagtattgtggctgaccagttagagaagaataggttgccttctgtgcatcctcatcatagtatgctatatcctctttctcatggcttcaggaaggctattgctgagaggcacggcaacctgtgcttagataagattaatgttcttcataaaccaccatatgaacatccaaaagacttgaagctcagtgatggtcggctgcgtgtaggatatgtgagttccgactttgggaatcatcctacttctcaccttatgcagtctattccaggcatgcacaatcctgataaatttgaggtgttctgttatgccctgagcccagacgatggcacaaacttccgagtgaaggtgatggcagaagccaatcatttcattgatctttctcagattccatgcaatggaaaagcagctgatcgcatccatcaggatggaattcatatccttgtaaatatgaatggctatactaagggcgctcgaaatgagctttttgctctcaggccagctcctattcaggcaatgtggctgggataccctgggacgagtggtgcgcttttcatggattatattatcactgatcaggaaacttcgccagctgaagttgctgagcagtattccgagaaattggcttatatgccccacactttttttattggtgatcatgctaatatgttccctcacctgaagaaaaaagcagtcatcgattttaagtccaatgggcacatttatgacaatcggatagttctgaatggcatcgacctcaaagcatttcttgatagtctaccagatgtgaaaattgtcaagatgaagtgtcctgatggaggagacaatgcagatagcagtaacacagctcttaatatgcctgttattcctatgaatactattgcagaagcagttattgaaatgattaaccgaggacagattcaaataacaattaatggattcagtattagcaatggactggcaactactcagatcaacaataaggctgcaactggagaggaggttccccgtaccattattgtaaccacccgttctcagtacgggttaccagaagatgccatcgtatactgtaactttaatcagttgtataaaattgacccttctactttgcagatgtgggcaaacattctgaagcgtgttcccaatagtgtactctggctgttgcgttttccagcagtaggagaacctaatattcaacagtatgcacaaaacatgggcctgccccagaaccgtatcattttttcacctgttgctcctaaagaggaacacgtcaggagaggccagctggctgatgtctgcttggacactccactctgtaatgggcacaccacagggatggatgtcctctgggcagggacccccatggtgactatgccaggagagactcttgcttctcgagttgcagcatcccagctcacttgcttaggttgtcttgagcttattgctaaaaacagacaagaatatgaagacatagctgtgaagctgggaactgatctagaatacctgaagaaagttcgtggcaaagtctggaagcaaagaatatctagccctctgttcaacaccaaacaatacacaatggaactagagcggctctatctacagatgtgggagcattatgcagctggcaacaaacctgaccacatgattaagcctgttgaagtcactgagtcagcataaataaagactgcacaggagaattacccctatacctgagcctcaaccttctgggggaaagggaactagataacatacttcttacttgtctgtacagtaccttgttgcagatgggtgatatataatggtaatagaatagcacagccagacttgcttcctgcatggtagggagagacacaaaagatgggaaactgcttttccacaaggaatctccgtagaattttgcggcgaccagatggtgcataggtctggaaggtctgatctcccttggtcttccatgggatggttagtgtggaggggagatatagattgtccggccgctttgtgattccatggattgattcagtcttctggatttttttttctttatattttgggtactggagcttttaaaaatgtttggtttcaggtatttttattcatgtgaagtgtatatgattctcttgagataaggttttaagctaaaatgttactccctgttttagtttctgaactctgacagattgacagggactttgctggtgtagtctttttataggttttataaaccacttgagcctatatcagtcgttttagtgtctgacctaatatttggagctatcagtgctttgttgatttagatgatgactcaagattttttctggtccatttcccatttccttttcttccctgacccccataccctcacccttaaaattctcctgtaactcaactaacaaaatcaagcctgattcaaaacatcctagggtgttttaaacacaccatctggtgccaaatgaagatttttaggagtgattactaattatcaagggcacagttgtggtactgtcattgataataatatagtttttttttttttcctaattttgacctgtttcaccagtgttttacccttgactgccccttctatgctgcttccaaaagtgatagtgtgtgtaagatttttaccttcctttctaaagttttttttttttttttttaagtgagtcctgttcttcctatttctttcagcagaaatgaaatcccaggtaagtataagtattcaagtatttgatcagtaagtcacagttatctccagtgcattaaataaccttcatcaagaaataggttataggtaaaatctctgaaggatcatctatgtattcaagtaattattttttagataataactgtcttctggacttggtcttgaagtctgtacagattcagcctcagtagtagcgaactgcactgctgtttggtttggagtacaaattagacttatagtcctcctggaacttgagttattaaaatcataggaataaaattatgggatctcaacaaagggtcgagggtttgaggcttaaacaagccaacatatgaatatatgttttgtctcgctatactgcacttacgctatccagttgcaggtaattttttgtctgctagtagtgttctagattatgtctttccaaagcgctgaggctgtgcacctattctgtagttgcagctgatgcctgaatgtatcctagctgacaaattattgattaataagaacttgaatttctggaagattcttactgttaaccaaattttgagcaaggagtctcaaaggtaattctgaaccagaattacatgttaatgaacagtgtaccttttaacagtgtaaatcacggaatatccgtgaagggatttcttaatttattttttaccggttgattgaaatatcagttaaaggttgccagcatggttgcagataaactgatgtttgaaattcgctgaaatacttaatgtggaataggataatatacttccaatgccctcaaggctgtgaccttacagccattttacatagcacatcattcctcctatagggatgaactttttcctggcacgaaaagtagccgctctggttgaagctttgcttattgtaacaggcttttatttccaggtaatatgttttctattgtactctgctttatcaaagaagtaaaacatttaaatcgtactacagaaattaagatgttgtcttgcgatccttaataaatgaatgatttccctttaa

SEQ ID NO: 421057 - DNA, 4521 bp, Homo sapiens
caagaagacgattaaatataggaagaggtgagtttgagaatgaatagacttggacaaagtagagacaagtttaggggtttaaatgtacttgagcaaagttcttaaggttgtggtgaattattactgctgctttagcaatttttttaacctcagttctgatcttgactctttataggtcttcccagagtttgctgctgcccattcaaatttagcaagtgtactgcagcagcagggaaaactgcaggaagctctgatgcattataaggaggctattcggtaagagacactaacagccttatttttaaaattatttttaattttaaaatgtttgacattcggcacattgcagatgctaaaatggctttaaataacaacggaataagttagcattacagtgggttaaagatttttgtattggagaaataaaaacctttggcttctcttttagaatcagtcctacctttgctgatgcctactctaatatgggaaacactctaaaggagatgcaggatgttcagggagccttgcagtgttatacgcgtgccatccaaattaatcctgcatttgcagatgcacatagcaatctggcttccattcataaggattcagggaatattccagaagccatagcttcttaccgcacggctctgaaacttaagcctgattttcctgatgcttattgtaacttggctcattgcctgcagattgtctgtgattggacagactatgatgagcgaatgaagaagttggtcagtattgtggctgaccagttagagaagaataggttgccttctgtgcatcctcatcatagtatgctatatcctctttctcatggcttcaggaaggctattgctgagaggcacggcaacctgtgcttagataagattaatgttcttcataaaccaccatatgaacatccaaaagacttgaagctcagtgatggtcggctgcgtgtaggatatgtgagttccgactttgggaatcatcctacttctcaccttatgcagtctattccaggcatgcacaatcctgataaatttgaggtgttctgttatgccctgagcccagacgatggcacaaacttccgagtgaaggtgatggcagaagccaatcatttcattgatctttctcagattccatgcaatggaaaagcagctgatcgcatccatcaggatggaattcatatccttgtaaatatgaatggctatactaagggcgctcgaaatgagctttttgctctcaggccagctcctattcaggcaatgtggctgggataccctgggacgagtggtgcgcttttcatggattatattatcactgatcaggaaacttcgccagctgaagttgctgagcagtattccgagaaattggcttatatgccccacactttttttattggtgatcatgctaatatgttccctcacctgaagaaaaaagcagtcatcgattttaagtccaatgggcacatttatgacaatcggatagttctgaatggcatcgacctcaaagcatttcttgatagtctaccagatgtgaaaattgtcaagatgaagtgtcctgatggaggagacaatgcagatagcagtaacacagctcttaatatgcctgttattcctatgaatactattgcagaagcagttattgaaatgattaaccgaggacagattcaaataacaattaatggattcagtattagcaatggactggcaactactcagatcaacaataaggctgcaactggagaggaggttccccgtaccattattgtaaccacccgttctcagtacgggttaccagaagatgccatcgtatactgtaactttaatcagttgtataaaattgacccttctactttgcagatgtgggcaaacattctgaagcgtgttcccaatagtgtactctggctgttgcgttttccagcagtaggagaacctaatattcaacagtatgcacaaaacatgggcctgccccagaaccgtatcattttttcacctgttgctcctaaagaggaacacgtcaggagaggccagctggctgatgtctgcttggacactccactctgtaatgggcacaccacagggatggatgtcctctgggcagggacccccatggtgactatgccaggagagactcttgcttctcgagttgcagcatcccagctcacttgcttaggttgtcttgagcttattgctaaaaacagacaagaatatgaagacatagctgtgaagctgggaactgatctagaatacctgaagaaagttcgtggcaaagtctggaagcaaagaatatctagccctctgttcaacaccaaacaatacacaatggaactagagcggctctatctacagatgtgggagcattatgcagctggcaacaaacctgaccacatgattaagcctgttgaagtcactgagtcagcataaataaagactgcacaggagaattacccctatacctgagcctcaaccttctgggggaaagggaactagataacatacttcttacttgtctgtacagtaccttgttgcagatgggtgatatataatggtaatagaatagcacagccagacttgcttcctgcatggtagggagagacacaaaagatgggaaactgcttttccacaaggaatctccgtagaattttgcggcgaccagatggtgcataggtctggaaggtctgatctcccttggtcttccatgggatggttagtgtggaggggagatatagattgtccggccgctttgtgattccatggattgattcagtcttctggatttttttttctttatattttgggtactggagcttttaaaaatgtttggtttcaggtatttttattcatgtgaagtgtatatgattctcttgagataaggttttaagctaaaatgttactccctgttttagtttctgaactctgacagattgacagggactttgctggtgtagtctttttataggttttataaaccacttgagcctatatcagtcgttttagtgtctgacctaatatttggagctatcagtgctttgttgatttagatgatgactcaagattttttctggtccatttcccatttccttttcttccctgacccccataccctcacccttaaaattctcctgtaactcaactaacaaaatcaagcctgattcaaaacatcctagggtgttttaaacacaccatctggtgccaaatgaagatttttaggagtgattactaattatcaagggcacagttgtggtactgtcattgataataatatagtttttttttttttcctaattttgacctgtttcaccagtgttttacccttgactgccccttctatgctgcttccaaaagtgatagtgtgtgtaagatttttaccttcctttctaaagttttttttttttttttttaagtgagtcctgttcttcctatttctttcagcagaaatgaaatcccaggtaagtataagtattcaagtatttgatcagtaagtcacagttatctccagtgcattaaataaccttcatcaagaaataggttataggtaaaatctctgaaggatcatctatgtattcaagtaattattttttagataataactgtcttctggacttggtcttgaagtctgtacagattcagcctcagtagtagcgaactgcactgctgtttggtttggagtacaaattagacttatagtcctcctggaacttgagttattaaaatcataggaataaaattatgggatctcaacaaagggtcgagggtttgaggcttaaacaagccaacatatgaatatatgttttgtctcgctatactgcacttacgctatccagttgcaggtaattttttgtctgctagtagtgttctagattatgtctttccaaagcgctgaggctgtgcacctattctgtagttgcagctgatgcctgaatgtatcctagctgacaaattattgattaataagaacttgaatttctggaagattcttactgttaaccaaattttgagcaaggagtctcaaaggtaattctgaaccagaattacatgttaatgaacagtgtaccttttaacagtgtaaatcacggaatatccgtgaagggatttcttaatttattttttaccggttgattgaaatatcagttaaaggttgccagcatggttgcagataaactgatgtttgaaattcgctgaaatacttaatgtggaataggataatatacttccaatgccctcaaggctgtgaccttacagccattttacatagcacatcattcctcctatagggatgaactttttcctggcacgaaaagtagccgctctggttgaagctttgcttattgtaacaggcttttatttccaggtaatatgtcttggaagacttaattctgattagagatatagatattactggaaactaattgttttttttctattgtactctgctttatcaaagaagtaaaacatttaaatcgtactacagaaattaagatgttgtcttgcgatccttaataaatgaatgatttccctttaa

SEQ ID NO: 421058 - DNA, 4518 bp, Homo sapiens
tataatatatctctacatgcacgacgacacatttgtgagtgaatctctagagtcagctgcaagcattcagcgggtgacttgtcgtcgtcaacatcgttcatgagttgtggtgaattattactgctgctttagcaatttttttaacctcagttctgatcttgactctttataggtcttcccagagtttgctgctgcccattcaaatttagcaagtgtactgcagcagcagggaaaactgcaggaagctctgatgcattataaggaggctattcggtaagagacactaacagccttatttttaaaattatttttaattttaaaatgtttgacattcggcacattgcagatgctaaaatggctttaaataacaacggaataagttagcattacagtgggttaaagatttttgtattggagaaataaaaacctttggcttctcttttagaatcagtcctacctttgctgatgcctactctaatatgggaaacactctaaaggagatgcaggatgttcagggagccttgcagtgttatacgcgtgccatccaaattaatcctgcatttgcagatgcacatagcaatctggcttccattcataaggattcagggaatattccagaagccatagcttcttaccgcacggctctgaaacttaagcctgattttcctgatgcttattgtaacttggctcattgcctgcagattgtctgtgattggacagactatgatgagcgaatgaagaagttggtcagtattgtggctgaccagttagagaagaataggttgccttctgtgcatcctcatcatagtatgctatatcctctttctcatggcttcaggaaggctattgctgagaggcacggcaacctgtgcttagataagattaatgttcttcataaaccaccatatgaacatccaaaagacttgaagctcagtgatggtcggctgcgtgtaggatatgtgagttccgactttgggaatcatcctacttctcaccttatgcagtctattccaggcatgcacaatcctgataaatttgaggtgttctgttatgccctgagcccagacgatggcacaaacttccgagtgaaggtgatggcagaagccaatcatttcattgatctttctcagattccatgcaatggaaaagcagctgatcgcatccatcaggatggaattcatatccttgtaaatatgaatggctatactaagggcgctcgaaatgagctttttgctctcaggccagctcctattcaggcaatgtggctgggataccctgggacgagtggtgcgcttttcatggattatattatcactgatcaggaaacttcgccagctgaagttgctgagcagtattccgagaaattggcttatatgccccacactttttttattggtgatcatgctaatatgttccctcacctgaagaaaaaagcagtcatcgattttaagtccaatgggcacatttatgacaatcggatagttctgaatggcatcgacctcaaagcatttcttgatagtctaccagatgtgaaaattgtcaagatgaagtgtcctgatggaggagacaatgcagatagcagtaacacagctcttaatatgcctgttattcctatgaatactattgcagaagcagttattgaaatgattaaccgaggacagattcaaataacaattaatggattcagtattagcaatggactggcaactactcagatcaacaataaggctgcaactggagaggaggttccccgtaccattattgtaaccacccgttctcagtacgggttaccagaagatgccatcgtatactgtaactttaatcagttgtataaaattgacccttctactttgcagatgtgggcaaacattctgaagcgtgttcccaatagtgtactctggctgttgcgttttccagcagtaggagaacctaatattcaacagtatgcacaaaacatgggcctgccccagaaccgtatcattttttcacctgttgctcctaaagaggaacacgtcaggagaggccagctggctgatgtctgcttggacactccactctgtaatgggcacaccacagggatggatgtcctctgggcagggacccccatggtgactatgccaggagagactcttgcttctcgagttgcagcatcccagctcacttgcttaggttgtcttgagcttattgctaaaaacagacaagaatatgaagacatagctgtgaagctgggaactgatctagaatacctgaagaaagttcgtggcaaagtctggaagcaaagaatatctagccctctgttcaacaccaaacaatacacaatggaactagagcggctctatctacagatgtgggagcattatgcagctggcaacaaacctgaccacatgattaagcctgttgaagtcactgagtcagcataaataaagactgcacaggagaattacccctatacctgagcctcaaccttctgggggaaagggaactagataacatacttcttacttgtctgtacagtaccttgttgcagatgggtgatatataatggtaatagaatagcacagccagacttgcttcctgcatggtagggagagacacaaaagatgggaaactgcttttccacaaggaatctccgtagaattttgcggcgaccagatggtgcataggtctggaaggtctgatctcccttggtcttccatgggatggttagtgtggaggggagatatagattgtccggccgctttgtgattccatggattgattcagtcttctggatttttttttctttatattttgggtactggagcttttaaaaatgtttggtttcaggtatttttattcatgtgaagtgtatatgattctcttgagataaggttttaagctaaaatgttactccctgttttagtttctgaactctgacagattgacagggactttgctggtgtagtctttttataggttttataaaccacttgagcctatatcagtcgttttagtgtctgacctaatatttggagctatcagtgctttgttgatttagatgatgactcaagattttttctggtccatttcccatttccttttcttccctgacccccataccctcacccttaaaattctcctgtaactcaactaacaaaatcaagcctgattcaaaacatcctagggtgttttaaacacaccatctggtgccaaatgaagatttttaggagtgattactaattatcaagggcacagttgtggtactgtcattgataataatatagtttttttttttttcctaattttgacctgtttcaccagtgttttacccttgactgccccttctatgctgcttccaaaagtgatagtgtgtgtaagatttttaccttcctttctaaagttttttttttttttttttaagtgagtcctgttcttcctatttctttcagcagaaatgaaatcccaggtaagtataagtattcaagtatttgatcagtaagtcacagttatctccagtgcattaaataaccttcatcaagaaataggttataggtaaaatctctgaaggatcatctatgtattcaagtaattattttttagataataactgtcttctggacttggtcttgaagtctgtacagattcagcctcagtagtagcgaactgcactgctgtttggtttggagtacaaattagacttatagtcctcctggaacttgagttattaaaatcataggaataaaattatgggatctcaacaaagggtcgagggtttgaggcttaaacaagccaacatatgaatatatgttttgtctcgctatactgcacttacgctatccagttgcaggtaattttttgtctgctagtagtgttctagattatgtctttccaaagcgctgaggctgtgcacctattctgtagttgcagctgatgcctgaatgtatcctagctgacaaattattgattaataagaacttgaatttctggaagattcttactgttaaccaaattttgagcaaggagtctcaaaggtaattctgaaccagaattacatgttaatgaacagtgtaccttttaacagtgtaaatcacggaatatccgtgaagggatttcttaatttattttttaccggttgattgaaatatcagttaaaggttgccagcatggttgcagataaactgatgtttgaaattcgctgaaatacttaatgtggaataggataatatacttccaatgccctcaaggctgtgaccttacagccattttacatagcacatcattcctcctatagggatgaactttttcctggcacgaaaagtagccgctctggttgaagctttgcttattgtaacaggcttttatttccaggtaatatgtcttggaagacttaattctgattagagatatagatattactggaaactaattgttttttttctattgtactctgctttatcaaagaagtaaaacatttaaatcgtactacagaaattaagatgttgtcttgcgatccttaataaatgaatgatttccctttaa

SEQ ID NO: 421059 - DNA, 3685 bp, Homo sapiens
tgaagaacattcatcttatctaagcacggcaacctgtgcttagataagattaatgttcttcataaaccaccatatgaacatccaaaagacttgaagctcagtgatggtcggctgcgtgtaggatatgtgagttccgactttgggaatcatcctacttctcaccttatgcagtctattccaggcatgcacaatcctgataaatttgaggtgttctgttatgccctgagcccagacgatggcacaaacttccgagtgaaggtgatggcagaagccaatcatttcattgatctttctcagattccatgcaatggaaaagcagctgatcgcatccatcaggatggaattcatatccttgtaaatatgaatggctatactaagggcgctcgaaatgagctttttgctctcaggccagctcctattcaggcaatgtggctgggataccctgggacgagtggtgcgcttttcatggattatattatcactgatcaggaaacttcgccagctgaagttgctgagcagtattccgagaaattggcttatatgccccacactttttttattggtgatcatgctaatatgttccctcacctgaagaaaaaagcagtcatcgattttaagtccaatgggcacatttatgacaatcggatagttctgaatggcatcgacctcaaagcatttcttgatagtctaccagatgtgaaaattgtcaagatgaagtgtcctgatggaggagacaatgcagatagcagtaacacagctcttaatatgcctgttattcctatgaatactattgcagaagcagttattgaaatgattaaccgaggacagattcaaataacaattaatggattcagtattagcaatggactggcaactactcagatcaacaataaggctgcaactggagaggaggttccccgtaccattattgtaaccacccgttctcagtacgggttaccagaagatgccatcgtatactgtaactttaatcagttgtataaaattgacccttctactttgcagatgtgggcaaacattctgaagcgtgttcccaatagtgtactctggctgttgcgttttccagcagtaggagaacctaatattcaacagtatgcacaaaacatgggcctgccccagaaccgtatcattttttcacctgttgctcctaaagaggaacacgtcaggagaggccagctggctgatgtctgcttggacactccactctgtaatgggcacaccacagggatggatgtcctctgggcagggacccccatggtgactatgccaggagagactcttgcttctcgagttgcagcatcccagctcacttgcttaggttgtcttgagcttattgctaaaaacagacaagaatatgaagacatagctgtgaagctgggaactgatctagaatacctgaagaaagttcgtggcaaagtctggaagcaaagaatatctagccctctgttcaacaccaaacaatacacaatggaactagagcggctctatctacagatgtgggagcattatgcagctggcaacaaacctgaccacatgattaagcctgttgaagtcactgagtcagcataaataaagactgcacaggagaattacccctatacctgagcctcaaccttctgggggaaagggaactagataacatacttcttacttgtctgtacagtaccttgttgcagatgggtgatatataatggtaatagaatagcacagccagacttgcttcctgcatggtagggagagacacaaaagatgggaaactgcttttccacaaggaatctccgtagaattttgcggcgaccagatggtgcataggtctggaaggtctgatctcccttggtcttccatgggatggttagtgtggaggggagatatagattgtccggccgctttgtgattccatggattgattcagtcttctggatttttttttctttatattttgggtactggagcttttaaaaatgtttggtttcaggtatttttattcatgtgaagtgtatatgattctcttgagataaggttttaagctaaaatgttactccctgttttagtttctgaactctgacagattgacagggactttgctggtgtagtctttttataggttttataaaccacttgagcctatatcagtcgttttagtgtctgacctaatatttggagctatcagtgctttgttgatttagatgatgactcaagattttttctggtccatttcccatttccttttcttccctgacccccataccctcacccttaaaattctcctgtaactcaactaacaaaatcaagcctgattcaaaacatcctagggtgttttaaacacaccatctggtgccaaatgaagatttttaggagtgattactaattatcaagggcacagttgtggtactgtcattgataataatatagtttttttttttttcctaattttgacctgtttcaccagtgttttacccttgactgccccttctatgctgcttccaaaagtgatagtgtgtgtaagatttttaccttcctttctaaagttttttttttttttttttaagtgagtcctgttcttcctatttctttcagcagaaatgaaatcccaggtaagtataagtattcaagtatttgatcagtaagtcacagttatctccagtgcattaaataaccttcatcaagaaataggttataggtaaaatctctgaaggatcatctatgtattcaagtaattattttttagataataactgtcttctggacttggtcttgaagtctgtacagattcagcctcagtagtagcgaactgcactgctgtttggtttggagtacaaattagacttatagtcctcctggaacttgagttattaaaatcataggaataaaattatgggatctcaacaaagggtcgagggtttgaggcttaaacaagccaacatatgaatatatgttttgtctcgctatactgcacttacgctatccagttgcaggtaattttttgtctgctagtagtgttctagattatgtctttccaaagcgctgaggctgtgcacctattctgtagttgcagctgatgcctgaatgtatcctagctgacaaattattgattaataagaacttgaatttctggaagattcttactgttaaccaaattttgagcaaggagtctcaaaggtaattctgaaccagaattacatgttaatgaacagtgtaccttttaacagtgtaaatcacggaatatccgtgaagggatttcttaatttattttttaccggttgattgaaatatcagttaaaggttgccagcatggttgcagataaactgatgtttgaaattcgctgaaatacttaatgtggaataggataatatacttccaatgccctcaaggctgtgaccttacagccattttacatagcacatcattcctcctatagggatgaactttttcctggcacgaaaagtagccgctctggttgaagctttgcttattgtaacaggcttttatttccaggtaatatgtcttggaagacttaattctgattagagatatagatattactggaaactaattgttttttttctattgtactctgctttatcaaagaagtaaaacatttaaatcgtactacagaaattaagatgttgtcttgcgatccttaataaatgaatgatttccctttaa

SEQ ID NO: 421060 - DNA, 7470 bp, Homo sapiens
  misc_feature (3588)..(3589): n is a, c, g, or t
agcggcatttcaagaccgtactaggtagatggtcaattagagttcccagggtttgaagcctgtaactgctgccgccgctcaagccctccagagcattgctacggctgctgcccttgtactactacctccaaatacgttcttgctggtagtggcggcagcaggaccaattacctcttttttgctctccctcgagaagctccagatggcgtcttccgtgggcaacgtggccgacagcacagaaccaacgaaacgtatgctttccttccaagggttagctgagttggcacatcgagaatatcaggcaggagattttgaggcagctgagagacactgcatgcagctctggagacaagagccagacaatactggtgtgcttttattactttcatctatacacttccagtgtcgaaggctggacagatctgctcactttagcactctggcaattaaacagaacccccttctggcagaagcttattcgaatttggggaatgtgtacaaggaaagagggcagttgcaggaggcaattgagcattatcgacatgcattgcgtctcaaacctgatttcatcgatggttatattaacctggcagccgccttggtagcagcgggtgacatggaaggggcagtacaagcttacgtctctgctcttcagtacaatcctgatttgtactgtgttcgcagtgacctggggaacctgctcaaagccctgggtcgcttggaagaagccaaggtaggtgtttgatagaacacatttaaacatcagtattatgaaaacttgtactttttgccaagtcttcaactcttcattgagctatcttcacaaaacagtcctttgaaactgaggaaaactgacggcacgaatcgcctcagaatagagcagggccaggctttggcatatctgttctaaatctgggggtaaagcaagaacctgaacattttggagcctttctgctgagctagaccatctttataacactgggctccgtcatgatcttatgtgggaataaataacattccttcaaatctgaggcttgcctgctggtgacaagcagagcgcctgtgatttggctcaagactcctatatgatgcaggtgccattgaaaatgctgctcttctaagtcctttgtggcttgtaagtggagaagaatttcatccaaatgttaccctgtaatactggcatttaaaattcttatttaaccttcctcccttcatcttcctcaccctttttacagtggaagaaaggctgttaaaatgattacaaattaataattggaacatcctgtcccttgtccccactcccttcccaagttcctttttcctcttttccaatcctagttgtctaccttcttttcttcctcatttccttcttttattcctccccaccccaaccccttaaaaaaaaaggtcagaaggacaaagctggtttgtttgggaaatggactgatcgaaagaaaacttgccaaagtggaaaggtggcttttagcattctgtgtttccaaataatgaatttgaacaccaggttgggttaattaaagcttttggtataatttaaaattaaatttataaatgcagttgtcttgttacaagccaccttacgcaaccgcgctgcaggggtgaggagtggggagaaaccagaatgcttctgaaactcccacctgttgctctgagccccacgcgcatgctaatgcgtggagtgtatgcgcagagtagctgtctgtttgactgcttcatccagggagggagaaggcttttcagcaccatctaatgttttaaaaggcactagttttaagtgtacagctcataaattctgctgacattttggattaaccttatgtaggttgccagctaatgaattgtaattgatttcaatcttagctgataaatctaattggtaatttatagaacaaatatttgataagctcctattaattgtcaccccaccaagcggacagctaacatgaattgcacttcactgcagctttagagatcggtttaggctgagacattgcgcctgccttaggttgctgacttctttatttcagagctctggagacacctagtttgaaaaatgttattctgtttttttgtgagaacttagtaaacaagaaaatactcttgagtgaaatgcaatgtatttcttttgtaatcagtgcatttgaaaattcaagccagcatattcctagtagatggaagcaaaattaagttgtctttgtagaaaatgaagagcctttcttccagcaaaaatccctgctgtatgcaatagccctgattaaccctctcccttctgcatgtttcccatattacagacttgagactgtcctcattcccatatgtaatagacatccaaagaatttcaattgctttgttgaacttttactaatgatcttgtttttattttctctcttgtttttggtttttcaccattgatattgtatttagaaggtttcaggtgggtgaaacctcctattccatgcgtaaggtgcctcgctgaagggagctcgaggcctggatctagggcagacacacaacctcctcctcctcttccagcaaggaacgcaccgaaaagtcacatgatgagaaatatggtaacgggtttgtaactgccacagcaaaacaatttgcctccatgcctgaatcttctgtcttgtggcttcagaaacagcttaaaataattttatttacaagcaagttatgtaagagaatgttttatactatagccacaattctgtcaaagataagtaaaagttaattgatattaaaaattattagagataatttacttagtaaaagcttctaactcttcttgttgttcattttttttccttttttcttctttgtttggattgcagcattctgctcttctgatgatgcgctgtgaccctgcagtagcgcaaaggctgcgcagcgttaatgcgcattgcgtgcgaatgaacccctgtgaacggttgactagatgagtaatctgattgactggctccctcagtcctattctgtagcctttttggataaaattgggttttaacatacctcgagtccaactaatctcattaaacaaatattctccatgggcctgtctagtagattaatggatctggttggccgtttgctgcgtctaggggtgttctatgtagcgcagcagttcgcagcgattgcgcagtgcgatgctgttaggttgcgcaagcgatgtttgcgctcgcattacagggacctcaacctaggtgcaatcctgtcatgtgaggtttcagcttcagtcctccttgggagacggggcattgtgagaatgtaacttaaagcctggctttatgatatcctacttggcagaaagacatttttctcctcagtagcatagttttgatgttagtgaggaacattgttgaagagcagcatttcccaaaatgtgtttcatagtattctaataaaatgcccaatgaaagaagagttccatggtcaactaagttcagggaaccctgttacactattaaaggcttagggaagtccagtaaagaaacctattttccgaatttatttgatcatgaactccttttttttcagccatacctcttaacacctcatagaacacacttnnggaaacagtgggggtaggaaaactcggcctcaagttgcgccctctaggtagcacttgaaaacatgacaagggcccgtagttgtttggataagagaactccagcatagagccttatagcaactgacttcccagttaagtcccagtgtaagggttggtctttggttggcagaactgaacatggtggtttgcacttgggttctggtggcgcaggcgcaggagcagccagctgtggcagcgcattagttttggcgcaagcgagcctatgctgcagggtcacttttggctggtcagagaaggaataatgatatcaccttcttccccccctccccccaatcttttttttttccctttacaaattttcccctttccctttacctcctttccctcccatcttctttcattaacccctcctaaggcatgttatttgaaagcaattgagacgcaaccgaactttgcagtagcttggagtaatcttggctgtgttttcaatgcacaaggggaaatttggcttgcaattcatcactttgaaaaggctgtcacccttgacccaaactttctggatgcttatatcaatttaggaaatgtcttgaaagaggcacgcatttttgacagagctgtggcagcttatcttcgtgccctaagtttgagtccaaatcacgcagtggtgcacggcaacctggcttgtgtatactatgagcaaggcctgatagatctggcaatagacacctacaggcgggctatcgaactacaaccacatttccctgatgcttactgcaacctagccaatgctctcaaagagaagggcagtgttgctgaagcagaagattgttataatacagctctccgtctgtgtcccacccatgcagactctctgaataacctagccaatatcaaacgagaacagggaaacattgaagaggcagttcgcttgtatcgtaaagcattagaagtcttcccagagtttgctgctgcccattcaaatttagcaagtgtactgcagcagcagggaaaactgcaggaagctctgatgcattataaggaggctattcgaatcagtcctacctttgctgatgcctactctaatatgggaaacactctaaaggagatgcaggatgttcagggagccttgcagtgttatacgcgtgccatccaaattaatcctgcatttgcagatgcacatagcaatctggcttccattcataaggattcagggaatattccagaagccatagcttcttaccgcacggctctgaaacttaagcctgattttcctgatgcttattgtaacttggctcattgcctgcagattgtctgtgattggacagactatgatgagcgaatgaagaagttggtcagtattgtggctgaccagttagagaagaataggttgccttctgtgcatcctcatcatagtatgctatatcctctttctcatggcttcaggaaggctattgctgagaggcacggcaacctgtgcttagataagattaatgttcttcataaaccaccatatgaacatccaaaagacttgaagctcagtgatggtcggctgcgtgtaggatatgtgagttccgactttgggaatcatcctacttctcaccttatgcagtctattccaggcatgcacaatcctgataaatttgaggtgttctgttatgccctgagcccagacgatggcacaaacttccgagtgaaggtgatggcagaagccaatcatttcattgatctttctcagattccatgcaatggaaaagcagctgatcgcatccatcaggatggaattcatatccttgtaaatatgaatggctatactaagggcgctcgaaatgagctttttgctctcaggccagctcctattcaggcaatgtggctgggataccctgggacgagtggtgcgcttttcatggattatattatcactgatcaggaaacttcgccagctgaagttgctgagcagtattccgagaaattggcttatatgccccacactttttttattggtgatcatgctaatatgttccctcacctgaagaaaaaagcagtcatcgattttaagtccaatgggcacatttatgacaatcggatagttctgaatggcatcgacctcaaagcatttcttgatagtctaccagatgtgaaaattgtcaagatgaagtgtcctgatggaggagacaatgcagatagcagtaacacagctcttaatatgcctgttattcctatgaatactattgcagaagcagttattgaaatgattaaccgaggacagattcaaataacaattaatggattcagtattagcaatggactggcaactactcagatcaacaataaggctgcaactggagaggaggttccccgtaccattattgtaaccacccgttctcagtacgggttaccagaagatgccatcgtatactgtaactttaatcagttgtataaaattgacccttctactttgcagatgtgggcaaacattctgaagcgtgttcccaatagtgtactctggctgttgcgttttccagcagtaggagaacctaatattcaacagtatgcacaaaacatgggcctgccccagaaccgtatcattttttcacctgttgctcctaaagaggaacacgtcaggagaggccagctggctgatgtctgcttggacactccactctgtaatgggcacaccacagggatggatgtcctctgggcagggacccccatggtgactatgccaggagagactcttgcttctcgagttgcagcatcccagctcacttgcttaggttgtcttgagcttattgctaaaaacagacaagaatatgaagacatagctgtgaagctgggaactgatctagaatacctgaagaaagttcgtggcaaagtctggaagcaaagaatatctagccctctgttcaacaccaaacaatacacaatggaactagagcggctctatctacagatgtgggagcattatgcagctggcaacaaacctgaccacatgattaagcctgttgaagtcactgagtcagcataaataaagactgcacaggagaattacccctatacctgagcctcaaccttctgggggaaagggaactagataacatacttcttacttgtctgtacagtaccttgttgcagatgggtgatatataatggtaatagaatagcacagccagacttgcttcctgcatggtagggagagacacaaaagatgggaaactgcttttccacaaggaatctccgtagaattttgcggcgaccagatggtgcataggtctggaaggtctgatctcccttggtcttccatgggatggttagtgtggaggggagatatagattgtccggccgctttgtgattccatggattgattcagtcttctggatttttttttctttatattttgggtactggagcttttaaaaatgtttggtttcaggtatttttattcatgtgaagtgtatatgattctcttgagataaggttttaagctaaaatgttactccctgttttagtttctgaactctgacagattgacagggactttgctggtgtagtctttttataggttttataaaccacttgagcctatatcagtcgttttagtgtctgacctaatatttggagctatcagtgctttgttgatttagatgatgactcaagattttttctggtccatttcccatttccttttcttccctgacccccataccctcacccttaaaattctcctgtaactcaactaacaaaatcaagcctgattcaaaacatcctagggtgttttaaacacaccatctggtgccaaatgaagatttttaggagtgattactaattatcaagggcacagttgtggtactgtcattgataataatatagttttttttttttt

SEQ ID NO: 421061 - DNA, 7274 bp, Homo sapiens
  misc_feature (3588)..(3589): n is a, c, g, or t
agcggcatttcaagaccgtactaggtagatggtcaattagagttcccagggtttgaagcctgtaactgctgccgccgctcaagccctccagagcattgctacggctgctgcccttgtactactacctccaaatacgttcttgctggtagtggcggcagcaggaccaattacctcttttttgctctccctcgagaagctccagatggcgtcttccgtgggcaacgtggccgacagcacagaaccaacgaaacgtatgctttccttccaagggttagctgagttggcacatcgagaatatcaggcaggagattttgaggcagctgagagacactgcatgcagctctggagacaagagccagacaatactggtgtgcttttattactttcatctatacacttccagtgtcgaaggctggacagatctgctcactttagcactctggcaattaaacagaacccccttctggcagaagcttattcgaatttggggaatgtgtacaaggaaagagggcagttgcaggaggcaattgagcattatcgacatgcattgcgtctcaaacctgatttcatcgatggttatattaacctggcagccgccttggtagcagcgggtgacatggaaggggcagtacaagcttacgtctctgctcttcagtacaatcctgatttgtactgtgttcgcagtgacctggggaacctgctcaaagccctgggtcgcttggaagaagccaaggtaggtgtttgatagaacacatttaaacatcagtattatgaaaacttgtactttttgccaagtcttcaactcttcattgagctatcttcacaaaacagtcctttgaaactgaggaaaactgacggcacgaatcgcctcagaatagagcagggccaggctttggcatatctgttctaaatctgggggtaaagcaagaacctgaacattttggagcctttctgctgagctagaccatctttataacactgggctccgtcatgatcttatgtgggaataaataacattccttcaaatctgaggcttgcctgctggtgacaagcagagcgcctgtgatttggctcaagactcctatatgatgcaggtgccattgaaaatgctgctcttctaagtcctttgtggcttgtaagtggagaagaatttcatccaaatgttaccctgtaatactggcatttaaaattcttatttaaccttcctcccttcatcttcctcaccctttttacagtggaagaaaggctgttaaaatgattacaaattaataattggaacatcctgtcccttgtccccactcccttcccaagttcctttttcctcttttccaatcctagttgtctaccttcttttcttcctcatttccttcttttattcctccccaccccaaccccttaaaaaaaaaggtcagaaggacaaagctggtttgtttgggaaatggactgatcgaaagaaaacttgccaaagtggaaaggtggcttttagcattctgtgtttccaaataatgaatttgaacaccaggttgggttaattaaagcttttggtataatttaaaattaaatttataaatgcagttgtcttgttacaagccaccttacgcaaccgcgctgcaggggtgaggagtggggagaaaccagaatgcttctgaaactcccacctgttgctctgagccccacgcgcatgctaatgcgtggagtgtatgcgcagagtagctgtctgtttgactgcttcatccagggagggagaaggcttttcagcaccatctaatgttttaaaaggcactagttttaagtgtacagctcataaattctgctgacattttggattaaccttatgtaggttgccagctaatgaattgtaattgatttcaatcttagctgataaatctaattggtaatttatagaacaaatatttgataagctcctattaattgtcaccccaccaagcggacagctaacatgaattgcacttcactgcagctttagagatcggtttaggctgagacattgcgcctgccttaggttgctgacttctttatttcagagctctggagacacctagtttgaaaaatgttattctgtttttttgtgagaacttagtaaacaagaaaatactcttgagtgaaatgcaatgtatttcttttgtaatcagtgcatttgaaaattcaagccagcatattcctagtagatggaagcaaaattaagttgtctttgtagaaaatgaagagcctttcttccagcaaaaatccctgctgtatgcaatagccctgattaaccctctcccttctgcatgtttcccatattacagacttgagactgtcctcattcccatatgtaatagacatccaaagaatttcaattgctttgttgaacttttactaatgatcttgtttttattttctctcttgtttttggtttttcaccattgatattgtatttagaaggtttcaggtgggtgaaacctcctattccatgcgtaaggtgcctcgctgaagggagctcgaggcctggatctagggcagacacacaacctcctcctcctcttccagcaaggaacgcaccgaaaagtcacatgatgagaaatatggtaacgggtttgtaactgccacagcaaaacaatttgcctccatgcctgaatcttctgtcttgtggcttcagaaacagcttaaaataattttatttacaagcaagttatgtaagagaatgttttatactatagccacaattctgtcaaagataagtaaaagttaattgatattaaaaattattagagataatttacttagtaaaagcttctaactcttcttgttgttcattttttttccttttttcttctttgtttggattgcagcattctgctcttctgatgatgcgctgtgaccctgcagtagcgcaaaggctgcgcagcgttaatgcgcattgcgtgcgaatgaacccctgtgaacggttgactagatgagtaatctgattgactggctccctcagtcctattctgtagcctttttggataaaattgggttttaacatacctcgagtccaactaatctcattaaacaaatattctccatgggcctgtctagtagattaatggatctggttggccgtttgctgcgtctaggggtgttctatgtagcgcagcagttcgcagcgattgcgcagtgcgatgctgttaggttgcgcaagcgatgtttgcgctcgcattacagggacctcaacctaggtgcaatcctgtcatgtgaggtttcagcttcagtcctccttgggagacggggcattgtgagaatgtaacttaaagcctggctttatgatatcctacttggcagaaagacatttttctcctcagtagcatagttttgatgttagtgaggaacattgttgaagagcagcatttcccaaaatgtgtttcatagtattctaataaaatgcccaatgaaagaagagttccatggtcaactaagttcagggaaccctgttacactattaaaggcttagggaagtccagtaaagaaacctattttccgaatttatttgatcatgaactccttttttttcagccatacctcttaacacctcatagaacacacttnnggaaacagtgggggtaggaaaactcggcctcaagttgcgccctctaggtagcacttgaaaacatgacaagggcccgtagttgtttggataagagaactccagcatagagccttatagcaactgacttcccagttaagtcccagtgtaagggttggtctttggttggcagaactgaacatggtggtttgcacttgggttctggtggcgcaggcgcaggagcagccagctgtggcagcgcattagttttggcgcaagcgagcctatgctgcagggtcacttttggctggtcagagaaggaataatgatatcaccttcttccccccctccccccaatcttttttttttccctttacaaattttcccctttccctttacctcctttccctcccatcttctttcattaacccctcctaaggcatgttatttgaaagcaattgagacgcaaccgaactttgcagtagcttggagtaatcttggctgtgttttcaatgcacaaggggaaatttggcttgcaattcatcactttgaaaaggctgtcacccttgacccaaactttctggatgcttatatcaatttaggaaatgtcttgaaagaggcacgcatttttgacaggttgctgaagcagaagattgttataatacagctctccgtctgtgtcccacccatgcagactctctgaataacctagccaatatcaaacgagaacagggaaacattgaagaggcagttcgcttgtatcgtaaagcattagaagtcttcccagagtttgctgctgcccattcaaatttagcaagtgtactgcagcagcagggaaaactgcaggaagctctgatgcattataaggaggctattcgaatcagtcctacctttgctgatgcctactctaatatgggaaacactctaaaggagatgcaggatgttcagggagccttgcagtgttatacgcgtgccatccaaattaatcctgcatttgcagatgcacatagcaatctggcttccattcataaggattcagggaatattccagaagccatagcttcttaccgcacggctctgaaacttaagcctgattttcctgatgcttattgtaacttggctcattgcctgcagattgtctgtgattggacagactatgatgagcgaatgaagaagttggtcagtattgtggctgaccagttagagaagaataggttgccttctgtgcatcctcatcatagtatgctatatcctctttctcatggcttcaggaaggctattgctgagaggcacggcaacctgtgcttagataagattaatgttcttcataaaccaccatatgaacatccaaaagacttgaagctcagtgatggtcggctgcgtgtaggatatgtgagttccgactttgggaatcatcctacttctcaccttatgcagtctattccaggcatgcacaatcctgataaatttgaggtgttctgttatgccctgagcccagacgatggcacaaacttccgagtgaaggtgatggcagaagccaatcatttcattgatctttctcagattccatgcaatggaaaagcagctgatcgcatccatcaggatggaattcatatccttgtaaatatgaatggctatactaagggcgctcgaaatgagctttttgctctcaggccagctcctattcaggcaatgtggctgggataccctgggacgagtggtgcgcttttcatggattatattatcactgatcaggaaacttcgccagctgaagttgctgagcagtattccgagaaattggcttatatgccccacactttttttattggtgatcatgctaatatgttccctcacctgaagaaaaaagcagtcatcgattttaagtccaatgggcacatttatgacaatcggatagttctgaatggcatcgacctcaaagcatttcttgatagtctaccagatgtgaaaattgtcaagatgaagtgtcctgatggaggagacaatgcagatagcagtaacacagctcttaatatgcctgttattcctatgaatactattgcagaagcagttattgaaatgattaaccgaggacagattcaaataacaattaatggattcagtattagcaatggactggcaactactcagatcaacaataaggctgcaactggagaggaggttccccgtaccattattgtaaccacccgttctcagtacgggttaccagaagatgccatcgtatactgtaactttaatcagttgtataaaattgacccttctactttgcagatgtgggcaaacattctgaagcgtgttcccaatagtgtactctggctgttgcgttttccagcagtaggagaacctaatattcaacagtatgcacaaaacatgggcctgccccagaaccgtatcattttttcacctgttgctcctaaagaggaacacgtcaggagaggccagctggctgatgtctgcttggacactccactctgtaatgggcacaccacagggatggatgtcctctgggcagggacccccatggtgactatgccaggagagactcttgcttctcgagttgcagcatcccagctcacttgcttaggttgtcttgagcttattgctaaaaacagacaagaatatgaagacatagctgtgaagctgggaactgatctagaatacctgaagaaagttcgtggcaaagtctggaagcaaagaatatctagccctctgttcaacaccaaacaatacacaatggaactagagcggctctatctacagatgtgggagcattatgcagctggcaacaaacctgaccacatgattaagcctgttgaagtcactgagtcagcataaataaagactgcacaggagaattacccctatacctgagcctcaaccttctgggggaaagggaactagataacatacttcttacttgtctgtacagtaccttgttgcagatgggtgatatataatggtaatagaatagcacagccagacttgcttcctgcatggtagggagagacacaaaagatgggaaactgcttttccacaaggaatctccgtagaattttgcggcgaccagatggtgcataggtctggaaggtctgatctcccttggtcttccatgggatggttagtgtggaggggagatatagattgtccggccgctttgtgattccatggattgattcagtcttctggatttttttttctttatattttgggtactggagcttttaaaaatgtttggtttcaggtatttttattcatgtgaagtgtatatgattctcttgagataaggttttaagctaaaatgttactccctgttttagtttctgaactctgacagattgacagggactttgctggtgtagtctttttataggttttataaaccacttgagcctatatcagtcgttttagtgtctgacctaatatttggagctatcagtgctttgttgatttagatgatgactcaagattttttctggtccatttcccatttccttttcttccctgacccccataccctcacccttaaaattctcctgtaactcaactaacaaaatcaagcctgattcaaaacatcctagggtgttttaaacacaccatctggtgccaaatgaagatttttaggagtgattactaattatcaagggcacagttgtggtactgtcattgataataatatagttttttttttttt

SEQ ID NO: 421062 - DNA, 7172 bp, Homo sapiens
  misc_feature (3588)..(3589): n is a, c, g, or t
agcggcatttcaagaccgtactaggtagatggtcaattagagttcccagggtttgaagcctgtaactgctgccgccgctcaagccctccagagcattgctacggctgctgcccttgtactactacctccaaatacgttcttgctggtagtggcggcagcaggaccaattacctcttttttgctctccctcgagaagctccagatggcgtcttccgtgggcaacgtggccgacagcacagaaccaacgaaacgtatgctttccttccaagggttagctgagttggcacatcgagaatatcaggcaggagattttgaggcagctgagagacactgcatgcagctctggagacaagagccagacaatactggtgtgcttttattactttcatctatacacttccagtgtcgaaggctggacagatctgctcactttagcactctggcaattaaacagaacccccttctggcagaagcttattcgaatttggggaatgtgtacaaggaaagagggcagttgcaggaggcaattgagcattatcgacatgcattgcgtctcaaacctgatttcatcgatggttatattaacctggcagccgccttggtagcagcgggtgacatggaaggggcagtacaagcttacgtctctgctcttcagtacaatcctgatttgtactgtgttcgcagtgacctggggaacctgctcaaagccctgggtcgcttggaagaagccaaggtaggtgtttgatagaacacatttaaacatcagtattatgaaaacttgtactttttgccaagtcttcaactcttcattgagctatcttcacaaaacagtcctttgaaactgaggaaaactgacggcacgaatcgcctcagaatagagcagggccaggctttggcatatctgttctaaatctgggggtaaagcaagaacctgaacattttggagcctttctgctgagctagaccatctttataacactgggctccgtcatgatcttatgtgggaataaataacattccttcaaatctgaggcttgcctgctggtgacaagcagagcgcctgtgatttggctcaagactcctatatgatgcaggtgccattgaaaatgctgctcttctaagtcctttgtggcttgtaagtggagaagaatttcatccaaatgttaccctgtaatactggcatttaaaattcttatttaaccttcctcccttcatcttcctcaccctttttacagtggaagaaaggctgttaaaatgattacaaattaataattggaacatcctgtcccttgtccccactcccttcccaagttcctttttcctcttttccaatcctagttgtctaccttcttttcttcctcatttccttcttttattcctccccaccccaaccccttaaaaaaaaaggtcagaaggacaaagctggtttgtttgggaaatggactgatcgaaagaaaacttgccaaagtggaaaggtggcttttagcattctgtgtttccaaataatgaatttgaacaccaggttgggttaattaaagcttttggtataatttaaaattaaatttataaatgcagttgtcttgttacaagccaccttacgcaaccgcgctgcaggggtgaggagtggggagaaaccagaatgcttctgaaactcccacctgttgctctgagccccacgcgcatgctaatgcgtggagtgtatgcgcagagtagctgtctgtttgactgcttcatccagggagggagaaggcttttcagcaccatctaatgttttaaaaggcactagttttaagtgtacagctcataaattctgctgacattttggattaaccttatgtaggttgccagctaatgaattgtaattgatttcaatcttagctgataaatctaattggtaatttatagaacaaatatttgataagctcctattaattgtcaccccaccaagcggacagctaacatgaattgcacttcactgcagctttagagatcggtttaggctgagacattgcgcctgccttaggttgctgacttctttatttcagagctctggagacacctagtttgaaaaatgttattctgtttttttgtgagaacttagtaaacaagaaaatactcttgagtgaaatgcaatgtatttcttttgtaatcagtgcatttgaaaattcaagccagcatattcctagtagatggaagcaaaattaagttgtctttgtagaaaatgaagagcctttcttccagcaaaaatccctgctgtatgcaatagccctgattaaccctctcccttctgcatgtttcccatattacagacttgagactgtcctcattcccatatgtaatagacatccaaagaatttcaattgctttgttgaacttttactaatgatcttgtttttattttctctcttgtttttggtttttcaccattgatattgtatttagaaggtttcaggtgggtgaaacctcctattccatgcgtaaggtgcctcgctgaagggagctcgaggcctggatctagggcagacacacaacctcctcctcctcttccagcaaggaacgcaccgaaaagtcacatgatgagaaatatggtaacgggtttgtaactgccacagcaaaacaatttgcctccatgcctgaatcttctgtcttgtggcttcagaaacagcttaaaataattttatttacaagcaagttatgtaagagaatgttttatactatagccacaattctgtcaaagataagtaaaagttaattgatattaaaaattattagagataatttacttagtaaaagcttctaactcttcttgttgttcattttttttccttttttcttctttgtttggattgcagcattctgctcttctgatgatgcgctgtgaccctgcagtagcgcaaaggctgcgcagcgttaatgcgcattgcgtgcgaatgaacccctgtgaacggttgactagatgagtaatctgattgactggctccctcagtcctattctgtagcctttttggataaaattgggttttaacatacctcgagtccaactaatctcattaaacaaatattctccatgggcctgtctagtagattaatggatctggttggccgtttgctgcgtctaggggtgttctatgtagcgcagcagttcgcagcgattgcgcagtgcgatgctgttaggttgcgcaagcgatgtttgcgctcgcattacagggacctcaacctaggtgcaatcctgtcatgtgaggtttcagcttcagtcctccttgggagacggggcattgtgagaatgtaacttaaagcctggctttatgatatcctacttggcagaaagacatttttctcctcagtagcatagttttgatgttagtgaggaacattgttgaagagcagcatttcccaaaatgtgtttcatagtattctaataaaatgcccaatgaaagaagagttccatggtcaactaagttcagggaaccctgttacactattaaaggcttagggaagtccagtaaagaaacctattttccgaatttatttgatcatgaactccttttttttcagccatacctcttaacacctcatagaacacacttnnggaaacagtgggggtaggaaaactcggcctcaagttgcgccctctaggtagcacttgaaaacatgacaagggcccgtagttgtttggataagagaactccagcatagagccttatagcaactgacttcccagttaagtcccagtgtaagggttggtctttggttggcagaactgaacatggtggtttgcacttgggttctggtggcgcaggcgcaggagcagccagctgtggcagcgcattagttttggcgcaagcgagcctatgctgcagggtcacttttggctggtcagagaaggaataatgatatcaccttcttccccccctccccccaatcttttttttttccctttacaaattttcccctttccctttacctcctttccctcccatcttctttcattaacccctcctaaggcatgttatttgaaagcaattgagacgcaaccgaactttgcagtagcttggagtaatcttggctgtgttttcaatgcacaaggggaaatttggcttgcaattcatcactttgaaaaggctgtcacccttgacccaaactttctggatgcttatatcaatttaggaaatgtcttgaaagaggcacgcatttttgacagagctgtggcagcttatcttcgtgccctaagtttgagtccaaatcacgcagtggtgcacggcaacctggcttgtgtatactatgagcaaggcctgatagatctggcaatagacacctacaggcgggctatcgaactacaaccacatttccctgatgcttactgcaacctagccaatgctctcaaagagaagggcagtgttgctgaagcagaagattgttataatacagctctccgtctgtgtcccacccatgcagactctctgaataacctagccaatatcaaacgagaacagggaaacattgaagaggcagttcgcttgtatcgtaaagcattagaagtcttcccagagtttgctgctgcccattcaaatttagcaagtgtactgcagcagcagggaaaactgcaggaagctctgatgcattataaggaggctattcgaatcagtcctacctttgctgatgcctactctaatatgggaaacactctaaaggagatgcaggatgttcagggagccttgcagtgttatacgcgtgccatccaaattaatcctgcatttgcagatgcacatagcaatctggcttccattcataaggattcagggaatattccagaagccatagcttcttaccgcacggctctgaaacttaagcctgattttcctgatgcttattgtaacttggctcattgcctgcagattgtctgtgattggacagactatgatgagcgaatgaagaagttggtcagtattgtggctgaccagttagagaagaataggttgccttctgtgcatcctcatcatagtatgctatatcctctttctcatggcttcaggaaggctattgctgagaggcacggcaacctgtgcttagataagattaatgttcttcataaaccaccatatgaacatccaaaagacttgaagctcagtgatggtcggctgcgtgtaggatatgtgagttccgactttgggaatcatcctacttctcaccttatgcagtctattccaggcatgcacaatcctgataaatttgaggtgttctgttatgccctgagcccagacgatggcacaaacttccgagtgaaggtgatggcagaagccaatcatttcattgatctttctcagattccatgcaatggaaaagcagctgatcgcatccatcaggatggaattcatatccttgtaaatatgaatggctatactaagggcgctcgaaatgagctttttgctctcaggccagctcctattcaggcaatgtggctgggataccctgggacgagtggtgcgcttttcatggattatattatcactgatcaggaaacttcgccagctgaagttgctgagcagtattccgagaaattggcttatatgccccacactttttttattggtgatcatgctaatatgttccctcacctgaagaaaaaagcagtcatcgattttaagtccaatgggcacatttatgacaatcggatagttctgaatggcatcgacctcaaagcatttcttgatagtctaccagatgtgaaaattgtcaagatgaagtgtcctgatggaggagacaatgcagatagcagtaacacagctcttaatatgcctgttattcctatgaatactattgcagaagcagttattgaaatgattaaccgaggacagattcaaataacaattaatggattcagtattagcaatggactggcaactactcagatcaacaataaggctgcaactggagaggaggttccccgtaccattattgtaaccacccgttctcagtacgggttaccagaagatgccatcgtatactgtaactttaatcagttgtataaaattgacccttctactttgcagatgtgggcaaacattctgaagcgtgttcccaatagtgtactctggctgttgcgttttccagcagtaggagaacctaatattcaacagtatgcacaaaacatgggcctgccccagaaccgtatcattttttcacctgttgctcctaaagaggaacacgtcaggagaggccagctggctgatgtctgcttggacactccactctgtaatgggcacaccacagggatggatgtcctctgggcagggacccccatggtgactatgccaggagagactcttgcttctcgagttgcagcatcccagctcacttgcttaggttgtcttgagcttattgctaaaaacagacaagaatatgaagacatagctgtgaagctgggaactgatctagaatacctgaagaaagttcgtggcaaagtctggaagcaaagaatatctagccctctgttcaacaccaaacaatacacaatggaactagagcggctctatctacagatgtgggagcattatgcagctggcaacaaacctgaccacatgattaagcctgttgaagtcactgagtcagcataaataaagactgcacaggagaattacccctatacctgagcctcaaccttctgggggaaagggaactagataacatacttcttacttgtctgtacagtaccttgttgcagatgggtgatatataatggtaatagaatagcacagccagacttgcttcctgcatggtagggagagacacaaaagatgggaaactgcttttccacaaggaatctccgtagaattttgcggcgaccagatggtgcataggtctggaaggtctgatctcccttggtcttccatgggatggttagtgtggaggggagatatagattgtccggccgctttgtgattccatggattgattcagtcttctggatttttttttctttatattttgggtactggagcttttaaaaatgtttggtttcaggtatttttattcatgtgaagtgtatatgattctcttgagataaggttttaagctaaaatgttactccctgttttagtttctgaactctgacagattgacagggactttgctggtgtagtctttttataggttttataaaccacttgagccta

SEQ ID NO: 421063 - DNA, 5175 bp, Homo sapiens
  misc_feature (3588)..(3589): n is a, c, g, or t
agcggcatttcaagaccgtactaggtagatggtcaattagagttcccagggtttgaagcctgtaactgctgccgccgctcaagccctccagagcattgctacggctgctgcccttgtactactacctccaaatacgttcttgctggtagtggcggcagcaggaccaattacctcttttttgctctccctcgagaagctccagatggcgtcttccgtgggcaacgtggccgacagcacagaaccaacgaaacgtatgctttccttccaagggttagctgagttggcacatcgagaatatcaggcaggagattttgaggcagctgagagacactgcatgcagctctggagacaagagccagacaatactggtgtgcttttattactttcatctatacacttccagtgtcgaaggctggacagatctgctcactttagcactctggcaattaaacagaacccccttctggcagaagcttattcgaatttggggaatgtgtacaaggaaagagggcagttgcaggaggcaattgagcattatcgacatgcattgcgtctcaaacctgatttcatcgatggttatattaacctggcagccgccttggtagcagcgggtgacatggaaggggcagtacaagcttacgtctctgctcttcagtacaatcctgatttgtactgtgttcgcagtgacctggggaacctgctcaaagccctgggtcgcttggaagaagccaaggtaggtgtttgatagaacacatttaaacatcagtattatgaaaacttgtactttttgccaagtcttcaactcttcattgagctatcttcacaaaacagtcctttgaaactgaggaaaactgacggcacgaatcgcctcagaatagagcagggccaggctttggcatatctgttctaaatctgggggtaaagcaagaacctgaacattttggagcctttctgctgagctagaccatctttataacactgggctccgtcatgatcttatgtgggaataaataacattccttcaaatctgaggcttgcctgctggtgacaagcagagcgcctgtgatttggctcaagactcctatatgatgcaggtgccattgaaaatgctgctcttctaagtcctttgtggcttgtaagtggagaagaatttcatccaaatgttaccctgtaatactggcatttaaaattcttatttaaccttcctcccttcatcttcctcaccctttttacagtggaagaaaggctgttaaaatgattacaaattaataattggaacatcctgtcccttgtccccactcccttcccaagttcctttttcctcttttccaatcctagttgtctaccttcttttcttcctcatttccttcttttattcctccccaccccaaccccttaaaaaaaaaggtcagaaggacaaagctggtttgtttgggaaatggactgatcgaaagaaaacttgccaaagtggaaaggtggcttttagcattctgtgtttccaaataatgaatttgaacaccaggttgggttaattaaagcttttggtataatttaaaattaaatttataaatgcagttgtcttgttacaagccaccttacgcaaccgcgctgcaggggtgaggagtggggagaaaccagaatgcttctgaaactcccacctgttgctctgagccccacgcgcatgctaatgcgtggagtgtatgcgcagagtagctgtctgtttgactgcttcatccagggagggagaaggcttttcagcaccatctaatgttttaaaaggcactagttttaagtgtacagctcataaattctgctgacattttggattaaccttatgtaggttgccagctaatgaattgtaattgatttcaatcttagctgataaatctaattggtaatttatagaacaaatatttgataagctcctattaattgtcaccccaccaagcggacagctaacatgaattgcacttcactgcagctttagagatcggtttaggctgagacattgcgcctgccttaggttgctgacttctttatttcagagctctggagacacctagtttgaaaaatgttattctgtttttttgtgagaacttagtaaacaagaaaatactcttgagtgaaatgcaatgtatttcttttgtaatcagtgcatttgaaaattcaagccagcatattcctagtagatggaagcaaaattaagttgtctttgtagaaaatgaagagcctttcttccagcaaaaatccctgctgtatgcaatagccctgattaaccctctcccttctgcatgtttcccatattacagacttgagactgtcctcattcccatatgtaatagacatccaaagaatttcaattgctttgttgaacttttactaatgatcttgtttttattttctctcttgtttttggtttttcaccattgatattgtatttagaaggtttcaggtgggtgaaacctcctattccatgcgtaaggtgcctcgctgaagggagctcgaggcctggatctagggcagacacacaacctcctcctcctcttccagcaaggaacgcaccgaaaagtcacatgatgagaaatatggtaacgggtttgtaactgccacagcaaaacaatttgcctccatgcctgaatcttctgtcttgtggcttcagaaacagcttaaaataattttatttacaagcaagttatgtaagagaatgttttatactatagccacaattctgtcaaagataagtaaaagttaattgatattaaaaattattagagataatttacttagtaaaagcttctaactcttcttgttgttcattttttttccttttttcttctttgtttggattgcagcattctgctcttctgatgatgcgctgtgaccctgcagtagcgcaaaggctgcgcagcgttaatgcgcattgcgtgcgaatgaacccctgtgaacggttgactagatgagtaatctgattgactggctccctcagtcctattctgtagcctttttggataaaattgggttttaacatacctcgagtccaactaatctcattaaacaaatattctccatgggcctgtctagtagattaatggatctggttggccgtttgctgcgtctaggggtgttctatgtagcgcagcagttcgcagcgattgcgcagtgcgatgctgttaggttgcgcaagcgatgtttgcgctcgcattacagggacctcaacctaggtgcaatcctgtcatgtgaggtttcagcttcagtcctccttgggagacggggcattgtgagaatgtaacttaaagcctggctttatgatatcctacttggcagaaagacatttttctcctcagtagcatagttttgatgttagtgaggaacattgttgaagagcagcatttcccaaaatgtgtttcatagtattctaataaaatgcccaatgaaagaagagttccatggtcaactaagttcagggaaccctgttacactattaaaggcttagggaagtccagtaaagaaacctattttccgaatttatttgatcatgaactccttttttttcagccatacctcttaacacctcatagaacacacttnnggaaacagtgggggtaggaaaactcggcctcaagttgcgccctctaggtagcacttgaaaacatgacaagggcccgtagttgtttggataagagaactccagcatagagccttatagcaactgacttcccagttaagtcccagtgtaagggttggtctttggttggcagaactgaacatggtggtttgcacttgggttctggtggcgcaggcgcaggagcagccagctgtggcagcgcattagttttggcgcaagcgagcctatgctgcagggtcacttttggctggtcagagaaggaataatgatatcaccttcttccccccctccccccaatcttttttttttccctttacaaattttcccctttccctttacctcctttccctcccttctatgctgcttccaaaagtgatagtgtgtgtaagatttttaccttcctttctaaagttttttttttttttttttaagtgagtcctgttcttcctatttctttcagcagaaatgaaatcccaggtaagtataagtattcaagtatttgatcagtaagtcacagttatctccagtgcattaaataaccttcatcaagaaataggttataggtaaaatctctgaaggatcatctatgtattcaagtaattattttttagataataactgtcttctggacttggtcttgaagtctgtacagattcagcctcagtagtagcgaactgcactgctgtttggtttggagtacaaattagacttatagtcctcctggaacttgagttattaaaatcataggaataaaattatgggatctcaacaaagggtcgagggtttgaggcttaaacaagccaacatatgaatatatgttttgtctcgctatactgcacttacgctatccagttgcaggtaattttttgtctgctagtagtgttctagattatgtctttccaaagcgctgaggctgtgcacctattctgtagttgcagctgatgcctgaatgtatcctagctgacaaattattgattaataagaacttgaatttctggaagattcttactgttaaccaaattttgagcaaggagtctcaaaggtaattctgaaccagaattacatgttaatgaacagtgtaccttttaacagtgtaaatcacggaatatccgtgaagggatttcttaatttattttttaccggttgattgaaatatcagttaaaggttgccagcatggttgcagataaactgatgtttgaaattcgctgaaatacttaatgtggaataggataatatacttccaatgccctcaaggctgtgaccttacagccattttacatagcacatcattcctcctatagggatgaactttttcctggcacgaaaagtagccgctctggttgaagctttgcttattgtaacaggcttttatttccaggtaatatgtcttggaagacttaattctgattagagatatagatattactggaaactaattgttttttttctattgtactctgctttatcaaagaagtaaaacatttaaatcgtactacagaaattaagatgttgtcttgcgatccttaataaatgaatgatttccctttaa

SEQ ID NO: 421064 - DNA, 6702 bp, Homo sapiens
  misc_feature (3588)..(3589): n is a, c, g, or t
agcggcatttcaagaccgtactaggtagatggtcaattagagttcccagggtttgaagcctgtaactgctgccgccgctcaagccctccagagcattgctacggctgctgcccttgtactactacctccaaatacgttcttgctggtagtggcggcagcaggaccaattacctcttttttgctctccctcgagaagctccagatggcgtcttccgtgggcaacgtggccgacagcacagaaccaacgaaacgtatgctttccttccaagggttagctgagttggcacatcgagaatatcaggcaggagattttgaggcagctgagagacactgcatgcagctctggagacaagagccagacaatactggtgtgcttttattactttcatctatacacttccagtgtcgaaggctggacagatctgctcactttagcactctggcaattaaacagaacccccttctggcagaagcttattcgaatttggggaatgtgtacaaggaaagagggcagttgcaggaggcaattgagcattatcgacatgcattgcgtctcaaacctgatttcatcgatggttatattaacctggcagccgccttggtagcagcgggtgacatggaaggggcagtacaagcttacgtctctgctcttcagtacaatcctgatttgtactgtgttcgcagtgacctggggaacctgctcaaagccctgggtcgcttggaagaagccaaggtaggtgtttgatagaacacatttaaacatcagtattatgaaaacttgtactttttgccaagtcttcaactcttcattgagctatcttcacaaaacagtcctttgaaactgaggaaaactgacggcacgaatcgcctcagaatagagcagggccaggctttggcatatctgttctaaatctgggggtaaagcaagaacctgaacattttggagcctttctgctgagctagaccatctttataacactgggctccgtcatgatcttatgtgggaataaataacattccttcaaatctgaggcttgcctgctggtgacaagcagagcgcctgtgatttggctcaagactcctatatgatgcaggtgccattgaaaatgctgctcttctaagtcctttgtggcttgtaagtggagaagaatttcatccaaatgttaccctgtaatactggcatttaaaattcttatttaaccttcctcccttcatcttcctcaccctttttacagtggaagaaaggctgttaaaatgattacaaattaataattggaacatcctgtcccttgtccccactcccttcccaagttcctttttcctcttttccaatcctagttgtctaccttcttttcttcctcatttccttcttttattcctccccaccccaaccccttaaaaaaaaaggtcagaaggacaaagctggtttgtttgggaaatggactgatcgaaagaaaacttgccaaagtggaaaggtggcttttagcattctgtgtttccaaataatgaatttgaacaccaggttgggttaattaaagcttttggtataatttaaaattaaatttataaatgcagttgtcttgttacaagccaccttacgcaaccgcgctgcaggggtgaggagtggggagaaaccagaatgcttctgaaactcccacctgttgctctgagccccacgcgcatgctaatgcgtggagtgtatgcgcagagtagctgtctgtttgactgcttcatccagggagggagaaggcttttcagcaccatctaatgttttaaaaggcactagttttaagtgtacagctcataaattctgctgacattttggattaaccttatgtaggttgccagctaatgaattgtaattgatttcaatcttagctgataaatctaattggtaatttatagaacaaatatttgataagctcctattaattgtcaccccaccaagcggacagctaacatgaattgcacttcactgcagctttagagatcggtttaggctgagacattgcgcctgccttaggttgctgacttctttatttcagagctctggagacacctagtttgaaaaatgttattctgtttttttgtgagaacttagtaaacaagaaaatactcttgagtgaaatgcaatgtatttcttttgtaatcagtgcatttgaaaattcaagccagcatattcctagtagatggaagcaaaattaagttgtctttgtagaaaatgaagagcctttcttccagcaaaaatccctgctgtatgcaatagccctgattaaccctctcccttctgcatgtttcccatattacagacttgagactgtcctcattcccatatgtaatagacatccaaagaatttcaattgctttgttgaacttttactaatgatcttgtttttattttctctcttgtttttggtttttcaccattgatattgtatttagaaggtttcaggtgggtgaaacctcctattccatgcgtaaggtgcctcgctgaagggagctcgaggcctggatctagggcagacacacaacctcctcctcctcttccagcaaggaacgcaccgaaaagtcacatgatgagaaatatggtaacgggtttgtaactgccacagcaaaacaatttgcctccatgcctgaatcttctgtcttgtggcttcagaaacagcttaaaataattttatttacaagcaagttatgtaagagaatgttttatactatagccacaattctgtcaaagataagtaaaagttaattgatattaaaaattattagagataatttacttagtaaaagcttctaactcttcttgttgttcattttttttccttttttcttctttgtttggattgcagcattctgctcttctgatgatgcgctgtgaccctgcagtagcgcaaaggctgcgcagcgttaatgcgcattgcgtgcgaatgaacccctgtgaacggttgactagatgagtaatctgattgactggctccctcagtcctattctgtagcctttttggataaaattgggttttaacatacctcgagtccaactaatctcattaaacaaatattctccatgggcctgtctagtagattaatggatctggttggccgtttgctgcgtctaggggtgttctatgtagcgcagcagttcgcagcgattgcgcagtgcgatgctgttaggttgcgcaagcgatgtttgcgctcgcattacagggacctcaacctaggtgcaatcctgtcatgtgaggtttcagcttcagtcctccttgggagacggggcattgtgagaatgtaacttaaagcctggctttatgatatcctacttggcagaaagacatttttctcctcagtagcatagttttgatgttagtgaggaacattgttgaagagcagcatttcccaaaatgtgtttcatagtattctaataaaatgcccaatgaaagaagagttccatggtcaactaagttcagggaaccctgttacactattaaaggcttagggaagtccagtaaagaaacctattttccgaatttatttgatcatgaactccttttttttcagccatacctcttaacacctcatagaacacacttnnggaaacagtgggggtaggaaaactcggcctcaagttgcgccctctaggtagcacttgaaaacatgacaagggcccgtagttgtttggataagagaactccagcatagagccttatagcaactgacttcccagttaagtcccagtgtaagggttggtctttggttggcagaactgaacatggtggtttgcacttgggttctggtggcgcaggcgcaggagcagccagctgtggcagcgcattagttttggcgcaagcgagcctatgctgcagggtcacttttggctggtcagagaaggaataatgatatcaccttcttccccccctccccccaatcttttttttttccctttacaaattttcccctttccctttacctcctttccctcccatcttctttcattaacccctcctaaggcatgttatttgaaagcaattgagacgcaaccgaactttgcagtagcttggagtaatcttggctgtgttttcaatgcacaaggggaaatttggcttgcaattcatcactttgaaaaggctgtcacccttgacccaaactttctggatgcttatatcaatttaggaaatgtcttgaaagaggcacgcatttttgacagagctgtggcagcttatcttcgtgccctaagtttgagtccaaatcacgcagtggtgcacggcaacctggcttgtgtatactatgagcaaggcctgatagatctggcaatagacacctacaggcgggctatcgaactacaaccacatttccctgatgcttactgcaacctagccaatgctctcaaagagaagggcagtgttgctgaagcagaagattgttataatacagctctccgtctgtgtcccacccatgcagactctctgaataacctagccaatatcaaacgagaacagggaaacattgaagaggcagttcgcttgtatcgtaaagcattagaagtcttcccagagtttgctgctgcccattcaaatttagcaagtgtactgcagcagcagggaaaactgcaggaagctctgatgcattataaggaggctattcgaatcagtcctacctttgctgatgcctactctaatatgggaaacactctaaaggagatgcaggatgttcagggagccttgcagtgttatacgcgtgccatccaaattaatcctgcatttgcagatgcacatagcaatctggcttccattcataaggattcagggaatattccagaagccatagcttcttaccgcacggctctgaaacttaagcctgattttcctgatgcttattgtaacttggctcattgcctgcagattgtctgtgattggacagactatgatgagcgaatgaagaagttggtcagtattgtggctgaccagttagagaagaataggttgccttctgtgcatcctcatcatagtatgctatatcctctttctcatggcttcaggaaggctattgctgagaggcacggcaacctgtgcttagataagattaatgttcttcataaaccaccatatgaacatccaaaagacttgaagctcagtgatggtcggctgcgtgtaggatatgtgagttccgactttgggaatcatcctacttctcaccttatgcagtctattccaggcatgcacaatcctgataaatttgaggtgttctgttatgccctgagcccagacgatggcacaaacttccgagtgaaggtgatggcagaagccaatcatttcattgatctttctcagattccatgcaatggaaaagcagctgatcgcatccatcaggatggaattcatatccttgtaaatatgaatggctatactaagggcgctcgaaatgagctttttgctctcaggccagctcctattcaggcaatgtggctgggataccctgggacgagtggtgcgcttttcatggattatattatcactgatcaggaaacttcgccagctgaagttgctgagcagtattccgagaaattggcttatatgccccacactttttttattggtgatcatgctaatatgttccctcacctgaagaaaaaagcagtcatcgattttaagtccaatgggcacatttatgacaatcggatagttctgaatggcatcgacctcaaagcatttcttgatagtctaccagatgtgaaaattgtcaagatgaagtgtcctgatggaggagacaatgcagatagcagtaacacagctcttaatatgcctgttattcctatgaatactattgcagaagcagttattgaaatgattaaccgaggacagattcaaataacaattaatggattcagtattagcaatggactggcaactactcagatcaacaataaggctgcaactggagaggaggttccccgtaccattattgtaaccacccgttctcagtacgggttaccagaagatgccatcgtatactgtaactttaatcagttgtataaaattgacccttctactttgcagatgtgggcaaacattctgaagcgtgttcccaatagtgtactctggctgttgcgttttccagcagtaggagaacctaatattcaacagtatgcacaaaacatgggcctgccccagaaccgtatcattttttcacctgttgctcctaaagaggaacacgtcaggagaggccagctggctgatgtctgcttggacactccactctgtaatgggcacaccacagggatggatgtcctctgggcagggacccccatggtgactatgccaggagagactcttgcttctcgagttgcagcatcccagctcacttgcttaggttgtcttgagcttattgctaaaaacagacaagaatatgaagacatagctgtgaagctgggaactgatctagaatacctgaagaaagttcgtggcaaagtctggaagcaaagaatatctagcccttctggttgaagctttgcttattgtaacaggcttttatttccaggtaatatgtcttggaagacttaattctgattagagatatagatattactggaaactaattgttttttttctattgtactctgctttatcaaagaagtaaaacatttaaatcgtactacagaaattaagatgttgtcttgcgatccttaataaatgaatgatttccctttaa

SEQ ID NO: 421065 - DNA, 1492 bp, Homo sapiens
ggaatccactgcccctgcacaagtcagcactctgcctcagtcacctgctgccctttcctcaagcaacagagctgcagtctggggggcccaagggcagaactgcacccaggttcctgtttcctctgccagcgagctcacaaggaagacaacaggctctgctcagtattctttatctgatgtcacaagtaccacatcttctagggtggatgatcatgactcagaggaaatttgtcttgaccatctgtgtaagggttgtccgcttaatggtagctgcagcaaagtccacttccatctgccttaccggtggcagatgcttattggtaaaacctggacggactttgagcacatggagacgatcgagaaaggctactgtaaccccggaatccagctctgttctgtaggaagttatacaatcaattttcgggtaatgagttgtgattcctttcccatccgacgcctctccactccttcttctgtcaccaagccagccaattctgtcttcaccaccaaatggatttggtattggaagaatgaatctggcacatggattcagtatggagaagagaaagacaaacggaaaaattcaaacgtcgactcttcatacctggagtctctctatcaatcctgtccgaggggagttgtgccatttcaggcgggctcacggaactatgagctgagtttccaagggatgattcagacaaacatagcttccaaaactcaaaaggatgtcatcagaagaccaacatttgtgcctcagtggtatgtgcagcagatgaagagagggccagagtaagtgttctgaagcagctgtttgctgacagatgcttgagatgttcatgccctgggctcatcaagtcactcgtgaatctggagcctgttttcctgaaaagttcctgtttgcattactctgcagtttccatttgcattatcgatgagtaagatgcttgttaagcagcatggtgtgactgaaaggatactagatcggaaaatgaattttctttctgaaagggaagtctgagcgagtctcctaaatactctgggctttagcttctccagctgtgaagagctggattgatgcagtacacctaaggaataatcatatatactgggtttttgttttgctgtggattctttttttttttttttttttttagagggggtctcactttgttgcccaggctggtcttgaactcctgagctcaagtgatcctcctacctcagtctcccaaagtgctgggattacaggcatgagccaccgtgcctggctttgctgtggattcttttgggtgtcttttgttttcctacacgatttatagaggatgaggggcggagaaagagatagaaaaaagggatgagctagctgttagagcaagggttttggtgagagataatattgattgaagggattttaaaggaaatgttgctgtgggggattcattgtaactctccttgtgaactgctcagtaaactctacattgttcatgaaaatttt

SEQ ID NO: 421066 - DNA, 5983 bp, Homo sapiens
agcgtctgctgagaggtcctgcacacctagtccagatcagatcagccacagggcttccctggaggacgcgcctgtggacgatctcacccgcaagttcacgtatctggggagtcaggatcgcgctcggcctccctcaggctcgtccaaggctactgatcttggaggaacaagtcaggccgggacaagccagaggtttttagagaacggcagtcaagaggacctcttgcatggaaatccaggcagcacttaccttgcttccaattcaacatcagcccccaactggaagagcctcacatcctggacgaatgaccaaggcgccaggagaaagactgtgttttctcccacgctacctgccgcccgctcttctcttggctctctgcaaacacctgaagctgtgaccaccagaaagggcacaggcttgctttcctcagactacaggatcatcaatggcaaaagtggaactcaggacatccagcctggccctctttttaataataatgctgatggagtggccacagatataacttctaccagatccttaaattacaaaagcactagcagcggtcacagagaaatatcatcacctaggattcaggatgctggacctgcttcccgagatgtccaggccactggcagaatcgcagatgatgctgacccaagagtagcacttgttaacgattctttatctgatgtcacaagtaccacatcttctagggtggatgatcatgactcagaggaaatttgtcttgaccatctgtgtaagggttgtccgcttaatggtagctgcagcaaagtccacttccatctgccttaccggtggcagatgcttattggtaaaacctggacggactttgagcacatggagacgatcgagaaaggctactgtaaccccggaatccagctctgttctgtaggaagttatacaatcaattttcgggtaatgagttgtgattcctttcccatccgacgcctctccactccttcttctgtcaccaagccagccaattctgtcttcaccaccaaatggatttggtattggaagaatgaatctggcacatggattcagtatggagaagagaaagacaaacggaaaaattcaaacgtcgactcttcatacctggagtctctctatcaatcctgtccgaggggagttgtgccatttcaggcgggctcacggaactatgagctgagtttccaagggatgattcagacaaacatagcttccaaaactcaaaaggatgtcatcagaagaccaacatttgtgcctcagtggtatgtgcagcagatgaagagagggccagaccatgagccagcaaagacctcgtcagtgtctttaactgcgacctttcgtcctcaggaggacttttgcttcctatcctcaaagaaatataagttgtcagagatccatcacctacatccagaatatgtcagagtaagtgagcattttaaagcttccatgaaaaatttcaagattgaaaagataaagaagatcgagaactcagagctcctggataaatttacatggaagaaatcgcagatgaaggaagaaggaaaactcctattttatgcgacaagccgtgcctatgtggaatctatctgttcgaataattttgacagtttcctacatgaaactcatgaaaacaaatacggaaaaggaatttactttgcaaaagatgccatctattcccacaaaaattgcccgtatgatgccaaaaacgtcgttatgtttgtagcccaagttctggttggaaagtttactgaaggaaatataacgtacacgagccctcctccacagttcgacagctgtgtggataccagatcgaatccctccgtttttgtcatctttcagaaagatcaggtttacccacaatatgtgattgaatatactgaagacaaagcctgcgtgattagttagaaccgatgaatacagcgtcagaaggatgccataaccattctgttcctttacagaactaaattgccgcagacaggagttaaagttttatattttcctgctcagttatctaatgtcttagatcagtggtccccaaattttgctacatattagaatcatctgggaggttttaaacaaattctgatgcccaggttgcaccccatgccaatgaaatcatttctgggcgtcagcgccaggcagttgtattttttttttttttttttttttgagactgaatctcactccatcgtccaggctggagtgcagtggcgcgatctcggctcactgcaacctctgcctcccgggttcaagcaattctcctgcctcagcctcccgagtagctggaactacaggcacacactgccgcgcccagctaattttttgtattttttagtagagacagggtttcactgtgttgcccaggctggtctcaaactcctgagctcaggcaatctgcccgccttggcctcccaaagtgctaggattacaggtatgagccaccatgcccggctggcagttgtattttttaaagcccttctgatgattccaatgtgttggaaagtttaccttgtctcagatgtaactggtaaaggctgatttctaaattttctgtaattgcagcaacctttctctcctgtctacccttttagtttactgtatgccatggttttgttttggttacattgaaagaaagttaatttggaaaatttgggagaaatctaatcatgcctattaaggatgtaagacattacagccttagaagaaagattgtgaaaagctggggagaaaatgcttaaggacatgctaggggaaaaaaaagtaaaattgaagtgctattgcagacatggctgcagtactgtaccttatcattctgatgaaactgatttggagcacccttttctttatcgctacatttatttaggggacaaactccatccaggttgactctctctggaatgcggtaataagagctggcaagtaaggctcagagagaagcaaccaactggagttaattgcccatttgggctctttgtataattatggcaaagtagacatttatgttctaattaatatgattacagagaaggctttttctcaggtcaggcttttcatgaaagtattttgagaacaatgaattgcaataaccagcttcacacaagcataactgataaacgcgagtgctattgtagtcttggcaagtgagccaagaacctaggagcagggccattcctactgaaggacgggccccctacggagatgaaatttgtttcctggtgagcacagaatcagaacaaagaacaatatcccaaagaggccctgtgtctaccaggagcttctttttccaaatgtaatggattatgtggaattgtagtgccatcggtttttacttagagcccttgacgtgcttggaccaatatttccttccttcttatgaaccaggtttttccttctgattttcccttttcaacattccttaccagtcaccaaagtttcctgttataatttcttttagcagacaagttataagtcagatttaattagcatcagagttgattttatattagtcagattttggatcatcacagagatctccacaactccttggcttaaacagctccaccggtaaaaaaaaaaaaaaaaaaaaaaaaatagtttttttagagtagagttattttctgggagagttactacaaatgcttattctcattgacttatttctttcatggtaactttcgttttggagtgttcattttctgaacttgaccctcacattgtaggggtgcagtttgtccaactctttccaacagcccattagacaccactagctggatatttcacaggcatctttgattcaatatgtccaaagtggaactctccatctacctccctcacatgaacctgttcctctctcaggatctgtatgtaagtgaaaagcgtcaccatctacccattggctcaagcagaaatctggaagtcatctttgactccttcctctccctcctgataaacatctaagcagtttctaagtctagttttacctcttaaatatctctgttcccttctaagttgtttgctgtgttttcttcagagcaagaaggttatattttttaaaatttacttagtaatgcacattcaaaacacacatcaagtcttcaggataaagttcaaaaccgctgtcatggccccatgtgatctctccctcccctacccctctatcatttagtttcttctgcgcaagccactctggcttcctttcagttttgtggttcccatttttagctagttcagtggttttcaatgggcatttctgcctttttttttctaaacgacaaatagaaatacatcttctttattatcctccaaatccaattcagaggtaatatgctccacctacacacaattttagaaataaattaaaaattaaataaaactaatatgaacataaagaggaaataaaaggtacctaacttgggcacagctgtaactgaagacctaatgaagtagtcagatgcttacaactatttataatgcatcaatttgaacttagaaggtaggagatcagatcatatgtgggaaaatgtaaaagcagggatatcagtgggcattagaataaaaactagggatacaataacttctttgcatatgacaatacttatttgtatataagagaaagaacgaaataacctttattgaaataaagatactatgcaagaaaatgtacagttgtcgaagtggagaaaatgaggatatattcttgcagacgagctataggtcatacatgaatgtctagtgagacattcaaaattcgtatagggtgcagagtaatttcttattgtgaggaactgtccaatgtattgcaagatgttctgcatacttggctctcacatactaaatgctagtagcgcccccacccccacgcccagtcacggtgacaaccacaaaccctatcagatctattcacctttttcagagcagatattttgtaacattctctttgctgacctgaaatgactcatagataatacaatctacttacacacatgaatttcttaaaaaaatcaatttaatgccctaactctcttattaaggagaaatagaaaagaagaaatttataatgaaaagaagatgaatttcattatgtaaacgctcaggcatgactacgctgtttgaaacagacagatgtttactcttccttgtaatgagtaggtttggatttaagagccgattagaggctacttcctgtaaacaagtacaggaaaatgaaactagacgggtgggggacactagaatgaaaaccagtgttagggtaaagacaaaacagactatgtacataatctgtatatgggaaaagaaagagcgaaattaccttacttaaggataataggacaagacaaattacagattgtctcagagaaaacaaatgagttactctctcggacaagctgtaggtcctacctaaatgtccagcaggacattagacagtcgtacagggtacagaataattcttcgttgtgtggcactaacccacacactgcaggacatcgttctccctggctgcatccactcagtgctgggagtagtccccagttattatgaaaccaccaataacccactgaccacagtgagaaccactgattttttccactgacctactgaatatctagcatccttagattggctcaactgttactttcctaaggagtccttctacagaataggtcagatcttggcctcccaaaccccttatttttaaaatactttgcgccttgctttgataatttgtattatgtatccaaactgaaattatctgctttctgcattagaatgtaagccccctgagggttgagtcagtctgtcttgtttgctgtgccacgcctgatgcccagcccagcagcatgctttgtacactgatatattgggtaaattttgttgaataaattaagctcaactatttgtatttcaatagttgagttgtattgcttcctgttcttcaagcttaatttgaactgtctaataaaaagaagtaattaa

SEQ ID NO: 421067 - DNA, 5925 bp, Homo sapiens
agcgtctgctgagaggtcctgcacacctagtccagatcagatcagccacagggcttccctggaggacgcgcctgtggacgatctcacccgcaagttcacgtatctggggagtcaggatcgcgctcggcctccctcaggctcgtccaaggctactgatcttggaggaacaagtcaggccgggacaagccagaggtttttagagaacggcagtcaagaggacctcttgcatggaaatccaggcagcacttaccttgcttccaattcaacatcagcccccaactggaagagcctcacatcctggacgaatgaccaaggcgccaggagaaagactgtgttttctcccacgctacctgccgcccgctcttctcttggctctctgcaaacacctgaagctgtgaccaccagaaagggcacaggcttgctttcctcagactacaggatcatcaatggcaaaagtggaactcaggacatccagcctggccctctttttaataataatgctgatggagtggccacagatataacttctaccagatccttaaattacaaaagcactagcagcggtcacagagaaatatcatcacctaggattcaggatgctggacctgcttcccgagatgtccaggccactggcagaatcgcagatgatgctgacccaagagtagcacttgttaacgattctttatctgatgtcacaagtaccacatcttctagggtggatgatcatgactcagaggaaatttgtcttgaccatctgtgtaagggttgtccgcttaatggtagctgcagcaaagtccacttccatctgccttaccggtggcagatgcttattggtaaaacctggacggactttgagcacatggagacgatcgagaaaggctactgtaaccccggaatccagctctgttctgtaggaagttatacaatcaattttcgggtaatgagttgtgattcctttcccatccgacgcctctccactccttcttctgtcaccaagccagccaattctgtcttcaccaccaaatggatttggtattggaagaatgaatctggcacatggattcagtatggagaagagaaagacaaacggaaaaattcaaacgtcgactcttcatacctggagtctctctatcaatcctgtccgaggggagttgtgccatttcaggcgggctcacggaactatgagctgagtttccaagggatgattcagacaaacatagcttccaaaactcaaaaggatgtcatcagaagaccaacatttgtgcctcagtggtatgtgcagcagatgaagagagggccagaccatgagccagcaaagacctcgtcagtgtctttaactgcgacctttcgtcctcaggaggacttttgcttcctatcctcaaagaaatataagttgtcagagatccatcacctacatccagaatatgtcagagtaagtgagcattttaaagcttccatgaaaaatttcaagattgaaaagataaagaagatcgagaactcagagctcctggataaatttacatggaagaaatcgcagatgaaggaagaaggaaaactcctattttatgcgacaagccgtgcctatgtggaatctatctgttcgaataattttgacagtttcctacatgaaactcatgaaaacaaatacggaaaaggaatttactttgcaaaagatgccatctattcccacaaaaattgcccgtatgatgccaaaaacgtcgttatgtttgtagcccaagttctggttggaaagtttactgaaggaaatataacgtacacgagccctcctccacagttcgacagctgtgtggataccagatcgaatccctccgtttttgtcatctttcagaaagatcaggtttacccacaatatgtgattgaatatactgaagacaaagcctgcgtgattagttagaaccgatgaatacagcgtcagaaggatgccataaccattctgttcctttacagaactaaattgccgcagacaggagttaaagttttatattttcctgctcagttatctaatgtcttagatcagtggtccccaaattttgctacatattagaatcatctgggaggttttaaacaaattctgatgcccaggttgcaccccatgccaatgaaatcatttctgggcgtcagcgccaggcagttgtattttttttttttttttttttttgagactgaatctcactccatcgtccaggctggagtgcagtggcgcgatctcggctcactgcaacctctgcctcccgggttcaagcaattctcctgcctcagcctcccgagtagctggaactacaggcacacactgccgcgcccagctaattttttgtattttttagtagagacagggtttcactgtgttgcccaggctggtctcaaactcctgagctcaggcaatctgcccgccttggcctcccaaagtgctaggattacaggtatgagccaccatgcccggctggcagttgtattttttaaagcccttctgatgattccaatgtgttggaaagtttaccttgtctcagatgtaactggtaaaggctgatttctaaattttctgtaattgcagcaacctttctctcctgtctacccttttagtttactgtatgccatggttttgttttggttacattgaaagaaagttaatttggaaaatttgggagaaatctaatcatgcctattaaggatgtaagacattacagccttagaagaaagattgtgaaaagctggggagaaaatgcttaaggacatgctaggggaaaaaaaagtaaaattgaagtgctattgcagacatggctgcagtactgtaccttatcattctgatgaaactgatttggagcacccttttctttatcgctacatttatttaggggacaaactccatccaggttgactctctctggaatgcggtaataagagctggcaagtaaggctcagagagaagcaaccaactggagttaattgcccatttgggctctttgtataattatggcaaagtagacatttatgttctaattaatatgattacagagaaggctttttctcaggtcaggcttttcatgaaagtattttgagaacaatgaattgcaataaccagcttcacacaagcataactgataaacgcgagtgctattgtagtcttggcaagtgagccaagaacctaggagcagggccattcctactgaaggacgggccccctacggagatgaaatttgtttcctggtgagcacagaatcagaacaaagaacaatatcccaaagaggccctgtgtctaccaggagcttctttttccaaatgtaatggattatgtggaattgtagtgccatcggtttttacttagagcccttgacgtgcttggaccaatatttccttccttcttatgaaccaggtttttccttctgattttcccttttcaacattccttaccagtcaccaaagtttcctgttataatttcttttagcagacaagttataagtcagatttaattagcatcagagttgattttatattagtcagattttggatcatcacagagatctccacaactccttggcttaaacagctccaccggtaaaaaaaaaaaaaaaaaaaaaaaaatagtttttttagagtagagttattttctgggagagttactacaaatgcttattctcattgacttatttctttcatggtaactttcgttttggagtgttcattttctgaacttgaccctcacattgtaggggtgcagtttgtccaactctttccaacagcccattagacaccactagctggatatttcacaggcatctttgattcaatatgtccaaagtggaactctccatctacctccctcacatgaacctgttcctctctcaggatctgtatgtaagtgaaaagcgtcaccatctacccattggctcaagcagaaatctggaagtcatctttgactccttcctctccctcctgataaacatctaagcagtttctaagtctagttttacctcttaaatatctctgttcccttctaagttgtttgctgtgttttcttcagagcaagaaggttatattttttaaaatttacttagtaatgcacattcaaaacacacatcaagtcttcaggataaagttcaaaaccgctgtcatggccccatgtgatctctccctcccctacccctctatcatttagtttcttctgcgcaagccactctggcttcctttcagttttgtggttcccatttttagctagttcagtggttttcaatgggcatttctgcctttttttttctaaacgacaaatagaaatacatcttctttattatcctccaaatccaattcagaggtaatatgctccacctacacacaattttagaaataaattaaaaattaaataaaactaatatgaacataaagaggaaataaaaggtacctaacttgggcacagctgtaactgaagacctaatgaagtagtcagatgcttacaactatttataatgcatcaatttgaacttagaaggtaggagatcagatcatatgtgggaaaatgtaaaagcagggatatcagtgggcattagaataaaaactagggatacaataacttctttgcatatgacaatacttatttgtatataagagaaagaacgaaataacctttattgaaataaagatactatgcaagagtcatacatgaatgtctagtgagacattcaaaattcgtatagggtgcagagtaatttcttattgtgaggaactgtccaatgtattgcaagatgttctgcatacttggctctcacatactaaatgctagtagcgcccccacccccacgcccagtcacggtgacaaccacaaaccctatcagatctattcacctttttcagagcagatattttgtaacattctctttgctgacctgaaatgactcatagataatacaatctacttacacacatgaatttcttaaaaaaatcaatttaatgccctaactctcttattaaggagaaatagaaaagaagaaatttataatgaaaagaagatgaatttcattatgtaaacgctcaggcatgactacgctgtttgaaacagacagatgtttactcttccttgtaatgagtaggtttggatttaagagccgattagaggctacttcctgtaaacaagtacaggaaaatgaaactagacgggtgggggacactagaatgaaaaccagtgttagggtaaagacaaaacagactatgtacataatctgtatatgggaaaagaaagagcgaaattaccttacttaaggataataggacaagacaaattacagattgtctcagagaaaacaaatgagttactctctcggacaagctgtaggtcctacctaaatgtccagcaggacattagacagtcgtacagggtacagaataattcttcgttgtgtggcactaacccacacactgcaggacatcgttctccctggctgcatccactcagtgctgggagtagtccccagttattatgaaaccaccaataacccactgaccacagtgagaaccactgattttttccactgacctactgaatatctagcatccttagattggctcaactgttactttcctaaggagtccttctacagaataggtcagatcttggcctcccaaaccccttatttttaaaatactttgcgccttgctttgataatttgtattatgtatccaaactgaaattatctgctttctgcattagaatgtaagccccctgagggttgagtcagtctgtcttgtttgctgtgccacgcctgatgcccagcccagcagcatgctttgtacactgatatattgggtaaattttgttgaataaattaagctcaactatttgtatttcaatagttgagttgtattgcttcctgttcttcaagcttaatttgaactgtctaataaaaagaagtaattaa

SEQ ID NO: 421068 - DNA, 5470 bp, Homo sapiens
ggaatccactgcccctgcacaagtcagcactctgcctcagtcacctgctgccctttcctcaagcaacagagctgcagtctggggggcccaagggcagaactgcacccaggttcctgtttcctctgccagcgagctcacaaggaagacaacaggctctgctcagtattctttatctgatgtcacaagtaccacatcttctagggtggatgatcatgactcagaggaaatttgtcttgaccatctgtgtaagggttgtccgcttaatggtagctgcagcaaagtccacttccatctgccttaccggtggcagatgcttattggtaaaacctggacggactttgagcacatggagacgatcgagaaaggctactgtaaccccggaatccagctctgttctgtaggaagttatacaatcaattttcgggtaatgagttgtgattcctttcccatccgacgcctctccactccttcttctgtcaccaagccagccaattctgtcttcaccaccaaatggatttggtattggaagaatgaatctggcacatggattcagtatggagaagagaaagacaaacggaaaaattcaaacgtcgactcttcatacctggagtctctctatcaatcctgtccgaggggagttgtgccatttcaggcgggctcacggaactatgagctgagtttccaagggatgattcagacaaacatagcttccaaaactcaaaaggatgtcatcagaagaccaacatttgtgcctcagtggtatgtgcagcagatgaagagagggccagaccatgagccagcaaagacctcgtcagtgtctttaactgcgacctttcgtcctcaggaggacttttgcttcctatcctcaaagaaatataagttgtcagagatccatcacctacatccagaatatgtcagagtaagtgagcattttaaagcttccatgaaaaatttcaagattgaaaagataaagaagatcgagaactcagagctcctggataaatttacatggaagaaatcgcagatgaaggaagaaggaaaactcctattttatgcgacaagccgtgcctatgtggaatctatctgttcgaataattttgacagtttcctacatgaaactcatgaaaacaaatacggaaaaggaatttactttgcaaaagatgccatctattcccacaaaaattgcccgtatgatgccaaaaacgtcgttatgtttgtagcccaagttctggttggaaagtttactgaaggaaatataacgtacacgagccctcctccacagttcgacagctgtgtggataccagatcgaatccctccgtttttgtcatctttcagaaagatcaggtttacccacaatatgtgattgaatatactgaagacaaagcctgcgtgattagttagaaccgatgaatacagcgtcagaaggatgccataaccattctgttcctttacagaactaaattgccgcagacaggagttaaagttttatattttcctgctcagttatctaatgtcttagatcagtggtccccaaattttgctacatattagaatcatctgggaggttttaaacaaattctgatgcccaggttgcaccccatgccaatgaaatcatttctgggcgtcagcgccaggcagttgtattttttttttttttttttttttgagactgaatctcactccatcgtccaggctggagtgcagtggcgcgatctcggctcactgcaacctctgcctcccgggttcaagcaattctcctgcctcagcctcccgagtagctggaactacaggcacacactgccgcgcccagctaattttttgtattttttagtagagacagggtttcactgtgttgcccaggctggtctcaaactcctgagctcaggcaatctgcccgccttggcctcccaaagtgctaggattacaggtatgagccaccatgcccggctggcagttgtattttttaaagcccttctgatgattccaatgtgttggaaagtttaccttgtctcagatgtaactggtaaaggctgatttctaaattttctgtaattgcagcaacctttctctcctgtctacccttttagtttactgtatgccatggttttgttttggttacattgaaagaaagttaatttggaaaatttgggagaaatctaatcatgcctattaaggatgtaagacattacagccttagaagaaagattgtgaaaagctggggagaaaatgcttaaggacatgctaggggaaaaaaaagtaaaattgaagtgctattgcagacatggctgcagtactgtaccttatcattctgatgaaactgatttggagcacccttttctttatcgctacatttatttaggggacaaactccatccaggttgactctctctggaatgcggtaataagagctggcaagtaaggctcagagagaagcaaccaactggagttaattgcccatttgggctctttgtataattatggcaaagtagacatttatgttctaattaatatgattacagagaaggctttttctcaggtcaggcttttcatgaaagtattttgagaacaatgaattgcaataaccagcttcacacaagcataactgataaacgcgagtgctattgtagtcttggcaagtgagccaagaacctaggagcagggccattcctactgaaggacgggccccctacggagatgaaatttgtttcctggtgagcacagaatcagaacaaagaacaatatcccaaagaggccctgtgtctaccaggagcttctttttccaaatgtaatggattatgtggaattgtagtgccatcggtttttacttagagcccttgacgtgcttggaccaatatttccttccttcttatgaaccaggtttttccttctgattttcccttttcaacattccttaccagtcaccaaagtttcctgttataatttcttttagcagacaagttataagtcagatttaattagcatcagagttgattttatattagtcagattttggatcatcacagagatctccacaactccttggcttaaacagctccaccggtaaaaaaaaaaaaaaaaaaaaaaaaatagtttttttagagtagagttattttctgggagagttactacaaatgcttattctcattgacttatttctttcatggtaactttcgttttggagtgttcattttctgaacttgaccctcacattgtaggggtgcagtttgtccaactctttccaacagcccattagacaccactagctggatatttcacaggcatctttgattcaatatgtccaaagtggaactctccatctacctccctcacatgaacctgttcctctctcaggatctgtatgtaagtgaaaagcgtcaccatctacccattggctcaagcagaaatctggaagtcatctttgactccttcctctccctcctgataaacatctaagcagtttctaagtctagttttacctcttaaatatctctgttcccttctaagttgtttgctgtgttttcttcagagcaagaaggttatattttttaaaatttacttagtaatgcacattcaaaacacacatcaagtcttcaggataaagttcaaaaccgctgtcatggccccatgtgatctctccctcccctacccctctatcatttagtttcttctgcgcaagccactctggcttcctttcagttttgtggttcccatttttagctagttcagtggttttcaatgggcatttctgcctttttttttctaaacgacaaatagaaatacatcttctttattatcctccaaatccaattcagaggtaatatgctccacctacacacaattttagaaataaattaaaaattaaataaaactaatatgaacataaagaggaaataaaaggtacctaacttgggcacagctgtaactgaagacctaatgaagtagtcagatgcttacaactatttataatgcatcaatttgaacttagaaggtaggagatcagatcatatgtgggaaaatgtaaaagcagggatatcagtgggcattagaataaaaactagggatacaataacttctttgcatatgacaatacttatttgtatataagagaaagaacgaaataacctttattgaaataaagatactatgcaagaaaatgtacagttgtcgaagtggagaaaatgaggatatattcttgcagacgagctataggtcatacatgaatgtctagtgagacattcaaaattcgtatagggtgcagagtaatttcttattgtgaggaactgtccaatgtattgcaagatgttctgcatacttggctctcacatactaaatgctagtagcgcccccacccccacgcccagtcacggtgacaaccacaaaccctatcagatctattcacctttttcagagcagatattttgtaacattctctttgctgacctgaaatgactcatagataatacaatctacttacacacatgaatttcttaaaaaaatcaatttaatgccctaactctcttattaaggagaaatagaaaagaagaaatttataatgaaaagaagatgaatttcattatgtaaacgctcaggcatgactacgctgtttgaaacagacagatgtttactcttccttgtaatgagtaggtttggatttaagagccgattagaggctacttcctgtaaacaagtacaggaaaatgaaactagacgggtgggggacactagaatgaaaaccagtgttagggtaaagacaaaacagactatgtacataatctgtatatgggaaaagaaagagcgaaattaccttacttaaggataataggacaagacaaattacagattgtctcagagaaaacaaatgagttactctctcggacaagctgtaggtcctacctaaatgtccagcaggacattagacagtcgtacagggtacagaataattcttcgttgtgtggcactaacccacacactgcaggacatcgttctccctggctgcatccactcagtgctgggagtagtccccagttattatgaaaccaccaataacccactgaccacagtgagaaccactgattttttccactgacctactgaatatctagcatccttagattggctcaactgttactttcctaaggagtccttctacagaataggtcagatcttggcctcccaaaccccttatttttaaaatactttgcgccttgctttgataatttgtattatgtatccaaactgaaattatctgctttctgcattagaatgtaagccccctgagggttgagtcagtctgtcttgtttgctgtgccacgcctgatgcccagcccagcagcatgctttgtacactgatatattgggtaaattttgttgaataaattaagctcaactatttgtatttcaatagttgagttgtattgcttcctgttcttcaagcttaatttgaactgtctaataaaaagaagtaattaa

SEQ ID NO: 421069 - DNA, 5940 bp, Homo sapiens
agcgtctgctgagaggtcctgcacacctagtccagatcagatcagccacagggcttccctggaggacgcgcctgtggacgatctcacccgcaagttcacgtatctggggagtcaggatcgcgctcggcctccctcaggctcgtccaaggctactgatcttggaggaacaagtcaggccgggacaagccagaggtttttagagaacggcagtcaagaggacctcttgcatggaaatccaggcagcacttaccttgcttccaattcaacatcagcccccaactggaagagcctcacatcctggacgaatgaccaaggcgccaggagaaagactgtgttttctcccacgctacctgccgcccgctcttctcttggctctctgcaaacacctgaagctgtgaccaccagaaagggcacaggcttgctttcctcagactacaggatcatcaatggcaaaagtggaactcaggacatccagcctggccctctttttaataataatgctgatggagtggccacagatataacttctaccagatccttaaattacaaaagcactagcagcggtcacagagaaatatcatcacctaggattcaggatgctggacctgcttcccgagatgtccaggccactggcagaatcgcagatgatgctgacccaagagtagcacttgttaacgattctttatctgatgtcacaagtaccacatcttctagggtggatgatcatgactcagaggaaatttgtcttgaccatctgtgtaagggttgtccgcttaatggtagctgcagcaaagtccacttccatctgccttaccggtggcagatgcttattggtaaaacctggacggactttgagcacatggagacgatcgagaaaggctactgtaaccccggaatccagctctgttctgtaggaagttatacaatcaattttcgggtaatgagttgtgattcctttcccatccgacgcctctccactccttcttctgtcaccaagccagccaattctgtcttcaccaccaaatggatttggtattggaagaatgaatctggcacatggattcagtatggagaagagaaagacaaacggaaaaattcaaacgtcgactcttcatacctggagtctctctatcaatcctgtccgaggggagttgtgccatttcaggcgggctcacggaactatgagctgagtttccaagggatgattcagacaaacatagcttccaaaactcaaaaggatgtcatcagaagaccaacatttgtgcctcagtggtatgtgcagcagatgaagagagggccagaccatgagccagcaaagacctcgtcagtgtctttaactgcgacctttcgtcctcaggaggacttttgcttcctatcctcaaagaaatataagttgtcagagatccatcacctacatccagaatatgtcagagtaagtgagcattttaaagcttccatgaaaaatttcaagattgaaaagataaagaagatcgagaactcagagctcctggataaatttacatggaagaaatcgcagatgaaggaagaaggaaaactcctattttatgcgacaagccgtgcctatgtggaatctatctgttcgaataattttgacagtttcctacatgaaactcatgaaaacaaatacggaaaaggaatttactttgcaaaagatgccatctattcccacaaaaattgcccgtatgatgccaaaaacgtcgttatgtttgtagcccaagttctggttggaaagtttactgaaggaaatataacgtacacgagccctcctccacagttcgacagctgtgtggataccagatcgaatccctccgtttttgtcatctttcagaaagatcaggtttacccacaatatgtgattgaatatactgaagacaaagcctgcgtgattagttagaaccgatgaatacagcgtcagaaggatgccataaccattctgttcctttacagaactaaattgccgcagacaggagttaaagttttatattttcctgctcagttatctaatgtcttagatcagtggtccccaaattttgctacatattagaatcatctgggaggttttaaacaaattctgatgcccaggttgcaccccatgccaatgaaatcatttctgggcgtcagcgccaggcagttgtattttttttttttttttttttttgagactgaatctcactccatcgtccaggctggagtgcagtggcgcgatctcggctcactgcaacctctgcctcccgggttcaagcaattctcctgcctcagcctcccgagtagctggaactacaggcacacactgccgcgcccagctaattttttgtattttttagtagagacagggtttcactgtgttgcccaggctggtctcaaactcctgagctcaggcaatctgcccgccttggcctcccaaagtgctaggattacaggtatgagccaccatgcccggctggcagttgtattttttaaagcccttctgatgattccaatgtgttggaaagtttaccttgtctcagatgtaactggtaaaggctgatttctaaattttctgtaattgcagcaacctttctctcctgtctacccttttagtttactgtatgccatggttttgttttggttacattgaaagaaagttaatttggaaaatttgggagaaatctaatcatgcctattaaggatgtaagacattacagccttagaagaaagattgtgaaaagctggggagaaaatgcttaaggacatgctaggggaaaaaaaagtaaaattgaagtgctattgcagacatggctgcagtactgtaccttatcattctgatgaaactgatttggagcacccttttctttatcgctacatttatttaggggacaaactccatccaggttgactctctctggaatgcggtaataagagctggcaagtaaggctcagagagaagcaaccaactggagttaattgcccatttgggctctttgtataattatggcaaagtagacatttatgttctaattaatatgattacagagaaggctttttctcaggtcaggcttttcatgaaagtattttgagaacaatgaattgcaataaccagcttcacacaagcataactgataaacgcgagtgctattgtagtcttggcaagtgagccaagaacctaggagcagggccattcctactgaaggacgggccccctacggagatgaaatttgtttcctggtgagcacagaatcagaacaaagaacaatatcccaaagaggccctgtgtctaccaggagcttctttttccaaatgtaatggattatgtggaattgtagtgccatcggtttttacttagagcccttgacgtgcttggaccaatatttccttccttcttatgaaccaggtttttccttctgattttcccttttcaacattccttaccagtcaccaaagtttcctgttataatttcttttagcagacaagttcagattttggatcatcacagagatctccacaactccttggcttaaacagctccaccggtaaaaaaaaaaaaaaaaaaaaaaaaatagtttttttagagtagagttattttctgggagagttactacaaatgcttattctcattgacttatttctttcatggtaactttcgttttggagtgttcattttctgaacttgaccctcacattgtaggggtgcagtttgtccaactctttccaacagcccattagacaccactagctggatatttcacaggcatctttgattcaatatgtccaaagtggaactctccatctacctccctcacatgaacctgttcctctctcaggatctgtatgtaagtgaaaagcgtcaccatctacccattggctcaagcagaaatctggaagtcatctttgactccttcctctccctcctgataaacatctaagcagtttctaagtctagttttacctcttaaatatctctgttcccttctaagttgtttgctgtgttttcttcagagcaagaaggttatattttttaaaatttacttagtaatgcacattcaaaacacacatcaagtcttcaggataaagttcaaaaccgctgtcatggccccatgtgatctctccctcccctacccctctatcatttagtttcttctgcgcaagccactctggcttcctttcagttttgtggttcccatttttagctagttcagtggttttcaatgggcatttctgcctttttttttctaaacgacaaatagaaatacatcttctttattatcctccaaatccaattcagaggtaatatgctccacctacacacaattttagaaataaattaaaaattaaataaaactaatatgaacataaagaggaaataaaaggtacctaacttgggcacagctgtaactgaagacctaatgaagtagtcagatgcttacaactatttataatgcatcaatttgaacttagaaggtaggagatcagatcatatgtgggaaaatgtaaaagcagggatatcagtgggcattagaataaaaactagggatacaataacttctttgcatatgacaatacttatttgtatataagagaaagaacgaaataacctttattgaaataaagatactatgcaagaaaatgtacagttgtcgaagtggagaaaatgaggatatattcttgcagacgagctataggtcatacatgaatgtctagtgagacattcaaaattcgtatagggtgcagagtaatttcttattgtgaggaactgtccaatgtattgcaagatgttctgcatacttggctctcacatactaaatgctagtagcgcccccacccccacgcccagtcacggtgacaaccacaaaccctatcagatctattcacctttttcagagcagatattttgtaacattctctttgctgacctgaaatgactcatagataatacaatctacttacacacatgaatttcttaaaaaaatcaatttaatgccctaactctcttattaaggagaaatagaaaagaagaaatttataatgaaaagaagatgaatttcattatgtaaacgctcaggcatgactacgctgtttgaaacagacagatgtttactcttccttgtaatgagtaggtttggatttaagagccgattagaggctacttcctgtaaacaagtacaggaaaatgaaactagacgggtgggggacactagaatgaaaaccagtgttagggtaaagacaaaacagactatgtacataatctgtatatgggaaaagaaagagcgaaattaccttacttaaggataataggacaagacaaattacagattgtctcagagaaaacaaatgagttactctctcggacaagctgtaggtcctacctaaatgtccagcaggacattagacagtcgtacagggtacagaataattcttcgttgtgtggcactaacccacacactgcaggacatcgttctccctggctgcatccactcagtgctgggagtagtccccagttattatgaaaccaccaataacccactgaccacagtgagaaccactgattttttccactgacctactgaatatctagcatccttagattggctcaactgttactttcctaaggagtccttctacagaataggtcagatcttggcctcccaaaccccttatttttaaaatactttgcgccttgctttgataatttgtattatgtatccaaactgaaattatctgctttctgcattagaatgtaagccccctgagggttgagtcagtctgtcttgtttgctgtgccacgcctgatgcccagcccagcagcatgctttgtacactgatatattgggtaaattttgttgaataaattaagctcaactatttgtatttcaatagttgagttgtattgcttcctgttcttcaagcttaatttgaactgtctaataaaaagaagtaattaa

SEQ ID NO: 421070 - DNA, 3710 bp, Homo sapiens
tgctgactggtacgaacagtacgtttccacatactgattatttcccagcagctaattttttgtattttttagtagagacagggtttcactgtgttgcccaggctggtctcaaactcctgagctcaggcaatctgcccgccttggcctcccaaagtgctaggattacaggtatgagccaccatgcccggctggcagttgtattttttaaagcccttctgatgattccaatgtgttggaaagtttaccttgtctcagatgtaactggtaaaggctgatttctaaattttctgtaattgcagcaacctttctctcctgtctacccttttagtttactgtatgccatggttttgttttggttacattgaaagaaagttaatttggaaaatttgggagaaatctaatcatgcctattaaggatgtaagacattacagccttagaagaaagattgtgaaaagctggggagaaaatgcttaaggacatgctaggggaaaaaaaagtaaaattgaagtgctattgcagacatggctgcagtactgtaccttatcattctgatgaaactgatttggagcacccttttctttatcgctacatttatttaggggacaaactccatccaggttgactctctctggaatgcggtaataagagctggcaagtaaggctcagagagaagcaaccaactggagttaattgcccatttgggctctttgtataattatggcaaagtagacatttatgttctaattaatatgattacagagaaggctttttctcaggtcaggcttttcatgaaagtattttgagaacaatgaattgcaataaccagcttcacacaagcataactgataaacgcgagtgctattgtagtcttggcaagtgagccaagaacctaggagcagggccattcctactgaaggacgggccccctacggagatgaaatttgtttcctggtgagcacagaatcagaacaaagaacaatatcccaaagaggccctgtgtctaccaggagcttctttttccaaatgtaatggattatgtggaattgtagtgccatcggtttttacttagagcccttgacgtgcttggaccaatatttccttccttcttatgaaccaggtttttccttctgattttcccttttcaacattccttaccagtcaccaaagtttcctgttataatttcttttagcagacaagttataagtcagatttaattagcatcagagttgattttatattagtcagattttggatcatcacagagatctccacaactccttggcttaaacagctccaccggtaaaaaaaaaaaaaaaaaaaaaaaaatagtttttttagagtagagttattttctgggagagttactacaaatgcttattctcattgacttatttctttcatggtaactttcgttttggagtgttcattttctgaacttgaccctcacattgtaggggtgcagtttgtccaactctttccaacagcccattagacaccactagctggatatttcacaggcatctttgattcaatatgtccaaagtggaactctccatctacctccctcacatgaacctgttcctctctcaggatctgtatgtaagtgaaaagcgtcaccatctacccattggctcaagcagaaatctggaagtcatctttgactccttcctctccctcctgataaacatctaagcagtttctaagtctagttttacctcttaaatatctctgttcccttctaagttgtttgctgtgttttcttcagagcaagaaggttatattttttaaaatttacttagtaatgcacattcaaaacacacatcaagtcttcaggataaagttcaaaaccgctgtcatggccccatgtgatctctccctcccctacccctctatcatttagtttcttctgcgcaagccactctggcttcctttcagttttgtggttcccatttttagctagttcagtggttttcaatgggcatttctgcctttttttttctaaacgacaaatagaaatacatcttctttattatcctccaaatccaattcagaggtaatatgctccacctacacacaattttagaaataaattaaaaattaaataaaactaatatgaacataaagaggaaataaaaggtacctaacttgggcacagctgtaactgaagacctaatgaagtagtcagatgcttacaactatttataatgcatcaatttgaacttagaaggtaggagatcagatcatatgtgggaaaatgtaaaagcagggatatcagtgggcattagaataaaaactagggatacaataacttctttgcatatgacaatacttatttgtatataagagaaagaacgaaataacctttattgaaataaagatactatgcaagaaaatgtacagttgtcgaagtggagaaaatgaggatatattcttgcagacgagctataggtcatacatgaatgtctagtgagacattcaaaattcgtatagggtgcagagtaatttcttattgtgaggaactgtccaatgtattgcaagatgttctgcatacttggctctcacatactaaatgctagtagcgcccccacccccacgcccagtcacggtgacaaccacaaaccctatcagatctattcacctttttcagagcagatattttgtaacattctctttgctgacctgaaatgactcatagataatacaatctacttacacacatgaatttcttaaaaaaatcaatttaatgccctaactctcttattaaggagaaatagaaaagaagaaatttataatgaaaagaagatgaatttcattatgtaaacgctcaggcatgactacgctgtttgaaacagacagatgtttactcttccttgtaatgagtaggtttggatttaagagccgattagaggctacttcctgtaaacaagtacaggaaaatgaaactagacgggtgggggacactagaatgaaaaccagtgttagggtaaagacaaaacagactatgtacataatctgtatatgggaaaagaaagagcgaaattaccttacttaaggataataggacaagacaaattacagattgtctcagagaaaacaaatgagttactctctcggacaagctgtaggtcctacctaaatgtccagcaggacattagacagtcgtacagggtacagaataattcttcgttgtgtggcactaacccacacactgcaggacatcgttctccctggctgcatccactcagtgctgggagtagtccccagttattatgaaaccaccaataacccactgaccacagtgagaaccactgattttttccactgacctactgaatatctagcatccttagattggctcaactgttactttcctaaggagtccttctacagaataggtcagatcttggcctcccaaaccccttatttttaaaatactttgcgccttgctttgataatttgtattatgtatccaaactgaaattatctgctttctgcattagaatgtaagccccctgagggttgagtcagtctgtcttgtttgctgtgccacgcctgatgcccagcccagcagcatgctttgtacactgatatattgggtaaattttgttgaataaattaagctcaactatttgtatttcaatagttgagttgtattgcttcctgttcttcaagcttaatttgaactgtctaataaaaagaagtaattaa

SEQ ID NO: 421071 - DNA, 3384 bp, Homo sapiens
ttgtctgcctgtggctgtctttctttttttgttggtttgctgctggcctgttcctcgtcgtctttgttgtcgtcgtgtgttcttcttgtgtggtcgtgtgtcgtgggtgtgtgttgttgtttcttcgtctgttctgcgttgttgtttttcttgctcgttttttctgttgtctgtttcgcgtttgtgtgtgtcgctgtgtgtgttgtgtgttgtgtgtgggcgcggcggtttgttgtgagtcgtgcgtcgaccctttttcctccgctgctatggtcgggtggtcttgcgtcagcctcgtgtgttttgtcctgtcggcttctattttgcgtgggtgtgttgcctctgttttcgcccgccctgaggtggtgcgtgttcatgtgtctgctcgtcttgtgtttgttccgtctcgtttctttttatatgcgtgctgtccgcctgtgtcttgtttagcacgctttcttttctagggcgtccgcctgttttttgctaataatcagttgtgtgtggcttgttagtctgctgctgcgccctctgcgcggtgtgttgttttgtgggccccccccccttttttttttttttttttttttttttttttttttttttttttttttttttttttttttttttttttttttttttttttttttttttttttttttttttttttttttttttttttttagctagttcagtggttttcaatgggcatttctgcctttttttttttctaaacgacaatagaaatacatcttctttattatcctccaaatccaattccttcttatgaaccaggtttttccttctgattttcccttttcaacattccttaccagtcaccaaagtttcctgttataatttcttttagcagacaagttataagtcagatttaattagcatcagagttgattttatattagtcagattttggatcatcacagagatctccacaactccttggcttaaacagctccaccggtaaaaaaaaaaaaaaaaaaaaaaaaatagtttttttagagtagagttattttctgggagagttactacaaatgcttattctcattgacttatttctttcatggtaactttcgttttggagtgttcattttctgaacttgaccctcacattgtaggggtgcagtttgtccaactctttccaacagcccattagacaccactagctggatatttcacaggcatctttgattcaatatgtccaaagtggaactctccatctacctccctcacatgaacctgttcctctctcaggatctgtatgtaagtgaaaagcgtcaccatctacccattggctcaagcagaaatctggaagtcatctttgactccttcctctccctcctgataaacatctaagcagtttctaagtctagttttacctcttaaatatctctgttcccttctaagttgtttgctgtgttttcttcagagcaagaaggttatattttttaaaatttacttagtaatgcacattcaaaacacacatcaagtcttcaggataaagttcaaaaccgctgtcatggccccatgtgatctctccctcccctacccctctatcatttagtttcttctgcgcaagccactctggcttcctttcagttttgtggttcccatttttagctagttcagtggttttcaatgggcatttctgcctttttttttctaaacgacaaatagaaatacatcttctttattatcctccaaatccaattcagaggtaatatgctccacctacacacaattttagaaataaattaaaaattaaataaaactaatatgaacataaagaggaaataaaaggtacctaacttgggcacagctgtaactgaagacctaatgaagtagtcagatgcttacaactatttataatgcatcaatttgaacttagaaggtaggagatcagatcatatgtgggaaaatgtaaaagcagggatatcagtgggcattagaataaaaactagggatacaataacttctttgcatatgacaatacttatttgtatataagagaaagaacgaaataacctttattgaaataaagatactatgcaagaaaatgtacagttgtcgaagtggagaaaatgaggatatattcttgcagacgagctataggtcatacatgaatgtctagtgagacattcaaaattcgtatagggtgcagagtaatttcttattgtgaggaactgtccaatgtattgcaagatgttctgcatacttggctctcacatactaaatgctagtagcgcccccacccccacgcccagtcacggtgacaaccacaaaccctatcagatctattcacctttttcagagcagatattttgtaacattctctttgctgacctgaaatgactcatagataatacaatctacttacacacatgaatttcttaaaaaaatcaatttaatgccctaactctcttattaaggagaaatagaaaagaagaaatttataatgaaaagaagatgaatttcattatgtaaacgctcaggcatgactacgctgtttgaaacagacagatgtttactcttccttgtaatgagtaggtttggatttaagagccgattagaggctacttcctgtaaacaagtacaggaaaatgaaactagacgggtgggggacactagaatgaaaaccagtgttagggtaaagacaaaacagactatgtacataatctgtatatgggaaaagaaagagcgaaattaccttacttaaggataataggacaagacaaattacagattgtctcagagaaaacaaatgagttactctctcggacaagctgtaggtcctacctaaatgtccagcaggacattagacagtcgtacagggtacagaataattcttcgttgtgtggcactaacccacacactgcaggacatcgttctccctggctgcatccactcagtgctgggagtagtccccagttattatgaaaccaccaataacccactgaccacagtgagaaccactgattttttccactgacctactgaatatctagcatccttagattggctcaactgttactttcctaaggagtccttctacagaataggtcagatcttggcctcccaaaccccttatttttaaaatactttgcgccttgctttgataatttgtattatgtatccaaactgaaattatctgctttctgcattagaatgtaagccccctgagggttgagtcagtctgtcttgtttgctgtgccacgcctgatgcccagcccagcagcatgctttgtacactgatatattgggtaaattttgttgaataaattaagctcaactatttgtatttcaatagttgagttgtattgcttcctgttcttcaagcttaatttgaactgtctaataaaaagaagtaattaa

SEQ ID NO: 421072 - DNA, 2453 bp, Homo sapiens
ttgggtgcccccccaagattgccccaaatccctgggcttaacaactccccccgttaaaaaaaaaaaaaaaatagtttttttagagtagagttattttctgggagagttactacaaatgcttattctcattgacttatttctttcatggtaactttcgttttggagtgttcattttctgaacttgaccctcacattgtaggggtgcagtttgtccaactctttccaacagcccattagacaccactagctggatatttcacaggcatctttgattcaatatgtccaaagtggaactctccatctacctccctcacatgaacctgttcctctctcaggatctgtatgtaagtgaaaagcgtcaccatctacccattggctcaagcagaaatctggaagtcatctttgactccttcctctccctcctgataaacatctaagcagtttctaagtctagttttacctcttaaatatctctgttcccttctaagttgtttgctgtgttttcttcagagcaagaaggttatattttttaaaatttacttagtaatgcacattcaaaacacacatcaagtcttcaggataaagttcaaaaccgctgtcatggccccatgtgatctctccctcccctacccctctatcatttagtttcttctgcgcaagccactctggcttcctttcagttttgtggttcccatttttagctagttcagtggttttcaatgggcatttctgcctttttttttctaaacgacaaatagaaatacatcttctttattatcctccaaatccaattcagaggtaatatgctccacctacacacaattttagaaataaattaaaaattaaataaaactaatatgaacataaagaggaaataaaaggtacctaacttgggcacagctgtaactgaagacctaatgaagtagtcagatgcttacaactatttataatgcatcaatttgaacttagaaggtaggagatcagatcatatgtgggaaaatgtaaaagcagggatatcagtgggcattagaataaaaactagggatacaataacttctttgcatatgacaatacttatttgtatataagagaaagaacgaaataacctttattgaaataaagatactatgcaagaaaatgtacagttgtcgaagtggagaaaatgaggatatattcttgcagacgagctataggtcatacatgaatgtctagtgagacattcaaaattcgtatagggtgcagagtaatttcttattgtgaggaactgtccaatgtattgcaagatgttctgcatacttggctctcacatactaaatgctagtagcgcccccacccccacgcccagtcacggtgacaaccacaaaccctatcagatctattcacctttttcagagcagatattttgtaacattctctttgctgacctgaaatgactcatagataatacaatctacttacacacatgaatttcttaaaaaaatcaatttaatgccctaactctcttattaaggagaaatagaaaagaagaaatttataatgaaaagaagatgaatttcattatgtaaacgctcaggcatgactacgctgtttgaaacagacagatgtttactcttccttgtaatgagtaggtttggatttaagagccgattagaggctacttcctgtaaacaagtacaggaaaatgaaactagacgggtgggggacactagaatgaaaaccagtgttagggtaaagacaaaacagactatgtacataatctgtatatgggaaaagaaagagcgaaattaccttacttaaggataataggacaagacaaattacagattgtctcagagaaaacaaatgagttactctctcggacaagctgtaggtcctacctaaatgtccagcaggacattagacagtcgtacagggtacagaataattcttcgttgtgtggcactaacccacacactgcaggacatcgttctccctggctgcatccactcagtgctgggagtagtccccagttattatgaaaccaccaataacccactgaccacagtgagaaccactgattttttccactgacctactgaatatctagcatccttagattggctcaactgttactttcctaaggagtccttctacagaataggtcagatcttggcctcccaaaccccttatttttaaaatactttgcgccttgctttgataatttgtattatgtatccaaactgaaattatctgctttctgcattagaatgtaagccccctgagggttgagtcagtctgtcttgtttgctgtgccacgcctgatgcccagcccagcagcatgctttgtacactgatatattgggtaaattttgttgaataaattaagctcaactatttgtatttcaatagttgagttgtattgcttcctgttcttcaagcttaatttgaactgtctaataaaaagaagtaattaa

SEQ ID NO: 421073 - DNA, 2360 bp, Homo sapiens
agcgtctgctgagaggtcctgcacacctagtccagatcagatcagccacagggcttccctggaggacgcgcctgtggacgatctcacccgcaagttcacgtatctggggagtcaggatcgcgctcggcctccctcaggctcgtccaaggctactgatcttggaggaacaagtcaggccgggacaagccagaggtttttagagaacggcagtcaagaggacctcttgcatggaaatccaggcagcacttaccttgcttccaattcaacatcagcccccaactggaagagcctcacatcctggacgaatgaccaaggcgccaggagaaagactgtgttttctcccacgctacctgccgcccgctcttctcttggctctctgcaaacacctgaagctgtgaccaccagaaagggcacaggcttgctttcctcagactacaggatcatcaatggcaaaagtggaactcaggacatccagcctggccctctttttaataataatgctgatggagtggccacagatataacttctaccagatccttaaattacaaaagcactagcagcggtcacagagaaatatcatcacctaggattcaggatgctggacctgcttcccgagatgtccaggccactggcagaatcgcagatgatgctgacccaagagtagcacttgttaacgattctttatctgatgtcacaagtaccacatcttctagggtggatgatcatgactcagaggaaatttgtcttgaccatctgtgtaagggttgtccgcttaatggtagctgcagcaaagtccacttccatctgccttaccggtggcagatgcttattggtaaaacctggacggactttgagcacatggagacgatcgagaaaggctactgtaaccccggaatccagctctgttctgtaggaagttatacaatcaattttcgggtaatgagttgtgattcctttcccatccgacgcctctccactccttcttctgtcaccaagccagccaattctgtcttcaccaccaaatggatttggtattggaagaatgaatctggcacatggattcagtatggagaagagaaagacaaacggaaaaattcaaacgtcgactcttcatacctggagtctctctatcaatcctgtccgaggggagttgtgccatttcaggcgggctcacggaactatgagctgagtttccaagggatgattcagacaaacatagcttccaaaactcaaaaggatgtcatcagaagaccaacatttgtgcctcagtggtatgtgcagcagatgaagagagggccagaccatgagccagcaaagacctcgtcagtgtctttaactgcgacctttcgtcctcaggaggacttttgcttcctatcctcaaagaaatataagttgtcagagatccatcacctacatccagaatatgtcagagtaagtgagcattttaaagcttccatgaaaaatttcaagattgaaaagataaagaagatcgagaactcagagctcctggataaatttacatggaagaaatcgcagatgaaggaagaaggaaaactcctattttatgcgacaagccgtgcctatgtggaatctatctgttcgaataattttgacagtttcctacatgaaactcatgaaaacaaatacggaaaaggaatttactttgcaaaagatgccatctattcccacaaaaattgcccgtatgatgccaaaaacgtcgttatgtttgtagcccaagttctggttggaaagtttactgaaggaaatataacgtacacgagccctcctccacagttcgacagctgtgtggataccagatcgaatccctccgtttttgtcatctttcagaaagatcaggtttacccacaatatgtgattgaatatactgaagacaaagcctgcgtgattagttagaaccgatgaatacagcgtcagaaggatgccataaccattctgttcctttacagaactaaattgccgcagacaggagttaaagttttatattttcctgctcagttatctaatgtcttagatcagtggtccccaaattttgctacatattagaatcatctgggaggttttaaacaaattctgatgcccaggttgcaccccatgccaatgaaatcatttctgggcgtcagcgccaggcagttgtattttttttttttttttttttttgagactgaatctcactccatcgtccaggcagaggttgcagtgagccgaaatcacaccactgcattccagcctgggcgacagagcaagactctgtctcaaaaacaaaaacaaacaacaaccaaccaaacaacaacaaaaaaaaacctgagcacacgttcacctggacttaatagttaaaaaa

SEQ ID NO: 421074 - DNA, 1162 bp, Homo sapiens
agctaccagattccaacccgtaatcactgatgtctggtgtagggaagcttgaaaggatggtgtcttgttatttggctgccccagctctcctcttttaccatccaacttggatttaaagatgagattaattcctgaatattcattcactcctttgctttgagccttctactaatggcagtgaaggatacaagtcttttactgtgagcaattctcatcccaaaggattttctctattcgtatacatacaggtcagtcttgaatatttgccgtgtaaatagcctctgcaaaataacaagaagtcattttctagggctgatcttgattctcactgcttttatttttttttctgtccaaagggatgattcagacaaacatagcttccaaaactcaaaaggatgtcatcagaagaccaacatttgtgcctcagtggtatgtgcagcagatgaagagagggccagagtaagtgttctgaagcagctgtttgctgacagatgcttgagatgttcatgccctgggctcatcaagtcactcgtgaatctggagcctgttttcctgaaaagttcctgtttgcattactctgcagtttccatttgcattatcgatgagtaagatgcttgttaagcagcatggtgtgactgaaaggatactagatcggaaaatgaattttctttctgaaagggaagtctgagcgagtctcctaaatactctgggctttagcttctccagctgtgaagagctggattgatgcagtacacctaaggaataatcatatatactgggtttttgttttgctgtggattctttttttttttttttttttttagagggggtctcactttgttgcccaggctggtcttgaactcctgagctcaagtgatcctcctacctcagtctcccaaagtgctgggattacaggcatgagccaccgtgcctggctttgctgtggattcttttgggtgtcttttgttttcctacacgatttatagaggatgaggggcggagaaagagatagaaaaaagggatgagctagctgttagagcaagggttttggtgagagataatattgattgaagggattttaaaggaaatgttgctgtgggggattcattgtaactctccttgtgaactgctcagtaaactctacattgttcatgaaaatttt

SEQ ID NO: 421075 - DNA, 2005 bp, Homo sapiens
agcgtctgctgagaggtcctgcacacctagtccagatcagatcagccacagggcttccctggaggacgcgcctgtggacgatctcacccgcaagttcacgtatctggggagtcaggatcgcgctcggcctccctcaggctcgtccaaggctactgatcttggaggaacaagtcaggccgggacaagccagaggtttttagagaacggcagtcaagaggacctcttgcatggaaatccaggcagcacttaccttgcttccaattcaacatcagcccccaactggaagagcctcacatcctggacgaatgaccaaggcgccaggagaaagactgtgttttctcccacgctacctgccgcccgctcttctcttggctctctgcaaacacctgaagctgtgaccaccagaaagggcacaggcttgctttcctcagactacaggatcatcaatggcaaaagtggaactcaggacatccagcctggccctctttttaataataatgctgatggagtggccacagatataacttctaccagatccttaaattacaaaagcactagcagcggtcacagagaaatatcatcacctaggattcaggatgctggacctgcttcccgagatgtccaggccactggcagaatcgcagatgatgctgacccaagagtagcacttgttaacgattctttatctgatgtcacaagtaccacatcttctagggtggatgatcatgactcagaggaaatttgtcttgaccatctgtgtaagggttgtccgcttaatggtagctgcagcaaagtccacttccatctgccttaccggtggcagatgcttattggtaaaacctggacggactttgagcacatggagacgatcgagaaaggctactgtaaccccggaatccagctctgttctgtaggaagttatacaatcaattttcgggtaatgagttgtgattcctttcccatccgacgcctctccactccttcttctgtcaccaagccagccaattctgtcttcaccaccaaatggatttggtattggaagaatgaatctggcacatggattcagtatggagaagagaaagacaaacggaaaaattcaaacgtcgactcttcatacctggagtctctctatcaatcctgtccgaggggagttgtgccatttcaggcgggctcacggaactatgagctgagtttccaagggatgattcagacaaacatagcttccaaaactcaaaaggatgtcatcagaagaccaacatttgtgcctcagtggtatgtgcagcagatgaagagagggccagagtaagtgttctgaagcagctgtttgctgacagatgcttgagatgttcatgccctgggctcatcaagtcactcgtgaatctggagcctgttttcctgaaaagttcctgtttgcattactctgcagtttccatttgcattatcgatgagtaagatgcttgttaagcagcatggtgtgactgaaaggatactagatcggaaaatgaattttctttctgaaagggaagtctgagcgagtctcctaaatactctgggctttagcttctccagctgtgaagagctggattgatgcagtacacctaaggaataatcatatatactgggtttttgttttgctgtggattctttttttttttttttttttttagagggggtctcactttgttgcccaggctggtcttgaactcctgagctcaagtgatcctcctacctcagtctcccaaagtgctgggattacaggcatgagccaccgtgcctggctttgctgtggattcttttgggtgtcttttgttttcctacacgatttatagaggatgaggggcggagaaagagatagaaaaaagggatgagctagctgttagagcaagggttttggtgagagataatattgattgaagggattttaaaggaaatgttgctgtgggggattcattgtaactctccttgtgaactgctcagtaaactctacattgttcatgaaaatttt

SEQ ID NO: 421076 - DNA, 6040 bp, Homo sapiens
agcgtctgctgagaggtcctgcacacctagtccagatcagatcagccacagggcttccctggaggacgcgcctgtggacgatctcacccgcaagttcacgtatctggggagtcaggatcgcgctcggcctccctcaggctcgtccaaggctactgatcttggaggaacaagtcaggccgggacaagccagaggtttttagagaacggcagtcaagaggacctcttgcatggaaatccaggcagcacttaccttgcttccaattcaacatcagcccccaactggaagagcctcacatcctggacgaatgaccaaggcgccaggagaaagactgtgttttctcccacgctacctgccgcccgctcttctcttggctctctgcaaacacctgaagctgtgaccaccagaaagggcacaggcttgctttcctcagactacaggatcatcaatggcaaaagtggaactcaggacatccagcctggccctctttttaataataatgctgatggagtggccacagatataacttctaccagatccttaaattacaaaagcactagcagcggtcacagagaaatatcatcacctaggattcaggatgctggacctgcttcccgagatgtccaggccactggcagaatcgcagatgatgctgacccaagagtagcacttgttaacgattctttatctgatgtcacaagtaccacatcttctagggtggatgatcatgactcagaggaaatttgtcttgaccatctgtgtaagggttgtccgcttaatggtagctgcagcaaagtccacttccatctgccttaccggtggcagatgcttattggtaaaacctggacggactttgagcacatggagacgatcgagaaaggctactgtaaccccggaatccagctctgttctgtaggaagttatacaatcaattttcgggtaatgagttgtgattcctttcccatccgacgcctctccactccttcttctgtcaccaagccagccaattctgtcttcaccaccaaatggatttggtattggaagaatgaatctggcacatggattcagtatggagaagagaaagacaaacggaaaaattcaaacgtcgactcttcatacctggagtctctctatcaatcctgtccgaggggagttgtgccatttcaggcgggctcacggaactatgagctgagtttccaagggatgattcagacaaacatagcttccaaaactcaaaaggatgtcatcagaagaccaacatttgtgcctcagtggtatgtgcagcagatgaagagagggccagaccatgagccagcaaagacctcgtcagtgtctttaactgcgacctttcgtcctcaggaggacttttgcttcctatcctcaaagaaatataagttgtcagagatccatcacctacatccagaatatgtcagagtaagtgagcattttaaagcttccatgaaaaatttcaagattgaaaagataaagaagatcgagaactcagagctcctggataaatttacatgaagaaatcgcagatgaaggaagaaggagaactcagagctcctggataaatttacatggaagaaatcgcagatgaaggaagaaggaaaactcctattttatgcgacaagccgtgcctatgtggaatctatctgttcgaataattttgacagtttcctacatgaaactcatgaaaacaaatacggaaaaggaatttactttgcaaaagatgccatctattcccacaaaaattgcccgtatgatgccaaaaacgtcgttatgtttgtagcccaagttctggttggaaagtttactgaaggaaatataacgtacacgagccctcctccacagttcgacagctgtgtggataccagatcgaatccctccgtttttgtcatctttcagaaagatcaggtttacccacaatatgtgattgaatatactgaagacaaagcctgcgtgattagttagaaccgatgaatacagcgtcagaaggatgccataaccattctgttcctttacagaactaaattgccgcagacaggagttaaagttttatattttcctgctcagttatctaatgtcttagatcagtggtccccaaattttgctacatattagaatcatctgggaggttttaaacaaattctgatgcccaggttgcaccccatgccaatgaaatcatttctgggcgtcagcgccaggcagttgtattttttttttttttttttttttgagactgaatctcactccatcgtccaggctggagtgcagtggcgcgatctcggctcactgcaacctctgcctcccgggttcaagcaattctcctgcctcagcctcccgagtagctggaactacaggcacacactgccgcgcccagctaattttttgtattttttagtagagacagggtttcactgtgttgcccaggctggtctcaaactcctgagctcaggcaatctgcccgccttggcctcccaaagtgctaggattacaggtatgagccaccatgcccggctggcagttgtattttttaaagcccttctgatgattccaatgtgttggaaagtttaccttgtctcagatgtaactggtaaaggctgatttctaaattttctgtaattgcagcaacctttctctcctgtctacccttttagtttactgtatgccatggttttgttttggttacattgaaagaaagttaatttggaaaatttgggagaaatctaatcatgcctattaaggatgtaagacattacagccttagaagaaagattgtgaaaagctggggagaaaatgcttaaggacatgctaggggaaaaaaaagtaaaattgaagtgctattgcagacatggctgcagtactgtaccttatcattctgatgaaactgatttggagcacccttttctttatcgctacatttatttaggggacaaactccatccaggttgactctctctggaatgcggtaataagagctggcaagtaaggctcagagagaagcaaccaactggagttaattgcccatttgggctctttgtataattatggcaaagtagacatttatgttctaattaatatgattacagagaaggctttttctcaggtcaggcttttcatgaaagtattttgagaacaatgaattgcaataaccagcttcacacaagcataactgataaacgcgagtgctattgtagtcttggcaagtgagccaagaacctaggagcagggccattcctactgaaggacgggccccctacggagatgaaatttgtttcctggtgagcacagaatcagaacaaagaacaatatcccaaagaggccctgtgtctaccaggagcttctttttccaaatgtaatggattatgtggaattgtagtgccatcggtttttacttagagcccttgacgtgcttggaccaatatttccttccttcttatgaaccaggtttttccttctgattttcccttttcaacattccttaccagtcaccaaagtttcctgttataatttcttttagcagacaagttataagtcagatttaattagcatcagagttgattttatattagtcagattttggatcatcacagagatctccacaactccttggcttaaacagctccaccggtaaaaaaaaaaaaaaaaaaaaaaaaatagtttttttagagtagagttattttctgggagagttactacaaatgcttattctcattgacttatttctttcatggtaactttcgttttggagtgttcattttctgaacttgaccctcacattgtaggggtgcagtttgtccaactctttccaacagcccattagacaccactagctggatatttcacaggcatctttgattcaatatgtccaaagtggaactctccatctacctccctcacatgaacctgttcctctctcaggatctgtatgtaagtgaaaagcgtcaccatctacccattggctcaagcagaaatctggaagtcatctttgactccttcctctccctcctgataaacatctaagcagtttctaagtctagttttacctcttaaatatctctgttcccttctaagttgtttgctgtgttttcttcagagcaagaaggttatattttttaaaatttacttagtaatgcacattcaaaacacacatcaagtcttcaggataaagttcaaaaccgctgtcatggccccatgtgatctctccctcccctacccctctatcatttagtttcttctgcgcaagccactctggcttcctttcagttttgtggttcccatttttagctagttcagtggttttcaatgggcatttctgcctttttttttctaaacgacaaatagaaatacatcttctttattatcctccaaatccaattcagaggtaatatgctccacctacacacaattttagaaataaattaaaaattaaataaaactaatatgaacataaagaggaaataaaaggtacctaacttgggcacagctgtaactgaagacctaatgaagtagtcagatgcttacaactatttataatgcatcaatttgaacttagaaggtaggagatcagatcatatgtgggaaaatgtaaaagcagggatatcagtgggcattagaataaaaactagggatacaataacttctttgcatatgacaatacttatttgtatataagagaaagaacgaaataacctttattgaaataaagatactatgcaagaaaatgtacagttgtcgaagtggagaaaatgaggatatattcttgcagacgagctataggtcatacatgaatgtctagtgagacattcaaaattcgtatagggtgcagagtaatttcttattgtgaggaactgtccaatgtattgcaagatgttctgcatacttggctctcacatactaaatgctagtagcgcccccacccccacgcccagtcacggtgacaaccacaaaccctatcagatctattcacctttttcagagcagatattttgtaacattctctttgctgacctgaaatgactcatagataatacaatctacttacacacatgaatttcttaaaaaaatcaatttaatgccctaactctcttattaaggagaaatagaaaagaagaaatttataatgaaaagaagatgaatttcattatgtaaacgctcaggcatgactacgctgtttgaaacagacagatgtttactcttccttgtaatgagtaggtttggatttaagagccgattagaggctacttcctgtaaacaagtacaggaaaatgaaactagacgggtgggggacactagaatgaaaaccagtgttagggtaaagacaaaacagactatgtacataatctgtatatgggaaaagaaagagcgaaattaccttacttaaggataataggacaagacaaattacagattgtctcagagaaaacaaatgagttactctctcggacaagctgtaggtcctacctaaatgtccagcaggacattagacagtcgtacagggtacagaataattcttcgttgtgtggcactaacccacacactgcaggacatcgttctccctggctgcatccactcagtgctgggagtagtccccagttattatgaaaccaccaataacccactgaccacagtgagaaccactgattttttccactgacctactgaatatctagcatccttagattggctcaactgttactttcctaaggagtccttctacagaataggtcagatcttggcctcccaaaccccttatttttaaaatactttgcgccttgctttgataatttgtattatgtatccaaactgaaattatctgctttctgcattagaatgtaagccccctgagggttgagtcagtctgtcttgtttgctgtgccacgcctgatgcccagcccagcagcatgctttgtacactgatatattgggtaaattttgttgaataaattaagctcaactatttgtatttcaatagttgagttgtattgcttcctgttcttcaagcttaatttgaactgtctaataaaaagaagtaattaa

SEQ ID NO: 421077 - DNA, 5140 bp, Homo sapiens
agctaccagattccaacccgtaatcactgatgtctggtgtagggaagcttgaaaggatggtgtcttgttatttggctgccccagctctcctcttttaccatccaacttggatttaaagatgagattaattcctgaatattcattcactcctttgctttgagccttctactaatggcagtgaaggatacaagtcttttactgtgagcaattctcatcccaaaggattttctctattcgtatacatacaggtcagtcttgaatatttgccgtgtaaatagcctctgcaaaataacaagaagtcattttctagggctgatcttgattctcactgcttttatttttttttctgtccaaagggatgattcagacaaacatagcttccaaaactcaaaaggatgtcatcagaagaccaacatttgtgcctcagtggtatgtgcagcagatgaagagagggccagaccatgagccagcaaagacctcgtcagtgtctttaactgcgacctttcgtcctcaggaggacttttgcttcctatcctcaaagaaatataagttgtcagagatccatcacctacatccagaatatgtcagagtaagtgagcattttaaagcttccatgaaaaatttcaagattgaaaagataaagaagatcgagaactcagagctcctggataaatttacatggaagaaatcgcagatgaaggaagaaggaaaactcctattttatgcgacaagccgtgcctatgtggaatctatctgttcgaataattttgacagtttcctacatgaaactcatgaaaacaaatacggaaaaggaatttactttgcaaaagatgccatctattcccacaaaaattgcccgtatgatgccaaaaacgtcgttatgtttgtagcccaagttctggttggaaagtttactgaaggaaatataacgtacacgagccctcctccacagttcgacagctgtgtggataccagatcgaatccctccgtttttgtcatctttcagaaagatcaggtttacccacaatatgtgattgaatatactgaagacaaagcctgcgtgattagttagaaccgatgaatacagcgtcagaaggatgccataaccattctgttcctttacagaactaaattgccgcagacaggagttaaagttttatattttcctgctcagttatctaatgtcttagatcagtggtccccaaattttgctacatattagaatcatctgggaggttttaaacaaattctgatgcccaggttgcaccccatgccaatgaaatcatttctgggcgtcagcgccaggcagttgtattttttttttttttttttttttgagactgaatctcactccatcgtccaggctggagtgcagtggcgcgatctcggctcactgcaacctctgcctcccgggttcaagcaattctcctgcctcagcctcccgagtagctggaactacaggcacacactgccgcgcccagctaattttttgtattttttagtagagacagggtttcactgtgttgcccaggctggtctcaaactcctgagctcaggcaatctgcccgccttggcctcccaaagtgctaggattacaggtatgagccaccatgcccggctggcagttgtattttttaaagcccttctgatgattccaatgtgttggaaagtttaccttgtctcagatgtaactggtaaaggctgatttctaaattttctgtaattgcagcaacctttctctcctgtctacccttttagtttactgtatgccatggttttgttttggttacattgaaagaaagttaatttggaaaatttgggagaaatctaatcatgcctattaaggatgtaagacattacagccttagaagaaagattgtgaaaagctggggagaaaatgcttaaggacatgctaggggaaaaaaaagtaaaattgaagtgctattgcagacatggctgcagtactgtaccttatcattctgatgaaactgatttggagcacccttttctttatcgctacatttatttaggggacaaactccatccaggttgactctctctggaatgcggtaataagagctggcaagtaaggctcagagagaagcaaccaactggagttaattgcccatttgggctctttgtataattatggcaaagtagacatttatgttctaattaatatgattacagagaaggctttttctcaggtcaggcttttcatgaaagtattttgagaacaatgaattgcaataaccagcttcacacaagcataactgataaacgcgagtgctattgtagtcttggcaagtgagccaagaacctaggagcagggccattcctactgaaggacgggccccctacggagatgaaatttgtttcctggtgagcacagaatcagaacaaagaacaatatcccaaagaggccctgtgtctaccaggagcttctttttccaaatgtaatggattatgtggaattgtagtgccatcggtttttacttagagcccttgacgtgcttggaccaatatttccttccttcttatgaaccaggtttttccttctgattttcccttttcaacattccttaccagtcaccaaagtttcctgttataatttcttttagcagacaagttataagtcagatttaattagcatcagagttgattttatattagtcagattttggatcatcacagagatctccacaactccttggcttaaacagctccaccggtaaaaaaaaaaaaaaaaaaaaaaaaatagtttttttagagtagagttattttctgggagagttactacaaatgcttattctcattgacttatttctttcatggtaactttcgttttggagtgttcattttctgaacttgaccctcacattgtaggggtgcagtttgtccaactctttccaacagcccattagacaccactagctggatatttcacaggcatctttgattcaatatgtccaaagtggaactctccatctacctccctcacatgaacctgttcctctctcaggatctgtatgtaagtgaaaagcgtcaccatctacccattggctcaagcagaaatctggaagtcatctttgactccttcctctccctcctgataaacatctaagcagtttctaagtctagttttacctcttaaatatctctgttcccttctaagttgtttgctgtgttttcttcagagcaagaaggttatattttttaaaatttacttagtaatgcacattcaaaacacacatcaagtcttcaggataaagttcaaaaccgctgtcatggccccatgtgatctctccctcccctacccctctatcatttagtttcttctgcgcaagccactctggcttcctttcagttttgtggttcccatttttagctagttcagtggttttcaatgggcatttctgcctttttttttctaaacgacaaatagaaatacatcttctttattatcctccaaatccaattcagaggtaatatgctccacctacacacaattttagaaataaattaaaaattaaataaaactaatatgaacataaagaggaaataaaaggtacctaacttgggcacagctgtaactgaagacctaatgaagtagtcagatgcttacaactatttataatgcatcaatttgaacttagaaggtaggagatcagatcatatgtgggaaaatgtaaaagcagggatatcagtgggcattagaataaaaactagggatacaataacttctttgcatatgacaatacttatttgtatataagagaaagaacgaaataacctttattgaaataaagatactatgcaagaaaatgtacagttgtcgaagtggagaaaatgaggatatattcttgcagacgagctataggtcatacatgaatgtctagtgagacattcaaaattcgtatagggtgcagagtaatttcttattgtgaggaactgtccaatgtattgcaagatgttctgcatacttggctctcacatactaaatgctagtagcgcccccacccccacgcccagtcacggtgacaaccacaaaccctatcagatctattcacctttttcagagcagatattttgtaacattctctttgctgacctgaaatgactcatagataatacaatctacttacacacatgaatttcttaaaaaaatcaatttaatgccctaactctcttattaaggagaaatagaaaagaagaaatttataatgaaaagaagatgaatttcattatgtaaacgctcaggcatgactacgctgtttgaaacagacagatgtttactcttccttgtaatgagtaggtttggatttaagagccgattagaggctacttcctgtaaacaagtacaggaaaatgaaactagacgggtgggggacactagaatgaaaaccagtgttagggtaaagacaaaacagactatgtacataatctgtatatgggaaaagaaagagcgaaattaccttacttaaggataataggacaagacaaattacagattgtctcagagaaaacaaatgagttactctctcggacaagctgtaggtcctacctaaatgtccagcaggacattagacagtcgtacagggtacagaataattcttcgttgtgtggcactaacccacacactgcaggacatcgttctccctggctgcatccactcagtgctgggagtagtccccagttattatgaaaccaccaataacccactgaccacagtgagaaccactgattttttccactgacctactgaatatctagcatccttagattggctcaactgttactttcctaaggagtccttctacagaataggtcagatcttggcctcccaaaccccttatttttaaaatactttgcgccttgctttgataatttgtattatgtatccaaactgaaattatctgctttctgcattagaatgtaagccccctgagggttgagtcagtctgtcttgtttgctgtgccacgcctgatgcccagcccagcagcatgctttgtacactgatatattgggtaaattttgttgaataaattaagctcaactatttgtatttcaatagttgagttgtattgcttcctgttcttcaagcttaatttgaactgtctaataaaaagaagtaattaa

SEQ ID NO: 421078 - DNA, 1629 bp, Homo sapiens
catgatacgaatcgatgccggtacctgaacattcgtgtcataaagaggaaataaaaggtacctaacttgggcacagctgtaactgaagacctaatgaagtagtcagatgcttacaactatttataatgcatcaatttgaacttagaaggtaggagatcagatcatatgtgggaaaatgtaaaagcagggatatcagtgggcattagaataaaaactagggatacaataacttctttgcatatgacaatacttatttgtatataagagaaagaacgaaataacctttattgaaataaagatactatgcaagaaaatgtacagttgtcgaagtggagaaaatgaggatatattcttgcagacgagctataggtcatacatgaatgtctagtgagacattcaaaattcgtatagggtgcagagtaatttcttattgtgaggaactgtccaatgtattgcaagatgttctgcatacttggctctcacatactaaatgctagtagcgcccccacccccacgcccagtcacggtgacaaccacaaaccctatcagatctattcacctttttcagagcagatattttgtaacattctctttgctgacctgaaatgactcatagataatacaatctacttacacacatgaatttcttaaaaaaatcaatttaatgccctaactctcttattaaggagaaatagaaaagaagaaatttataatgaaaagaagatgaatttcattatgtaaacgctcaggcatgactacgctgtttgaaacagacagatgtttactcttccttgtaatgagtaggtttggatttaagagccgattagaggctacttcctgtaaacaagtacaggaaaatgaaactagacgggtgggggacactagaatgaaaaccagtgttagggtaaagacaaaacagactatgtacataatctgtatatgggaaaagaaagagcgaaattaccttacttaaggataataggacaagacaaattacagattgtctcagagaaaacaaatgagttactctctcggacaagctgtaggtcctacctaaatgtccagcaggacattagacagtcgtacagggtacagaataattcttcgttgtgtggcactaacccacacactgcaggacatcgttctccctggctgcatccactcagtgctgggagtagtccccagttattatgaaaccaccaataacccactgaccacagtgagaaccactgattttttccactgacctactgaatatctagcatccttagattggctcaactgttactttcctaaggagtccttctacagaataggtcagatcttggcctcccaaaccccttatttttaaaatactttgcgccttgctttgataatttgtattatgtatccaaactgaaattatctgctttctgcattagaatgtaagccccctgagggttgagtcagtctgtcttgtttgctgtgccacgcctgatgcccagcccagcagcatgctttgtacactgatatattgggtaaattttgttgaataaattaagctcaactatttgtatttcaatagttgagttgtattgcttcctgttcttcaagcttaatttgaactgtctaataaaaagaagtaattaa

SEQ ID NO: 421079 - DNA, 1032 bp, Homo sapiens
  misc_feature (557)..(557): n is a, c, g, or t
gttatttattgacttttgccaaggcttggtcacaacaatcatattcacgtaattttccccctttggtggcagaactgtagcaatagggggagaagacaagcagcggatgaagcgttttctcagcttttggaattgcttcgacctgacatccgttgtaaccgtttgccacttcttcagatatttttataaaaaagtaccactgagtcagtgagggccacagattggtattaatgagatacgagggttgttgctgggtgtttgtttcctgagctaagtgatcaagactgtagtggagttgcagctaacatgggttaggtttaaaccgtgggggatgcaacccctttgcgtttcatatgtaggcctactggctttgtgtagctggagtagttgggttgctttgtgttaggaggatccagatcatgttggctacagggagatgctctctttgagaggctcctgggcattgattccatttcaatctcattctggatatgtgttcattgagtaaaggaggagagaccctcatacgctatttaaatgtcacttttttgcctatnccccgttttttggtcatgtttcaattaattgtgaggaaggcgcagctcctctctgcacgtagatcattttttaaagctaatgtaagcacatctaagggaataacatgatttaaggttgaaatggctttagaatcatttgggtttgagggtgtgttattttgagtcatgaatgtacaagctctgtgaatcagaccagcttaaatacccacacctttttttcgtaggtgggcttttcctatcagagcttggctcataaccaaataaagttttttgaaggccatggcttttcacacagttattttattttatgacgttatctgaaagcagactgttaggagcagtattgagtggctgtcacactttgaggcaactaaaaaggcttcaaacgttttgatcagtttcttttcaggaaacattgtgctctaacagtatgactattctttcccccactcttaaacagtgtgatgtgtgttat

SEQ ID NO: 421080 - DNA, 822 bp, Homo sapiens
ctgagtggtgtcaagcaacaaagatttaatatcttctagttctaggtcagaagtctgaaatggctttcactgagctgaagtcaaggtgtttgcagtgctggatcatttctggatgcagtgggaggatctattccttgccttatgcagtttttagaggctccttaccctccttgtcttatgccactttatcccctttaaagcctgcagtggctgttgagtctttctcacatctcatcatgctggcactgaccctcttgcctccgtctgcccccctccctctgctgtgactgccttgggcccacctgggtaatccaggatcatcccccaatttaaaggtcagctgatgagcaaccttaattccatctgcaccttaattcccccttgccgtgtaacctcacgtattcacaggttctgggggattggcgcatggatgtctttgggggccattattctgctcaccacaaccacctttttgtagtttcataggtggttgaaatgaaagctgttgtcttgtatttttgcctcctagagatttttgctgtgagaattaattaccagtaacagttcaatatgggggacattctggctcatgaatctgaattacttggactagtgaaagaggtaggtatattatacaaagcagaggtcacagagaaacagatcttgaaaacttgtgttttaaaatgcaacaaactatttagtgccttgtaatgtttcttctattgttatgttggagctatttttctattatataatattccatgtatttacattttggttttataactaaacaaatcttaaagccacttaaaaagtcccttg

SEQ ID NO: 421081 - DNA, 2777 bp, Homo sapiens
tttacagtgattgaacattcagatggaagaccagacacacaagtacctcgggacatccatcaccagcatcaaatcaaagtgaaacccaggaggagagcctccatcctgtcttcatcctcaagtggaaattaatagcagagtacaaattgttgctagtgtatcagttcttaagatgtgtgaaatggcattgccaccatctttatttagattattggtttccttgttctatttcagtaaacttgaaaacatctctgtgggttttcacacgtccaagtccaatcacagtcttctagcacaatttttccagtaaagttttaaggtcttcaagtattaaaattcaagtatattttagcgacctaaccccacaggtggggaaggactattctggcaaagcctaaaggaaaattccagctggtgacattgacaacgccgggtgagctgccaacagcaacagcagagagatttgtcccctggcttgggcctggaccacaatgccagccctcagggaggggaaccagcaccagagagacaacaggggcaccagccaggtcactgggcaggagcaaggcagagcccccgggaaaggaatgatactggccattctagccccacgtgtgttagatatcggagtgcgggcacctcatggagtgtggaccaactcagggaacaggatgggagatagtcatcccagaaaggagctgaggtctacaaggcacttcacttctcaggacaggattattctgggtagtgggatgagtctgagccagcaggccttgaggttatggggtcaggagaaggggagctgggcaggaggaggcagagaaagagaagcgtggctgggctgtctgtggccttacaaaatagccaagagtcttaaaaaaggcatttctgtattcgaaaatgagcggtttataactgatgagtacagcagcacttcctgaaggtggaatggtgtatgctgttggtggatagggaagttagtcattaaacttcagccagaaagcagagtggcatcacatcttcatgcctgcacagtagctttctagactaaatggcattccacaacagtgctgcgacccgtggggcatgcaagcctcagtgagcagggggacactttggtgtcccactggcctcggtccagtgaagtcagtggagtccttccctttagaacgagcgttgggttgagaacatgggtttctacatcttccctcctgggaatggtttggtgtttgatcaaatgtgggtgcaccctgcctgccactttacaagctgggtgctctcctcaagtatggctttagttccttcttttctcctacttcccatttgacttcctttcttctttcaggctttctttaccttcatgtcatttgttcaagaaacaagtgataataagaaagatgtagtagggatagagggaggagtaagtcagctgctctgtccccagggactcacagttcagtgcagtgggtgagagacgagtcagtaagcattcattcattagtaagcagcaatcttccagaagtggcgtgaactgtcaggagttctagataaaacgctgagtgtgttcggggaggaagagatggctgctgagcaaggggatcagggaagacttcgtggaggagaaagtaccaacacctctgcagtgcctgcttcttacctggccctaagccgggcgcttcccttgtggtgtattgtgaggtcctaccgacaaccctgagaagtggctggtacaacccccattctacagaggaggaagccggggctctttctttctgtaactcctttgtgctaccaacttactgctcttttgtaaattcttaaaaagacctagcgatgaaccacagagccttcaggaaccctacctgccatgaccaccacccataccgcccgtggaaaaatcatggagtttagagatagactcggcttgaatctcagctgcctgccacttactggaagtgagaccaagaagtctctctttcctctctgtgcctctctgtaaaatgggggatgatagtcaacaacatatttgtaaggattaagtgaaataacgggtatggcagaatctagcatgatgccttgaaataaatatttacttacttttccctaaattcccctaaaattatatgctggcttttaattttccccatgctactataatcatgttctggtaaaaatggagagatttactatttaaaattgcttaggatgatctcagacagtgactgaaatggttgtgattaggatggttaggagcatgatgactttgatgtaacctcattctcattaaggtgtttatgtctctgcaaaggctgacagattctgtggccaaggctcccactgtttatccattattcattgattctttttttctttatagaagagctaccagatggtgttcttgaatctgatgatgatgaagatgaagatgatgaagaggaccatgacatcatggaagccgatctggacaaagacgaactgatccagccccagcttggagaactctcaggagagaagcttctgaccacagagtacctggggatcatgaccaacacggggaagacaaggcggaaggggctggctaatgtgcagtggagcggggatgagcccctgcaaaggcccgtcacccccggcggccacagaaacgggtacccagtgtaagtcagggctaaaggaagcgggaattgactttcttaagctttgttttgattacagtgtaagatgtatgtatttttaaaattcaaaataaagcattcattttgaaaagcataatctcttta

SEQ ID NO: 421082 - DNA, 1089 bp, Homo sapiens
gaggtggcggccgggctgggatagcgcgagtgtccgcggccgagcagcagagatttttgctgtgagaattaattaccagtaacagttcaatatgggggacattctggctcatgaatctgaattacttggactagtgaaagagtatttagattttgctgaatttgaagacaccttgaaaacattttcaaaagaatgcaaaataaaaggaaaaccactgtgtaaaacagtaggcggatctttcagagactccaaatcattgacaattcagaaggatcttgtcgctgcatttgacaacggagaccagaaggtgttcttcgatctgtgggaggagcacatttcaagttccatccgagatggggactcctttgcccagaagctggaattctatctccacatccattttgccatctatcttttgaagtactctgtggggagaccggacaaagaggagctggatgaaaagatttcctacttcaaaacctacctggagaccaaaggggcagccttgagccagaccacagagtttcttcctttctatgcccttccttttgttcccaaccctatggtgcacccctcatttaaagaactcttccaggattcctggactccagagttaaagttgaagttggaaaagtttctagctttaatatctaaagccagcaacacgccaaagcttttaacaatatataaggagaatggacaaagtaacaaagaaatcttgcagcagctccaccagcagctggttgaagctgaacgtaggtcagtgacatacctcaaacggtacaataagatccaggccgactaccacaatctcattggagtcacagcagagctggtggattctctagaggccacagtcagcggcaagatgatcacccctgagtacctccagagcgtctgtgtccgcctgttcagtaaccagatgcggcagagcctggcgcatagtgtggacttcacgaggcctgggacggtgaggctctgcgctcagggcagggtgcccgtggtctatccccccaaatttaaaaagaatgtaactttaaaaatagcatgaaaaaataacatgcaagaggctgcatttaagctggcatt

SEQ ID NO: 421083 - DNA, 2235 bp, Homo sapiens
ctctgtccccttccagcctctgccaattgatagcccctccacctccacgccccaactgagctgaacctttctagagggctttaccaaggagggctggggagagcctggcattgccctcctggagaggggaatttcctgctcacccttcacacacagaggagaggggtggcttttgcccgcaggagatcttctggccccagaaacagcaggtgctggatttgcagccctggccctccaggccccaacagggcgacagtgtagggccagcctggagcagggcttttccaaggctgctgaagccagccctcctcacttgggctgactaccaggacccagaaggaactcagggtgaagctcattttattctcaagcctgcgtctcagcagcaaagttggtgttttcttcctgtgttaaaatctgagaaagaaggccaggtgcggtggctcacgcctgtaattccaggactttggaaggctgaggcgggcagatcacgaggtcaggagatcgagaccatcctggctaacgtggtgaaaccccgtctctactaaaaaaatacaaaaaaattagccgggcgtggtggcgggcgcttgtagtcccagctactctggaggctgaggcaggagaatggcgtgaacccgggaggcggagcttgcagtgagccgagatcgtgccactgcactctagcctgggtgacagagcgagactccgtccccaaaaaaaaaattctgagaatatggtgtgttccagcctcttcaaagctctgctcttctgcacacgttttttgaaggccttaaaaaggccaccagtgtgaccagggagcaccctctgcctccctccctgcactgggaccataaacataaacagctctaccagcaaagtgacccatcccgcgggggaggcctgcgcacgcccctcaccagggctgtcatcagaatccagtcttaggacagaggaaggatgtttgccttcaggaccagcaagtcacaggtgtcctggatgttacccaagctctaaaatcaaataaaacccatcagtatttagtggtgtgtgtgtgtgtgtgtgtgtgtgtgtgtgtgtgtgtgtgtgtgtgtgtgtatgagtgtatgaagggaaatggaaagcagagaaaagtcgcgtgccctcccccaggcacctgatctgcccacagacccttcaatggggacatctctggtcccaatggtcgtaaataaaggctaagcgctggatttttccatggccccctgactcctcaggagcgcaggcagaggaggtaaacaggaggccaggttacccatgagatgaccagaagctcatccagggccgggaccctggttcatctcgtgaattcttggcagcggctccaggctgggcacattagatgctgtcatgtgactggcctggtggccacctcttggttctctggaaatgtgtccactctgtgctcagggaagaaggctgccgtcctgacctgtcagccaccaggccctctctgaactcctcacttgacccggaggcattgggagcaaacacaaagctcgcccctggtgtcagtggtgcagacagaggaaaagcagagggtccgcaaaatgcaactcctccgtggtgagactttgaaaaggtgtagagtggttgcagacaaacagcaaaggagtggaatggaaaaatctctcttgctccccacaagaagtccactcccctacggattcctcagatgccactggctggcacagcctttcccgcccttggtgtgggagcagcagaagtccagcgggggtgggagaatcatcggggtcaggtcagtgtctccctcgtctgaagtcaaccactacttttccctcaagcctaccaaagagctaaagtctgatctgtagatgtctgatggtttgaggagaagaaaagatagtcttttagagaagtggggagtatccaacttagggtcaaaatacactgagattaggccgggcacagtggctcacacctgtaatcccagtgctttgggaggccgaggcggatggatcacttgaggcctccaggagttcgagaccagcctggccaacatggcgaaaccccgtctctactaaaatacaaaaaattagctggatgtggtggtgggtgcctgtaatctcagctactcaaggaggctgaggcacaagaatagcttgaaccgggagatggaagatgcagtgagccaagatcacgcccctgcactccagcctgggcgacagagactccgtc

SEQ ID NO: 421084 - DNA, 477 bp, Homo sapiens
caaagtcctttcggatcttcttggccatgaaaaccatgagatacagccgtatgtgaatggagctctgtacagcatcctttctgttccaccagggagaatgttcttggggccctgcagaagttcagtctcaggcgcccgctgcagacagcgatgattcaagacggcctcatcttctggctggttgatgttctgaaggaccctgactgcctgtctgactacacgctggagtactcggtggatcatgaccaacacggggaagacaaggcggaaggggctggctaatgtgcagtggagcggggatgagcccctgcaaaggcccgtcacccccggcggccacagaaacgggtacccagtgtaagtcagggctaaaggaagcgggaattgactttcttaagctttgttttgattacagtgtaagatgtatgtatttttaaaattcaaaataaagcattcattttgaaaagcataatctcttta

SEQ ID NO: 421085 - DNA, 2348 bp, Homo sapiens
tgggaggagcagcggtgcgtttggagggccgaggctctgcggacctcttgttccgaggaaaaacccgacgcgcccgctccgccgccgccggatgctaccacttctcgcctgcggtccagggatctttcttcggcaagggccgaggcggccgcctggacatcccaagaaaggacaggcccagctgcttcccagatttttgctgtgagaattaattaccagtaacagttcaatatgggggacattctggctcatgaatctgaattacttggactagtgaaagagtatttagattttgctgaatttgaagacaccttgaaaacattttcaaaagaatgcaaaataaaaggaaaaccactgtgtaaaacagtaggcggatctttcagagactccaaatcattgacaattcagaaggatcttgtcgctgcatttgacaacggagaccagaaggtgttcttcgatctgtgggaggagcacatttcaagttccatccgagatggggactcctttgcccagaagctggaattctatctccacatccattttgccatctatcttttgaagtactctgtggggagaccggacaaagaggagctggatgaaaagatttcctacttcaaaacctacctggagaccaaaggggcagccttgagccagaccacagagtttcttcctttctatgcccttccttttgttcccaaccctatggtgcacccctcatttaaagaactcttccaggattcctggactccagagttaaagttgaagttggaaaagtttctagctttaatatctaaagccagcaacacgccaaagcttttaacaatatataaggagaatggacaaagtaacaaagaaatcttgcagcagctccaccagcagctggttgaagctgaacgtaggtcagtgacatacctcaaacggtacaataagatccaggccgactaccacaatctcattggagtcacagcagagctggtggattctctagaggccacagtcagcggcaagatgatcacccctgagtacctccagagcgtctgtgtccgcctgttcagtaaccagatgcggcagagcctggcgcatagtgtggacttcacgaggcctgggacggcatccaccatgttacgagcctccttggcacccgtgaaattgaaggatgtcccattactgccctccttggattatgagaaactgaagaaggatttgattttggggagtgaccgcttgaaagccttcttgttgcaggctctgcgctggcgcttgaccacatcccatcctggagagcagagggagaccgttctgcaagcctacatcagcaatgacctcttggactgttatagccacaaccagaggagtgtgcttcagttgctgcactccacgagcgacgtggtgcggcagtacatggccaggctcatcaatgcttttgcgtcactggcagaaggtcgcctctaccttgcccagaacacaaaggtgctgcagatgctggagggaaggctgaaggaggaggacaaggatatcatcaccagggagaatgttcttggggccctgcagaagttcagtctcaggcgcccgctgcagacagcgatgattcaagacggcctcatcttctggctggttgatgttctgaaggaccctgactgcctgtctgactacacgctggagtactcggtggctttgctcatgaacctctgcctccgcagcacagggaagaacatgtgtgccaaggtggcaggcctcgtgctcaaagtcctttcggatcttcttggccatgaaaaccatgagatacagccgtatgtgaatggagctctgtacagcatcctttctgttccatccattcgtgaggaagcaagagcaatgggaatggaagacatcctacgctgcttcatcaaagaaggcaatgctgaaatgatccgccagatagaattcatcatcaagcagctaaattccgaagagctaccagatggtgttcttgaatctgatgatgatgaagatgaagatgatgaagaggaccatgacatcatggaagccgatctggacaaagacgaactgatccagccccagcttggagaactctcaggagagaagcttctgaccacagagtacctggggatcatgaccaacacggggaagacaaggcggaaggggctggctaatgtgcagtggagcggggatgagcccctgcaaaggcccgtcacccccggcggccacagaaacgggtacccagtgtaagtcagggctaaaggaagcgggaattgactttcttaagctttgttttgattacagtgtaagatgtatgtatttttaaaattcaaaataaagcattcattttgaaaagcataatctcttta

SEQ ID NO: 421086 - DNA, 2687 bp, Homo sapiens
ctgagtggtgtcaagcaacaaagatttaatatcttctagttctaggtcagaagtctgaaatggctttcactgagctgaagtcaaggtgtttgcagtgctggatcatttctggatgcagtgggaggatctattccttgccttatgcagtttttagaggctccttaccctccttgtcttatgccactttatcccctttaaagcctgcagtggctgttgagtctttctcacatctcatcatgctggcactgaccctcttgcctccgtctgcccccctccctctgctgtgactgccttgggcccacctgggtaatccaggatcatcccccaatttaaaggtcagctgatgagcaaccttaattccatctgcaccttaattcccccttgccgtgtaacctcacgtattcacaggttctgggggattggcgcatggatgtctttgggggccattattctgctcaccacaaccacctttttgtagtttcataggtggttgaaatgaaagctgttgtcttgtatttttgcctcctagagatttttgctgtgagaattaattaccagtaacagttcaatatgggggacattctggctcatgaatctgaattacttggactagtgaaagagtatttagattttgctgaatttgaagacaccttgaaaacattttcaaaagaatgcaaaataaaaggaaaaccactgtgtaaaacagtaggcggatctttcagagactccaaatcattgacaattcagaaggatcttgtcgctgcatttgacaacggagaccagaaggtgttcttcgatctgtgggaggagcacatttcaagttccatccgagatggggactcctttgcccagaagctggaattctatctccacatccattttgccatctatcttttgaagtactctgtggggagaccggacaaagaggagctggatgaaaagatttcctacttcaaaacctacctggagaccaaaggggcagccttgagccagaccacagagtttcttcctttctatgcccttccttttgttcccaaccctatggtgcacccctcatttaaagaactcttccaggattcctggactccagagttaaagttgaagttggaaaagtttctagctttaatatctaaagccagcaacacgccaaagcttttaacaatatataaggagaatggacaaagtaacaaagaaatcttgcagcagctccaccagcagctggttgaagctgaacgtaggtcagtgacatacctcaaacggtacaataagatccaggccgactaccacaatctcattggagtcacagcagagctggtggattctctagaggccacagtcagcggcaagatgatcacccctgagtacctccagagcgtctgtgtccgcctgttcagtaaccagatgcggcagagcctggcgcatagtgtggacttcacgaggcctgggacggcatccaccatgttacgagcctccttggcacccgtgaaattgaaggatgtcccattactgccctccttggattatgagaaactgaagaaggatttgattttggggagtgaccgcttgaaagccttcttgttgcaggctctgcgctggcgcttgaccacatcccatcctggagagcagagggagaccgttctgcaagcctacatcagcaatgacctcttggactgttatagccacaaccagaggagtgtgcttcagttgctgcactccacgagcgacgtggtgcggcagtacatggccaggctcatcaatgcttttgcgtcactggcagaaggtcgcctctaccttgcccagaacacaaaggtgctgcagatgctggagggaaggctgaaggaggaggacaaggatatcatcaccagggagaatgttcttggggccctgcagaagttcagtctcaggcgcccgctgcagacagcgatgattcaagacggcctcatcttctggctggttgatgttctgaaggaccctgactgcctgtctgactacacgctggagtactcggtggctttgctcatgaacctctgcctccgcagcacagggaagaacatgtgtgccaaggtggcaggcctcgtgctcaaagtcctttcggatcttcttggccatgaaaaccatgagatacagccgtatgtgaatggagctctgtacagcatcctttctgttccatccattcgtgaggaagcaagagcaatgggaatggaagacatcctacgctgcttcatcaaagaaggcaatgctgaaatgatccgccagatagaattcatcatcaagcagctaaattccgaagagctaccagatggtgttcttgaatctgatgatgatgaagatgaagatgatgaagaggaccatgacatcatggaagccgatctggacaaagacgaactgatccagccccagcttggagaactctcaggagagaagcttctgaccacagagtacctggggatcatgaccaacacggggaagacaaggcggaaggggctggctaatgtgcagtggagcggggatgagcccctgcaaaggcccgtcacccccggcggccacagaaacgggtacccagtgtaagtcagggctaaaggaagcgggaattgactttcttaagctttgttttgattacagtgtaagatgtatgtatttttaaaattcaaaataaagcattcattttgaaaagcataatctcttta

SEQ ID NO: 421087 - DNA, 2208 bp, Homo sapiens
gaggtggcggccgggctgggatagcgcgagtgtccgcggccgagcagcagagatttttgctgtgagaattaattaccagtaacagttcaatatgggggacattctggctcatgaatctgaattacttggactagtgaaagagtatttagattttgctgaatttgaagacaccttgaaaacattttcaaaagaatgcaaaataaaaggaaaaccactgtgtaaaacagtaggcggatctttcagagactccaaatcattgacaattcagaaggatcttgtcgctgcatttgacaacggagaccagaaggtgttcttcgatctgtgggaggagcacatttcaagttccatccgagatggggactcctttgcccagaagctggaattctatctccacatccattttgccatctatcttttgaagtactctgtggggagaccggacaaagaggagctggatgaaaagatttcctacttcaaaacctacctggagaccaaaggggcagccttgagccagaccacagagtttcttcctttctatgcccttccttttgttcccaaccctatggtgcacccctcatttaaagaactcttccaggattcctggactccagagttaaagttgaagttggaaaagtttctagctttaatatctaaagccagcaacacgccaaagcttttaacaatatataaggagaatggacaaagtaacaaagaaatcttgcagcagctccaccagcagctggttgaagctgaacgtaggtcagtgacatacctcaaacggtacaataagatccaggccgactaccacaatctcattggagtcacagcagagctggtggattctctagaggccacagtcagcggcaagatgatcacccctgagtacctccagagcgtctgtgtccgcctgttcagtaaccagatgcggcagagcctggcgcatagtgtggacttcacgaggcctgggacggcatccaccatgttacgagcctccttggcacccgtgaaattgaaggatgtcccattactgccctccttggattatgagaaactgaagaaggatttgattttggggagtgaccgcttgaaagccttcttgttgcaggctctgcgctggcgcttgaccacatcccatcctggagagcagagggagaccgttctgcaagcctacatcagcaatgacctcttggactgttatagccacaaccagaggagtgtgcttcagttgctgcactccacgagcgacgtggtgcggcagtacatggccaggctcatcaatgcttttgcgtcactggcagaaggtcgcctctaccttgcccagaacacaaaggtgctgcagatgctggagggaaggctgaaggaggaggacaaggatatcatcaccagggagaatgttcttggggccctgcagaagttcagtctcaggcgcccgctgcagacagcgatgattcaagacggcctcatcttctggctggttgatgttctgaaggaccctgactgcctgtctgactacacgctggagtactcggtggctttgctcatgaacctctgcctccgcagcacagggaagaacatgtgtgccaaggtggcaggcctcgtgctcaaagtcctttcggatcttcttggccatgaaaaccatgagatacagccgtatgtgaatggagctctgtacagcatcctttctgttccatccattcgtgaggaagcaagagcaatgggaatggaagacatcctacgctgcttcatcaaagaaggcaatgctgaaatgatccgccagatagaattcatcatcaagcagctaaattccgaagagctaccagatggtgttcttgaatctgatgatgatgaagatgaagatgatgaagaggaccatgacatcatggaagccgatctggacaaagacgaactgatccagccccagcttggagaactctcaggagagaagcttctgaccacagagtacctggggatcatgaccaacacggggaagacaaggcggaaggggctggctaatgtgcagtggagcggggatgagcccctgcaaaggcccgtcacccccggcggccacagaaacgggtacccagtgtaagtcagggctaaaggaagcgggaattgactttcttaagctttgttttgattacagtgtaagatgtatgtatttttaaaattcaaaataaagcattcattttgaaaagcataatctcttta

SEQ ID NO: 421088 - DNA, 5043 bp, Homo sapiens
tgggaggagcagcggtgcgtttggagggccgaggctctgcggacctcttgttccgaggaaaaacccgacgcgcccgctccgccgccgccggatgctaccacttctcgcctgcggtccagggatctttcttcggcaagggccgaggcggccgcctggacatcccaagaaaggacaggcccagctgcttcccagatttttgctgtgagaattaattaccagtaacagttcaatatgggggacattctggctcatgaatctgaattacttggactagtgaaagagtatttagattttgctgaatttgaagacaccttgaaaacattttcaaaagaatgcaaaataaaaggaaaaccactgtgtaaaacagtaggcggatctttcagagactccaaatcattgacaattcagaaggatcttgtcgctgcatttgacaacggagaccagaaggtgttcttcgatctgtgggaggagcacatttcaagttccatccgagatggggactcctttgcccagaagctggaattctatctccacatccattttgccatctatcttttgaagtactctgtggggagaccggacaaagaggagctggatgaaaagatttcctacttcaaaacctacctggagaccaaaggggcagccttgagccagaccacagagtttcttcctttctatgcccttccttttgttcccaaccctatggtgcacccctcatttaaagaactcttccaggattcctggactccagagttaaagttgaagttggaaaagtttctagctttaatatctaaagccagcaacacgccaaagcttttaacaatatataaggagaatggacaaagtaacaaagaaatcttgcagcagctccaccagcagctggttgaagctgaacgtaggtcagtgacatacctcaaacggtacaataagatccaggccgactaccacaatctcattggagtcacagcagagctggtggattctctagaggccacagtcagcggcaagatgatcacccctgagtacctccagagcgtctgtgtccgcctgttcagtaaccagatgcggcagagcctggcgcatagtgtggacttcacgaggcctgggacggcatccaccatgttacgagcctccttggcacccgtgaaattgaaggatgtcccattactgccctccttggattatgagaaactgaagaaggatttgattttggggagtgaccgcttgaaagccttcttgttgcaggctctgcgctggcgcttgaccacatcccatcctggagagcagagggagaccgttctgcaagcctacatcagcaatgacctcttggactgttatagccacaaccagaggagtgtgcttcagttgctgcactccacgagcgacgtggtgcggcagtacatggccaggctcatcaatgcttttgcgtcactggcagaaggtcgcctctaccttgcccagaacacaaaggtgctgcagatgctggagggaaggctgaaggaggaggacaaggatatcatcaccagggagaatgttcttggggccctgcagaagttcagtctcaggcgcccgctgcagacagcgatgattcaagacggcctcatcttctggctggttgatgttctgaaggaccctgactgcctgtctgactacacgctggagtactcggtggctttgctcatgaacctctgcctccgcagcacagggaagaacatgtgtgccaaggtggcaggcctcgtgctcaaagtcctttcggatcttcttggccatgaaaaccatgagatacagccgtatgtgaatggagctctgtacagcatcctttctgttccatccattcgtgaggaagcaagagcaatgggaatggaagacatcctacgctgcttcatcaaagaaggcaatgctgaaatgatccgccagatagaattcatcatcaagcagctaaattccgaagagctaccagatggtgttcttgaatctgatgatgatgaagatgaagatgatgaagaggaccatgacatcatggaagccgatctggacaaagacgaactgatccagccccagcttggagaactctcaggagagaagcttctgaccacagagtacctggggatcatgaccaacacggggaagacaaggcggaaggggctggctaatgtgcagtggagcggggatgagcccctgcaaaggcccgtcacccccggcggccacagaaacgggtacccagtggtggaagaccaacacacacctccccagacagcccagcacgccagaaacggccacccgcaggccctgccagccgctcacgaggctgtctacagggagggcaagcccagcaccccggagtcctgcgtctcctcttcatcagccatcatcgccaagccaggagagtggctcccaagaggacgccaggaagagcctcgcccagcccccacgggaccccccgccagccaagggaggcgccccaggacccaggcaatggagtgaccaccagggaatgtgcatcagccttcacctgcaagccccgggccccctgcactccagagatgctggactggaacccacccaaggcaaaggcgtcagttctggcccctctgttctcttcgtgtggcccccagcaggccagccgccccggctccacagcgtcctccacaaggggcctgccgagcagccagtctcacaggaagtaaggatgtccccgggtgtccccatcacgttgccggaggaccagccagcttcccgctctcagctggcagcagctgccggtgatggatgtgaagggacagttgtccacaagactctgggagctgaggggaggccggctctccaggcagcaccagagcaaggccatcgcagccccgccagccgggtcactttctcccagggcagagccaccaaggagggctggggagagcctggcattgccctcctggagaggggaatttcctgctcacccttcacacacagaggagaggggtggcttttgcccgcaggagatcttctggccccagaaacagcaggtgctggatttgcagccctggccctccaggccccaacagggcgacagtgtagggccagcctggagcagggcttttccaaggctgctgaagccagccctcctcacttgggctgactaccaggacccagaaggaactcagggtgaagctcattttattctcaagcctgcgtctcagcagcaaagttggtgttttcttcctgtgttaaaatctgagaaagaaggccaggtgcggtggctcacgcctgtaattccaggactttggaaggctgaggcgggcagatcacgaggtcaggagatcgagaccatcctggctaacgtggtgaaaccccgtctctactaaaaaaatacaaaaaaattagccgggcgtggtggcgggcgcttgtagtcccagctactctggaggctgaggcaggagaatggcgtgaacccgggaggcggagcttgcagtgagccgagatcgtgccactgcactctagcctgggtgacagagcgagactccgtccccaaaaaaaaaattctgagaatatggtgtgttccagcctcttcaaagctctgctcttctgcacacgttttttgaaggccttaaaaaggccaccagtgtgaccagggagcaccctctgcctccctccctgcactgggaccataaacataaacagctctaccagcaaagtgacccatcccgcgggggaggcctgcgcacgcccctcaccagggctgtcatcagaatccagtcttaggacagaggaaggatgtttgccttcaggaccagcaagtcacaggtgtcctggatgttacccaagctctaaaatcaaataaaacccatcagtatttagtggtgtgtgtgtgtgtgtgtgtgtgtgtgtgtgtgtgtgtgtgtgtgtgtgtgtatgagtgtatgaagggaaatggaaagcagagaaaagtcgcgtgccctcccccaggcacctgatctgcccacagacccttcaatggggacatctctggtcccaatggtcgtaaataaaggctaagcgctggatttttccatggccccctgactcctcaggagcgcaggcagaggaggtaaacaggaggccaggttacccatgagatgaccagaagctcatccagggccgggaccctggttcatctcgtgaattcttggcagcggctccaggctgggcacattagatgctgtcatgtgactggcctggtggccacctcttggttctctggaaatgtgtccactctgtgctcagggaagaaggctgccgtcctgacctgtcagccaccaggccctctctgaactcctcacttgacccggaggcattgggagcaaacacaaagctcgcccctggtgtcagtggtgcagacagaggaaaagcagagggtccgcaaaatgcaactcctccgtggtgagactttgaaaaggtgtagagtggttgcagacaaacagcaaaggagtggaatggaaaaatctctcttgctccccacaagaagtccactcccctacggattcctcagatgccactggctggcacagcctttcccgcccttggtgtgggagcagcagaagtccagcgggggtgggagaatcatcggggtcaggtcagtgtctccctcgtctgaagtcaaccactacttttccctcaagcctaccaaagagctaaagtctgatctgtagatgtctgatggtttgaggagaagaaaagatagtcttttagagaagtggggagtatccaacttagggtcaaaatacactgagattaggccgggcacagtggctcacacctgtaatcccagtgctttgggaggccgaggcggatggatcacttgaggcctccaggagttcgagaccagcctggccaacatggcgaaaccccgtctctactaaaatacaaaaaattagctggatgtggtggtgggtgcctgtaatctcagctactcaaggaggctgaggcacaagaatagcttgaaccgggagatggaagatgcagtgagccaagatcacgcccctgcactccagcctgggcgacagagactccgtc

SEQ ID NO: 421089 - DNA, 1229 bp, Homo sapiens
tgggaggagcagcggtgcgtttggagggccgaggctctgcggacctcttgttccgaggaaaaacccgacgcgcccgctccgccgccgccggatgctaccacttctcgcctgcggtccagggatctttcttcggcaagggccgaggcggccgcctggacatcccaagaaaggacaggcccagctgcttcccagatttttgctgtgagaattaattaccagtaacagttcaatatgggggacattctggctcatgaatctgaattacttggactagtgaaagagtatttagattttgctgaatttgaagacaccttgaaaacattttcaaaagaatgcaaaataaaaggaaaaccactgtgtaaaacagtaggcggatctttcagagactccaaatcattgacaattcagaaggatcttgtcgctgcatttgacaacggagaccagaaggtgttcttcgatctgtgggaggagcacatttcaagttccatccgagatggggactcctttgcccagaagctggaattctatctccacatccattttgccatctatcttttgaagtactctgtggggagaccggacaaagaggagctggatgaaaagatttcctacttcaaaacctacctggagaccaaaggggcagccttgagccagaccacagagtttcttcctttctatgcccttccttttgttcccaaccctatggtgcacccctcatttaaagaactcttccaggattcctggactccagagttaaagttgaagttggaaaagtttctagctttaatatctaaagccagcaacacgccaaagcttttaacaatatataaggagaatggacaaagtaacaaagaaatcttgcagcagctccaccagcagctggttgaagctgaacgtaggtcagtgacatacctcaaacggtacaataagatccaggccgactaccacaatctcattggagtcacagcagagctggtggattctctagaggccacagtcagcggcaagatgatcacccctgagtacctccagagcgtctgtgtccgcctgttcagtaaccagatgcggcagagcctggcgcatagtgtggacttcacgaggcctgggacggtgaggctctgcgctcagggcagggtgcccgtggtctatccccccaaatttaaaaagaatgtaactttaaaaatagcatgaaaaaataacatgcaagaggctgcatttaagctggcatt

SEQ ID NO: 421090 - DNA, 1152 bp, Homo sapiens
tgggaggagcagcggtgcgtttggagggccgaggctctgcggacctcttgttccgaggaaaaacccgacgcgcccgctccgccgccgccggatgctaccacttctcgcctgcggtccagggatctttcttcggcaagggccgaggcggccgcctggacatcccaagaaaggacaggcccagctgcttcccagatttttgctgtgagaattaattaccagtaacagttcaatatgggggacattctggctcatgaatctgaattacttggactagtgaaagagtatttagattttgctgaatttgaagacaccttgaaaacattttcaaaagaatgcaaaataaaaggaaaaccactgtgtaaaacagtaggcggatctttcagagactccaaatcattgacaattcagaaggatcttgtcgctgcatttgacaacggagaccagaaggtgttcttcgatctgtgggaggagcacatttcaagttccatccgagatggggactcctttgcccagaagctggaattctatctccacatccattttgccatctatcttttgaagtactctgtggggagaccggacaaagaggagctggatgaaaagatttcctacttcaaaacctacctggagaccaaaggggcagccttgagccagaccacagagtttcttcctttctatgcccttccttttgttcccaaccctatggtgcacccctcatttaaagaactcttccaggattcctggactccagagttaaagttgaagttggaaaagtttctagctttaatatctaaagccagcaacacgccaaagcttttaacaatatatcagggagaatgttcttggggccctgcagaagttcagtctcaggcgcccgctgcagacagcgatgattcaagacggcctcatcttctggctggttgatgttctgaaggaccctgactgcctgttggctaatgtgcagtggagcggggatgagcccctgcaaaggcccgtcacccccggcggccacagaaacgggtacccagtgtaagtcagggctaaaggaagcgggaattgactttcttaagctttgttttgattacagtgtaagatgtatgtatttttaaaattcaaaataaagcattcattttgaaaagcataatctcttta

SEQ ID NO: 421091 - DNA, 1318 bp, Homo sapiens
ctgagtggtgtcaagcaacaaagatttaatatcttctagttctaggtcagaagtctgaaatggctttcactgagctgaagtcaaggtgtttgcagtgctggatcatttctggatgcagtgggaggatctattccttgccttatgcagtttttagaggctccttaccctccttgtcttatgccactttatcccctttaaagcctgcagtggctgttgagtctttctcacatctcatcatgctggcactgaccctcttgcctccgtctgcccccctccctctgctgtgactgccttgggcccacctgggtaatccaggatcatcccccaatttaaaggtcagctgatgagcaaccttaattccatctgcaccttaattcccccttgccgtgtaacctcacgtattcacaggttctgggggattggcgcatggatgtctttgggggccattattctgctcaccacaaccacctttttgtagtttcataggtggttgaaatgaaagctgttgtcttgtatttttgcctcctagagatttttgctgtgagaattaattaccagtaacagttcaatatgggggacattctggctcatgaatctgaattacttggactagtgaaagagtatttagattttgctgaatttgaagacaccttgaaaacattttcaaaagaatgcaaaataaaaggaaaaccactgtgtaaaacagtaggcggatctttcagagactccaaatcattgacaattcagaaggatcttgtcgctgcatttgacaacggagaccagaaggtgttcttcgatctgtgggaggagcacatttcaagttccatccgagatggggactcctttgcccagaagctggaattctatctccacatccattttgccatctatcttttgaagtactctgtggggagaccgaagagctaccagatggtgttcttgaatctgatgatgatgaagatgaagatgatgaagaggaccatgacatcatggaagccgatctggacaaagacgaactgatccagccccagcttggagaactctcaggagagaagcttctgaccacagagtacctggggatcatgaccaacacggggaagacaaggcggaaggggctggctaatgtgcagtggagcggggatgagcccctgcaaaggcccgtcacccccggcggccacagaaacgggtacccagtgtaagtcagggctaaaggaagcgggaattgactttcttaagctttgttttgattacagtgtaagatgtatgtatttttaaaattcaaaataaagcattcattttgaaaagcataatctcttta

SEQ ID NO: 421092 - DNA, 2517 bp, Homo sapiens
ccccaggtcaaacagaagcgggtgtctgctcgcaggctggatggaggggccgccagaagggcctgaagatgggatgggcccaagggcccccactctctccctggggcctctctctcaccctctcacctgaggctcactgcagccagtctcacaggaagtaaggatgtccccgggtgtccccatcacgttgccggaggaccagccagcttcccgctctcagctggcagcagctgccggtgatggatgtgaagggacagttgtccacaagactctgggagctgaggggaggccggctctccaggcagcaccagagcaaggccatcgcagccccgccagccgggtcactttctcccagggcagagccaccaaggagggctggggagagcctggcattgccctcctggagaggggaatttcctgctcacccttcacacacagaggagaggggtggcttttgcccgcaggagatcttctggccccagaaacagcaggtgctggatttgcagccctggccctccaggccccaacagggcgacagtgtagggccagcctggagcagggcttttccaaggctgctgaagccagccctcctcacttgggctgactaccaggacccagaaggaactcagggtgaagctcattttattctcaagcctgcgtctcagcagcaaagttggtgttttcttcctgtgttaaaatctgagaaagaaggccaggtgcggtggctcacgcctgtaattccaggactttggaaggctgaggcgggcagatcacgaggtcaggagatcgagaccatcctggctaacgtggtgaaaccccgtctctactaaaaaaatacaaaaaaattagccgggcgtggtggcgggcgcttgtagtcccagctactctggaggctgaggcaggagaatggcgtgaacccgggaggcggagcttgcagtgagccgagatcgtgccactgcactctagcctgggtgacagagcgagactccgtccccaaaaaaaaaattctgagaatatggtgtgttccagcctcttcaaagctctgctcttctgcacacgttttttgaaggccttaaaaaggccaccagtgtgaccagggagcaccctctgcctccctccctgcactgggaccataaacataaacagctctaccagcaaagtgacccatcccgcgggggaggcctgcgcacgcccctcaccagggctgtcatcagaatccagtcttaggacagaggaaggatgtttgccttcaggaccagcaagtcacaggtgtcctggatgttacccaagctctaaaatcaaataaaacccatcagtatttagtggtgtgtgtgtgtgtgtgtgtgtgtgtgtgtgtgtgtgtgtgtgtgtgtgtgtatgagtgtatgaagggaaatggaaagcagagaaaagtcgcgtgccctcccccaggcacctgatctgcccacagacccttcaatggggacatctctggtcccaatggtcgtaaataaaggctaagcgctggatttttccatggccccctgactcctcaggagcgcaggcagaggaggtaaacaggaggccaggttacccatgagatgaccagaagctcatccagggccgggaccctggttcatctcgtgaattcttggcagcggctccaggctgggcacattagatgctgtcatgtgactggcctggtggccacctcttggttctctggaaatgtgtccactctgtgctcagggaagaaggctgccgtcctgacctgtcagccaccaggccctctctgaactcctcacttgacccggaggcattgggagcaaacacaaagctcgcccctggtgtcagtggtgcagacagaggaaaagcagagggtccgcaaaatgcaactcctccgtggtgagactttgaaaaggtgtagagtggttgcagacaaacagcaaaggagtggaatggaaaaatctctcttgctccccacaagaagtccactcccctacggattcctcagatgccactggctggcacagcctttcccgcccttggtgtgggagcagcagaagtccagcgggggtgggagaatcatcggggtcaggtcagtgtctccctcgtctgaagtcaaccactacttttccctcaagcctaccaaagagctaaagtctgatctgtagatgtctgatggtttgaggagaagaaaagatagtcttttagagaagtggggagtatccaacttagggtcaaaatacactgagattaggccgggcacagtggctcacacctgtaatcccagtgctttgggaggccgaggcggatggatcacttgaggcctccaggagttcgagaccagcctggccaacatggcgaaaccccgtctctactaaaatacaaaaaattagctggatgtggtggtgggtgcctgtaatctcagctactcaaggaggctgaggcacaagaatagcttgaaccgggagatggaagatgcagtgagccaagatcacgcccctgcactccagcctgggcgacagagactccgtc

SEQ ID NO: 421093 - DNA, 3035 bp, Homo sapiens
tgatgtcatccccgttgtgtgtcatccccttcgtgtgtcatccccttcgtgtgtcatcccccttcgtggtcagaagcttctgaccacggagtacctgggtgatcatgaccaacacggggaagacaaggcggaaggggctggctaatgtgcagtggagcggggatgagcccctgcaaaggcccgtcacccccggcggccacagaaacgggtacccagtggtggaagaccaacacacacctccccagacagcccagcacgccagaaacggccacccgcaggccctgccagccgctcacgaggctgtctacagggagggcaagcccagcaccccggagtcctgcgtctcctcttcatcagccatcatcgccaagccaggagagtggctcccaagaggacgccaggaagagcctcgcccagcccccacgggaccccccgccagccaagggaggcgccccaggacccaggcaatggagtgaccaccagggaatgtgcatcagccttcacctgcaagccccgggccccctgcactccagagatgctggactggaacccacccaaggcaaaggcgtcagttctggcccctctgttctcttcgtgtggcccccagcaggccagccgccccggctccacagcgtcctccacaaggggcctgccgagcagccagtctcacaggaagtaaggatgtccccgggtgtccccatcacgttgccggaggaccagccagcttcccgctctcagctggcagcagctgccggtgatggatgtgaagggacagttgtccacaagactctgggagctgaggggaggccggctctccaggcagcaccagagcaaggccatcgcagccccgccagccgggtcactttctcccagggcagagccaccaaggagggctggggagagcctggcattgccctcctggagaggggaatttcctgctcacccttcacacacagaggagaggggtggcttttgcccgcaggagatcttctggccccagaaacagcaggtgctggatttgcagccctggccctccaggccccaacagggcgacagtgtagggccagcctggagcagggcttttccaaggctgctgaagccagccctcctcacttgggctgactaccaggacccagaaggaactcagggtgaagctcattttattctcaagcctgcgtctcagcagcaaagttggtgttttcttcctgtgttaaaatctgagaaagaaggccaggtgcggtggctcacgcctgtaattccaggactttggaaggctgaggcgggcagatcacgaggtcaggagatcgagaccatcctggctaacgtggtgaaaccccgtctctactaaaaaaatacaaaaaaattagccgggcgtggtggcgggcgcttgtagtcccagctactctggaggctgaggcaggagaatggcgtgaacccgggaggcggagcttgcagtgagccgagatcgtgccactgcactctagcctgggtgacagagcgagactccgtccccaaaaaaaaaattctgagaatatggtgtgttccagcctcttcaaagctctgctcttctgcacacgttttttgaaggccttaaaaaggccaccagtgtgaccagggagcaccctctgcctccctccctgcactgggaccataaacataaacagctctaccagcaaagtgacccatcccgcgggggaggcctgcgcacgcccctcaccagggctgtcatcagaatccagtcttaggacagaggaaggatgtttgccttcaggaccagcaagtcacaggtgtcctggatgttacccaagctctaaaatcaaataaaacccatcagtatttagtggtgtgtgtgtgtgtgtgtgtgtgtgtgtgtgtgtgtgtgtgtgtgtgtgtgtatgagtgtatgaagggaaatggaaagcagagaaaagtcgcgtgccctcccccaggcacctgatctgcccacagacccttcaatggggacatctctggtcccaatggtcgtaaataaaggctaagcgctggatttttccatggccccctgactcctcaggagcgcaggcagaggaggtaaacaggaggccaggttacccatgagatgaccagaagctcatccagggccgggaccctggttcatctcgtgaattcttggcagcggctccaggctgggcacattagatgctgtcatgtgactggcctggtggccacctcttggttctctggaaatgtgtccactctgtgctcagggaagaaggctgccgtcctgacctgtcagccaccaggccctctctgaactcctcacttgacccggaggcattgggagcaaacacaaagctcgcccctggtgtcagtggtgcagacagaggaaaagcagagggtccgcaaaatgcaactcctccgtggtgagactttgaaaaggtgtagagtggttgcagacaaacagcaaaggagtggaatggaaaaatctctcttgctccccacaagaagtccactcccctacggattcctcagatgccactggctggcacagcctttcccgcccttggtgtgggagcagcagaagtccagcgggggtgggagaatcatcggggtcaggtcagtgtctccctcgtctgaagtcaaccactacttttccctcaagcctaccaaagagctaaagtctgatctgtagatgtctgatggtttgaggagaagaaaagatagtcttttagagaagtggggagtatccaacttagggtcaaaatacactgagattaggccgggcacagtggctcacacctgtaatcccagtgctttgggaggccgaggcggatggatcacttgaggcctccaggagttcgagaccagcctggccaacatggcgaaaccccgtctctactaaaatacaaaaaattagctggatgtggtggtgggtgcctgtaatctcagctactcaaggaggctgaggcacaagaatagcttgaaccgggagatggaagatgcagtgagccaagatcacgcccctgcactccagcctgggcgacagagactccgtc

SEQ ID NO: 421094 - DNA, 304 bp, Homo sapiens
tccctccagacactgaaatgttaactattactttcgccaatacttctagggaatggaagacatcctacgctgcttcatcaaagaaggcaatgctgaaatgatccgccagatagaattcatcatcaagcagctaaattccggtcagtttgatgcaagaatctttgatctatcttttgaattattcacatttgccagaaagacacatggcatttcattcaagaggcctttaggaagccgggcacggtggctcgtgcttataatcccagcactttgggaggccgaggtgggtggatcacgaggtcag

SEQ ID NO: 421095 - DNA, 2129 bp, Homo sapiens
  misc_feature (182)..(182): n is a, c, g, or t
catacgtctgaagtcacgctatccatgtgattatgtgatcattagtaatagcttaaaacccacagagactacgctgattagagtatctaagatccccgttctgcatacaatgcatgttataggggcctcgcgtatctgtaccgagacgtatctcgtaaatagacatctagtattgcgaccantcttgagagtttcattaaccagtatgctgtagcatttcttaataacatcgttgtgatgttcttaaggcagatctttcttcataaaaaggaaagtaatggcaatttctctcctgtggaaatcccaattgcttgaattactgatattttagaatagactttttaaaatgccatatgtaattttatgcaagttgactatatatcttgtacttaataaattataggctcattttgttctctgctagtttaaagtaattcgtttaataatagatgtgtttttagaggaaatgctgttacttggaattaattttccagttatacagtcttctataacttactaataatattctatatgtactttatgtaatttccctaaaaagaatgaactaccactacactatggtgttaaaccaaaatatagggaaaataaacactaactgctgcttatggataatgttgcaactacttgttatgcatataaatattttactttttcacatgtatagattgcatttcttaggtgttttaattttttaaatatatttatgttttaaaaatttagttttgttttctgttttataactatagtgagaatgatgttttgaagcaaaatttttggttataaaatagttttcaggattatatatatatatactggatcctatcgccttttagtagaatatgaaatattcttttagaaatccaatataaataggttataatagccatattctttattactttattgagatataatttacatgccataaagtttacccttaaaatatataattcagtggtttttagtgatatttacaaagtggtacaatcatcatcactttctaattccagaatattttcatcaccccaaaaagaaatcctaaatccattagcagttacttcccattcttcccttcctccagcccctgaaaacactaccatctacttttcatctgtatggatttgtctgttctggacatttcacataaatagactcaaacaatatatggcttttttttttttttggtctggcctctttcatttagcttaatgttttcaaggttcatctatgttgtatcacgtatcagtactttattttttgtgtggcacgtcatatggatataccacaatttgtttatcttttcattaattatgggcatttggcttatttctacttttttggctattataaataatgctgctgtgaacatttgtgtgcaagtttttgtgtttcaattctcatgggtatatacctaaaagtggaatttctgggagtaaccatatatttgagttgcaaatggaaaatgcttgaaaaaaaatgccacagaattcagctaatcgtatttattactctaattcataaatgattcctctataactgtctctctgaatgacagttaaaactccctacagaagtgtgaacattacagaaattttctcacaagtctaaagatctagatctgaaaagcatcagtcaacgtggtgaatgatagtggtttctgttttaaacccatcattatttattgcaattttcttgattaagcattttctcccaggtaaaataaatgatttatagatagatatataataatctttggattaaaaagtttttttaagcagagaattattattctagtagtaaataaatttacataactacacaaaaccagtataccagtatctctcttatcttaaaggatattgacaatgctttagcatgtagtaactgctcagtttttatgtgttgaatgttgaattaaaagtagtaatgagtagagttttaaagttttttaatttattttttcaaattatgagagtactttttattttaaaatgttttctttaaattcaaccaggttcttggatagccggaatagttttgaagtactatagatcccataaagaagatgtttatcttccctaaaagaaaaaccacaaattgcttatgtt

SEQ ID NO: 421096 - DNA, 3667 bp, Homo sapiens
  misc_feature (16)..(16): n is a, c, g, or t
agcggaagtgagccgnggggaaggattgaatacagagacgctgtctgcttgctgccttaagacagctagctgaattgctgattaacttttaaaatacccagcttggtttatttttcttagaatctgttgctaagactggggacgctgttttcttttacaaagggaaatctaagttaatttcaaggcattcgaaatggggaaagactattattgcattttgggaattgagaaaggagcttcagatgaagatattaaaaaggcttaccgaaaacaagccctcaaatttcatccggacaagaacaaatctcctcaggcagaggaaaaatttaaagaggtcgcagaagcttatgaagtattgagtgatcctaaaaagagagaaatatatgatcagtttggggaggaagggttgaaaggaggagcaggaggtactgatggacaaggaggtaccttccggtacacctttcatggcgatcctcatgctacatttgctgcatttttcggagggtccaacccctttgaaattttctttggaagacgaatgggtggtggtagagattctgaagaaatggaaatagatggtgatccttttagtgcctttggtttcagcatgaatggatatccaagagacaggaattctgtggggccatcccgcctcaaacaagatcctccagttattcatgaacttagagtatcacttgaagagatatatagtggttgtaccaaacggatgaagatttctcgaaaaaggctaaacgctgatggaaggagttacagatctgaggacaaaattcttaccattgagattaaaaaagggtggaaagaaggcaccaaaattacttttccaagagaaggagatgaaacaccaaatagtattccagcagacattgtttttatcattaaagacaaagatcatccaaaatttaaaagggatggatcaaatataatttatactgctaaaattagtttacgagaggcattgtgtggctgctcaattaatgtaccaacactggatggaagaaacatacctatgtcagtaaatgatattgtgaaacccggaatgaggagaagaattattggatatgggctgccatttccaaaaaatcctgaccaacgtggtgaccttctaatagaatttgaggtgtccttcccagatactatatcttcttcatccaaagaagtacttaggaaacatcttcctgcctcatagaatgaagaactttgttacacatattttgataaggcactgaaaatataaaaggactggtagtttactgatgtagatgtgaattctgtataaagatgtgtaaattcttttgagggttcattaaattgcatgaatagagacgggtcaaataaataggcaaaagggatttttacagttagagataaaagagaaaaccattcactgtattttatttcatttctcctgattcagatatttttagtaatttgcttatatgtaaaagttgtttttgtggagtcagtggatatatttctaatgaagtgctagactatccaattacttaatttcttatacctttagataatcagtatgaaaagttcccatttataatggaaatgaaaattcttaactaaactatacatgtaatatgtatttctagaagagaataaaaacccaagtcagttattagatttaaatcaccttctgaaatgctgctatagggctggtatctgtaaaagaatatcctgatgcatctgtttcaccattttgatttttaaagtatgctgtagcatttcttaataacatcgttgtgatgttcttaaggcagatctttcttcataaaaaggaaagtaatggcaatttctctcctgtggaaatcccaattgcttgaattactgatattttagaatagactttttaaaatgccatatgtaattttatgcaagttgactatatatcttgtacttaataaattataggctcattttgttctctgctagtttaaagtaattcgtttaataatagatgtgtttttagaggaaatgctgttacttggaattaattttccagttatacagtcttctataacttactaataatattctatatgtactttatgtaatttccctaaaaagaatgaactaccactacactatggtgttaaaccaaaatatagggaaaataaacactaactgctgcttatggataatgttgcaactacttgttatgcatataaatattttactttttcacatgtatagattgcatttcttaggtgttttaattttttaaatatatttatgttttaaaaatttagttttgttttctgttttataactatagtgagaatgatgttttgaagcaaaatttttggttataaaatagttttcaggattatatatatatatactggatcctatcgccttttagtagaatatgaaatattcttttagaaatccaatataaataggttataatagccatattctttattactttattgagatataatttacatgccataaagtttacccttaaaatatataattcagtggtttttagtgatatttacaaagtggtacaatcatcatcactttctaattccagaatattttcatcaccccaaaaagaaatcctaaatccattagcagttacttcccattcttcccttcctccagcccctgaaaacactaccatctacttttcatctgtatggatttgtctgttctggacatttcacataaatagactcaaacaatatatggcttttttttttttttggtctggcctctttcatttagcttaatgttttcaaggttcatctatgttgtatcacgtatcagtactttattttttgtgtggcacgtcatatggatataccacaatttgtttatcttttcattaattatgggcatttggcttatttctacttttttggctattataaataatgctgctgtgaacatttgtgtgcaagtttttgtgtttcaattctcatgggtatatacctaaaagtggaatttctgggagtaaccatatatttgagttgcaaatggaaaatgcttgaaaaaaaatgccacagaattcagctaatcgtatttattactctaattcataaatgattcctctataactgtctctctgaatgacagttaaaactccctacagaagtgtgaacattacagaaattttctcacaagtctaaagatctagatctgaaaagcatcagtcaacgtggtgaatgatagtggtttctgttttaaacccatcattatttattgcaattttcttgattaagcattttctcccaggtaaaataaatgatttatagatagatatataataatctttggattaaaaagtttttttaagcagagaattattattctagtagtaaataaatttacataactacacaaaaccagtataccagtatctctcttatcttaaaggatattgacaatgctttagcatgtagtaactgctcagtttttatgtgttgaatgttgaattaaaagtagtaatgagtagagttttaaagttttttaatttattttttcaaattatgagagtactttttattttaaaatgttttctttaaattcaaccaggttcttggatagccggaatagttttgaagtactatagatcccataaagaagatgtttatcttccctaaaagaaaaaccacaaattgcttatgtt

SEQ ID NO: 421097 - DNA, 2168 bp, Homo sapiens
  misc_feature (16)..(16): n is a, c, g, or t
agcggaagtgagccgnggggaaggattgaatacagagacgctgtctgcttgctgccttaagacagctagctgaattgctgattaacttttaaaatacccagcttggtttatttttcttagaatctgttgctaagactggggacgctgttttcttttacaaagggaaatctaagttaatttcaaggcattcgaaatggggaaagactattattgcattttgggaattgagaaaggagcttcagatgaagatattaaaaaggcttaccgaaaacaagccctcaaatttcatccggacaagaacaaatctcctcaggcagaggaaaaatttaaagaggtcgcagaagcttatgaagtattgagtgatcctaaaaagagagaaatatatgatcagtttggggaggaagggttgaaaggaggagcaggaggtactgatggacaaggaggtaccttccggtacacctttcatggcgatcctcatgctacatttgctgcatttttcggagggtccaacccctttgaaattttctttggaagacgaatgggtggtggtagagattctgaagaaatggaaatagatggtgatccttttagtgcctttggtttcagcatgaatggatatccaagagacaggaattctgtggggccatcccgcctcaaacaagatcctccagttattcatgaacttagagtatcacttgaagagatatatagtggttgtaccaaacggatgaagatttctcgaaaaaggctaaacgctgatggaaggagttacagatctgaggacaaaattcttaccattgagattaaaaaagggtggaaagaaggcaccaaaattacttttccaagagaaggagatgaaacaccaaatagtattccagcagacattgtttttatcattaaagacaaagatcatccaaaatttaaaagggatggatcaaatataatttatactgctaaaattagtttacgagaggcattgtgtggctgctcaattaatgtaccaacactggatggaagaaacatacctatgtcagtaaatgatattgtgaaacccggaatgaggagaagaattattggatatgggctgccatttccaaaaaatcctgaccaacgtggtgaccttctaatagaatttgaggtgtccttcccagatactatatcttcttcatccaaagaagtacttaggaaacatcttcctgcctcatagaatgaagaactttgttacacatattttgataaggcactgaaaatataaaaggactggtagtttactgatgtagatgtgaattctgtataaagatgtgtaaattcttttgagggttcattaaattgcatgaatagagacgggtcaaataaataggcaaaagggatttttacagttagagataaaagagaaaaccattcactgtattttatttcatttctcctgattcagatatttttagtaatttgcttatatgtaaaagttgtttttgtggagtcagtggatatatttctaatgaagtgctagactatccaattacttaatttcttatacctttagataatcagtatgaaaagttcccatttataatggaaatgaaaattcttaactaaactatacatgtaatatgtatttctagaagagaataaaaacccaagtcagttattagatttaaatcaccttctgaaatgctgctatagggctggtatctgtaaaagaatatcctgatgcatctgtttcaccattttgatttttaaagtatgctgtagcatttcttaataacatcgttgtgatgttcttaaggcagatctttcttcataaaaaggaaagtaatggcaatttctctcctgtggaaatcccaattgcttgaattactgatattttagaatagactttttaaaatgccatatgtaattttatgcaagttgactatatatcttgtacttaataaattataggctcattttgttctctgctagtttaaagtaattcgtttaataatagatgtgtttttagaggaaatgctgttacttggaattaattttccagttatacagtcttctataacttactaataatattctatatgtactttatgtaatttccctaaaaagaatgaactaccactacactatggtgttaaaccaaaatatagggaaaataaacactaactgctgcttatgga

SEQ ID NO: 421098 - DNA, 2194 bp, Homo sapiens
  misc_feature (16)..(16): n is a, c, g, or t
agcggaagtgagccgnggggaaggattgaatacagagacgctgtctgcttgctgccttaagacagctagctgaattgctgattaacttttaaaatacccagcttggtttatttttcttagaatctgttgctaagactggggacgctgttttcttttacaaagggaaatctaagttaatttcaaggcattcgaaatggggaaagactattattgcattttgggaattgagaaaggagcttcagatgaagatattaaaaaggcttaccgaaaacaagccctcaaatttcatccggacaagaacaaatctcctcaggcagaggaaaaatttaaagaggtcgcagaagcttatgaagtattgagtgatcctaaaaagagagaaatatatgatcagtttggggaggaagggttgaaaggaggagcaggaggtactgatggacaaggaggtaccttccggtacacctttcatggcgatcctcatgctacatttgctgcatttttcggagggtccaacccctttgaaattttctttggaagacgaatgggtggtggtagagattctgaagaaatggaaatagatggtgatccttttagtgcctttggtttcagcatgaatggatatccaagagacaggaattctgtggggccatcccgcctcaaacaagatcctccagttattcatgaacttagagtatcacttgaagagatatatagtggttgtaccaaacggatgaagatttctcgaaaaaggctaaacgctgatggaaggagttacagatctgaggacaaaattcttaccattgagattaaaaaagggtggaaagaaggcaccaaaattacttttccaagagaaggagatgaaacaccaaatagtattccagcagacattgtttttatcattaaagacaaagatcatccaaaatttaaaagggatggatcaaatataatttatactgctaaaattagtttacgagaggcattgtgtggctgctcaattaatgtaccaacactggatggaagaaacatacctatgtcagtaaatgatattgtgaaacccggaatgaggagaagaattattggatatgggctgccatttccaaaaaatcctgaccaacgtggtgaccttctaatagaatttgaggtgtccttcccagatactatatcttcttcatccaaagaagtacttaggaaacatcttcctgcctcatagaatgaagaactttgttacacatattttgataaggcactgaaaatataaaaggactggtagtttactgatgtagatgtgaattctgtataaagatgtgtaaattcttttgagggttcattaaattgcatgaatagagacgggtcaaataaataggcaaaagggatttttacagttagagataaaagagaaaaccattcactgtattttatttcatttctcctgattcagatatttttagtaatttgcttatatgtaaaagttgtttttgtggagtcagtggatatatttctaatgaagtgctagactatccaattacttaatttcttatacctttagataatcagtatgaaaagttcccatttataatggaaatgaaaattcttaactaaactatacatgtaatatgtatttctagaagagaataaaaacccaagtcagttattagatttaaatcaccttctgaaatgctgctatagggctggtatctgtaaaagaatatcctgatgcatctgtttcaccattttgatttttaaagtatgctgtagcatttcttaataacatcgttgtgatgttcttaaggcagatctttcttcataaaaaggaaagtaatggcaatttctctcctgtggaaatcccaattgcttgaattactgatattttagaatagactttttaaaatgccatatgtaattttatgcaagttgactatatatcttgtacttaataaattataggctcattttgttctctgctagtttaaagtaattcgtttaataatagatgtgtttttagaggaaatgctgttacttggaattaattttccagttatacagtcttctataacttactaataatattctatatgtactttatgtaatttccctaaaaagaatgaactaccactacactatggtgttaaaccaaaatatagggaaaataaacactaactgctgcttatggaaaaaaaaagtcgacgcggccgcgaat

SEQ ID NO: 421099 - DNA, 3383 bp, Homo sapiens
cgcgctggtgtgggttagggctgagaaagaacgacaggaacagagacgtcgcgaggattaagtttaagacttcgcgagaacagaatttcttttggcacctcctctccgcgcgttcttgggggttgaaaggaggagcaggaggtactgatggacaaggaggtaccttccggtacacctttcatggcgatcctcatgctacatttgctgcatttttcggagggtccaacccctttgaaattttctttggaagacgaatgggtggtggtagagattctgaagaaatggaaatagatggtgatccttttagtgcctttggtttcagcatgaatggatatccaagagacaggaattctgtggggccatcccgcctcaaacaagatcctccagttattcatgaacttagagtatcacttgaagagatatatagtggttgtaccaaacggatgaagatttctcgaaaaaggctaaacgctgatggaaggagttacagatctgaggacaaaattcttaccattgagattaaaaaagggtggaaagaaggcaccaaaattacttttccaagagaaggagatgaaacaccaaatagtattccagcagacattgtttttatcattaaagacaaagatcatccaaaatttaaaagggatggatcaaatataatttatactgctaaaattagtttacgagaggcattgtgtggctgctcaattaatgtaccaacactggatggaagaaacatacctatgtcagtaaatgatattgtgaaacccggaatgaggagaagaattattggatatgggctgccatttccaaaaaatcctgaccaacgtggtgaccttctaatagaatttgaggtgtccttcccagatactatatcttcttcatccaaagaagtacttaggaaacatcttcctgcctcatagaatgaagaactttgttacacatattttgataaggcactgaaaatataaaaggactggtagtttactgatgtagatgtgaattctgtataaagatgtgtaaattcttttgagggttcattaaattgcatgaatagagacgggtcaaataaataggcaaaagggatttttacagttagagataaaagagaaaaccattcactgtattttatttcatttctcctgattcagatatttttagtaatttgcttatatgtaaaagttgtttttgtggagtcagtggatatatttctaatgaagtgctagactatccaattacttaatttcttatacctttagataatcagtatgaaaagttcccatttataatggaaatgaaaattcttaactaaactatacatgtaatatgtatttctagaagagaataaaaacccaagtcagttattagatttaaatcaccttctgaaatgctgctatagggctggtatctgtaaaagaatatcctgatgcatctgtttcaccattttgatttttaaagtatgctgtagcatttcttaataacatcgttgtgatgttcttaaggcagatctttcttcataaaaaggaaagtaatggcaatttctctcctgtggaaatcccaattgcttgaattactgatattttagaatagactttttaaaatgccatatgtaattttatgcaagttgactatatatcttgtacttaataaattataggctcattttgttctctgctagtttaaagtaattcgtttaataatagatgtgtttttagaggaaatgctgttacttggaattaattttccagttatacagtcttctataacttactaataatattctatatgtactttatgtaatttccctaaaaagaatgaactaccactacactatggtgttaaaccaaaatatagggaaaataaacactaactgctgcttatggataatgttgcaactacttgttatgcatataaatattttactttttcacatgtatagattgcatttcttaggtgttttaattttttaaatatatttatgttttaaaaatttagttttgttttctgttttataactatagtgagaatgatgttttgaagcaaaatttttggttataaaatagttttcaggattatatatatatatactggatcctatcgccttttagtagaatatgaaatattcttttagaaatccaatataaataggttataatagccatattctttattactttattgagatataatttacatgccataaagtttacccttaaaatatataattcagtggtttttagtgatatttacaaagtggtacaatcatcatcactttctaattccagaatattttcatcaccccaaaaagaaatcctaaatccattagcagttacttcccattcttcccttcctccagcccctgaaaacactaccatctacttttcatctgtatggatttgtctgttctggacatttcacataaatagactcaaacaatatatggcttttttttttttttggtctggcctctttcatttagcttaatgttttcaaggttcatctatgttgtatcacgtatcagtactttattttttgtgtggcacgtcatatggatataccacaatttgtttatcttttcattaattatgggcatttggcttatttctacttttttggctattataaataatgctgctgtgaacatttgtgtgcaagtttttgtgtttcaattctcatgggtatatacctaaaagtggaatttctgggagtaaccatatatttgagttgcaaatggaaaatgcttgaaaaaaaatgccacagaattcagctaatcgtatttattactctaattcataaatgattcctctataactgtctctctgaatgacagttaaaactccctacagaagtgtgaacattacagaaattttctcacaagtctaaagatctagatctgaaaagcatcagtcaacgtggtgaatgatagtggtttctgttttaaacccatcattatttattgcaattttcttgattaagcattttctcccaggtaaaataaatgatttatagatagatatataataatctttggattaaaaagtttttttaagcagagaattattattctagtagtaaataaatttacataactacacaaaaccagtataccagtatctctcttatcttaaaggatattgacaatgctttagcatgtagtaactgctcagtttttatgtgttgaatgttgaattaaaagtagtaatgagtagagttttaaagttttttaatttattttttcaaattatgagagtactttttattttaaaatgttttctttaaattcaaccaggttcttggatagccggaatagttttgaagtactatagatcccataaagaagatgtttatcttccctaaaagaaaaaccacaaattgcttatgtt

SEQ ID NO: 421100 - DNA, 3645 bp, Homo sapiens
gttaaggtctcttaagttaagaacagcattgtttcttgaccaataatagattttgtagcttcttaggcgtagtttctcccaccccatcctgtgggtactcaaatgtaagatcatattctgaattgtcatcacaggactagggaaatctaagttaatttcaaggcattcgaaatggggaaagactattattgcattttgggaattgagaaaggagcttcagatgaagatattaaaaaggcttaccgaaaacaagccctcaaatttcatccggacaagaacaaatctcctcaggcagaggaaaaatttaaagaggtcgcagaagcttatgaagtattgagtgatcctaaaaagagagaaatatatgatcagtttggggaggaagggttgaaaggaggagcaggaggtactgatggacaaggaggtaccttccggtacacctttcatggcgatcctcatgctacatttgctgcatttttcggagggtccaacccctttgaaattttctttggaagacgaatgggtggtggtagagattctgaagaaatggaaatagatggtgatccttttagtgcctttggtttcagcatgaatggatatccaagagacaggaattctgtggggccatcccgcctcaaacaagatcctccagttattcatgaacttagagtatcacttgaagagatatatagtggttgtaccaaacggatgaagatttctcgaaaaaggctaaacgctgatggaaggagttacagatctgaggacaaaattcttaccattgagattaaaaaagggtggaaagaaggcaccaaaattacttttccaagagaaggagatgaaacaccaaatagtattccagcagacattgtttttatcattaaagacaaagatcatccaaaatttaaaagggatggatcaaatataatttatactgctaaaattagtttacgagaggcattgtgtggctgctcaattaatgtaccaacactggatggaagaaacatacctatgtcagtaaatgatattgtgaaacccggaatgaggagaagaattattggatatgggctgccatttccaaaaaatcctgaccaacgtggtgaccttctaatagaatttgaggtgtccttcccagatactatatcttcttcatccaaagaagtacttaggaaacatcttcctgcctcatagaatgaagaactttgttacacatattttgataaggcactgaaaatataaaaggactggtagtttactgatgtagatgtgaattctgtataaagatgtgtaaattcttttgagggttcattaaattgcatgaatagagacgggtcaaataaataggcaaaagggatttttacagttagagataaaagagaaaaccattcactgtattttatttcatttctcctgattcagatatttttagtaatttgcttatatgtaaaagttgtttttgtggagtcagtggatatatttctaatgaagtgctagactatccaattacttaatttcttatacctttagataatcagtatgaaaagttcccatttataatggaaatgaaaattcttaactaaactatacatgtaatatgtatttctagaagagaataaaaacccaagtcagttattagatttaaatcaccttctgaaatgctgctatagggctggtatctgtaaaagaatatcctgatgcatctgtttcaccattttgatttttaaagtatgctgtagcatttcttaataacatcgttgtgatgttcttaaggcagatctttcttcataaaaaggaaagtaatggcaatttctctcctgtggaaatcccaattgcttgaattactgatattttagaatagactttttaaaatgccatatgtaattttatgcaagttgactatatatcttgtacttaataaattataggctcattttgttctctgctagtttaaagtaattcgtttaataatagatgtgtttttagaggaaatgctgttacttggaattaattttccagttatacagtcttctataacttactaataatattctatatgtactttatgtaatttccctaaaaagaatgaactaccactacactatggtgttaaaccaaaatatagggaaaataaacactaactgctgcttatggataatgttgcaactacttgttatgcatataaatattttactttttcacatgtatagattgcatttcttaggtgttttaattttttaaatatatttatgttttaaaaatttagttttgttttctgttttataactatagtgagaatgatgttttgaagcaaaatttttggttataaaatagttttcaggattatatatatatatactggatcctatcgccttttagtagaatatgaaatattcttttagaaatccaatataaataggttataatagccatattctttattactttattgagatataatttacatgccataaagtttacccttaaaatatataattcagtggtttttagtgatatttacaaagtggtacaatcatcatcactttctaattccagaatattttcatcaccccaaaaagaaatcctaaatccattagcagttacttcccattcttcccttcctccagcccctgaaaacactaccatctacttttcatctgtatggatttgtctgttctggacatttcacataaatagactcaaacaatatatggcttttttttttttttggtctggcctctttcatttagcttaatgttttcaaggttcatctatgttgtatcacgtatcagtactttattttttgtgtggcacgtcatatggatataccacaatttgtttatcttttcattaattatgggcatttggcttatttctacttttttggctattataaataatgctgctgtgaacatttgtgtgcaagtttttgtgtttcaattctcatgggtatatacctaaaagtggaatttctgggagtaaccatatatttgagttgcaaatggaaaatgcttgaaaaaaaatgccacagaattcagctaatcgtatttattactctaattcataaatgattcctctataactgtctctctgaatgacagttaaaactccctacagaagtgtgaacattacagaaattttctcacaagtctaaagatctagatctgaaaagcatcagtcaacgtggtgaatgatagtggtttctgttttaaacccatcattatttattgcaattttcttgattaagcattttctcccaggtaaaataaatgatttatagatagatatataataatctttggattaaaaagtttttttaagcagagaattattattctagtagtaaataaatttacataactacacaaaaccagtataccagtatctctcttatcttaaaggatattgacaatgctttagcatgtagtaactgctcagtttttatgtgttgaatgttgaattaaaagtagtaatgagtagagttttaaagttttttaatttattttttcaaattatgagagtactttttattttaaaatgttttctttaaattcaaccaggttcttggatagccggaatagttttgaagtactatagatcccataaagaagatgtttatcttccctaaaagaaaaaccacaaattgcttatgtt

SEQ ID NO: 421101 - DNA, 3621 bp, Homo sapiens
  misc_feature (16)..(16): n is a, c, g, or t
agcggaagtgagccgnggggaaggattgaatacagagacgctgtctgcttgctgccttaagacagctagctgaattgctgattaacttttaaaatacccagcttggtttatttttcttagaatctgttgctaagactggggacgctgttttcttttacaaagggaaatctaagttaatttcaaggcattcgaaatggggaaagactattattgcattttgggaattgagaaaggagcttcagatgaagatattaaaaaggcttaccgaaaacaagccctcaaatttcatccggacaagaacaaatctcctcaggcagaggaaaaatttaaagaggtcgcagaagcttatgaagtattgagtgatcctaaaaagagagaaatatatgatcagtttggggaggaagggttgaaaggaggagcaggaggtactgatggacaaggaggtaccttccggtacacctttcatggcgatcctcatgctacatttgctgcatttttcggagggtccaacccctttgaaattttctttggaagacgaatgggtggtggtagagattctgaagaaatggaaatagatggtgatccttttagtgcctttggtttcagcatgaatggatatccaagagacaggaattctgtggggccatcccgcctcaaacaagatcctccagttattcatgaacttagagtatcacttgaagagatatatagtggttgtaccaaacggatgaagatttctcgaaaaaggctaaacgctgatggaaggagttacagatctgaggacaaaattcttaccattgagattaaaaaagggtggaaagaaggcaccaaaattacttttccaagagaaggagatgaaacaccaaatagtattccagcagacattgtttttatcattaaagacaaagatcatccaaaatttaaaagggatggatcaaatataatttatactgctaaaattagtttacgagaggcattgtgtggctgctcaattaatgtaccaacactggatggaagaaacatacctatgtcagtaaatgatattgtgaaacccggaatgaggagaagaattattggatatgggctgccatttccaaaaaatcctgaccaacatcttcttcatccaaagaagtacttaggaaacatcttcctgcctcatagaatgaagaactttgttacacatattttgataaggcactgaaaatataaaaggactggtagtttactgatgtagatgtgaattctgtataaagatgtgtaaattcttttgagggttcattaaattgcatgaatagagacgggtcaaataaataggcaaaagggatttttacagttagagataaaagagaaaaccattcactgtattttatttcatttctcctgattcagatatttttagtaatttgcttatatgtaaaagttgtttttgtggagtcagtggatatatttctaatgaagtgctagactatccaattacttaatttcttatacctttagataatcagtatgaaaagttcccatttataatggaaatgaaaattcttaactaaactatacatgtaatatgtatttctagaagagaataaaaacccaagtcagttattagatttaaatcaccttctgaaatgctgctatagggctggtatctgtaaaagaatatcctgatgcatctgtttcaccattttgatttttaaagtatgctgtagcatttcttaataacatcgttgtgatgttcttaaggcagatctttcttcataaaaaggaaagtaatggcaatttctctcctgtggaaatcccaattgcttgaattactgatattttagaatagactttttaaaatgccatatgtaattttatgcaagttgactatatatcttgtacttaataaattataggctcattttgttctctgctagtttaaagtaattcgtttaataatagatgtgtttttagaggaaatgctgttacttggaattaattttccagttatacagtcttctataacttactaataatattctatatgtactttatgtaatttccctaaaaagaatgaactaccactacactatggtgttaaaccaaaatatagggaaaataaacactaactgctgcttatggataatgttgcaactacttgttatgcatataaatattttactttttcacatgtatagattgcatttcttaggtgttttaattttttaaatatatttatgttttaaaaatttagttttgttttctgttttataactatagtgagaatgatgttttgaagcaaaatttttggttataaaatagttttcaggattatatatatatatactggatcctatcgccttttagtagaatatgaaatattcttttagaaatccaatataaataggttataatagccatattctttattactttattgagatataatttacatgccataaagtttacccttaaaatatataattcagtggtttttagtgatatttacaaagtggtacaatcatcatcactttctaattccagaatattttcatcaccccaaaaagaaatcctaaatccattagcagttacttcccattcttcccttcctccagcccctgaaaacactaccatctacttttcatctgtatggatttgtctgttctggacatttcacataaatagactcaaacaatatatggcttttttttttttttggtctggcctctttcatttagcttaatgttttcaaggttcatctatgttgtatcacgtatcagtactttattttttgtgtggcacgtcatatggatataccacaatttgtttatcttttcattaattatgggcatttggcttatttctacttttttggctattataaataatgctgctgtgaacatttgtgtgcaagtttttgtgtttcaattctcatgggtatatacctaaaagtggaatttctgggagtaaccatatatttgagttgcaaatggaaaatgcttgaaaaaaaatgccacagaattcagctaatcgtatttattactctaattcataaatgattcctctataactgtctctctgaatgacagttaaaactccctacagaagtgtgaacattacagaaattttctcacaagtctaaagatctagatctgaaaagcatcagtcaacgtggtgaatgatagtggtttctgttttaaacccatcattatttattgcaattttcttgattaagcattttctcccaggtaaaataaatgatttatagatagatatataataatctttggattaaaaagtttttttaagcagagaattattattctagtagtaaataaatttacataactacacaaaaccagtataccagtatctctcttatcttaaaggatattgacaatgctttagcatgtagtaactgctcagtttttatgtgttgaatgttgaattaaaagtagtaatgagtagagttttaaagttttttaatttattttttcaaattatgagagtactttttattttaaaatgttttctttaaattcaaccaggttcttggatagccggaatagttttgaagtactatagatcccataaagaagatgtttatcttccctaaaagaaaaaccacaaattgcttatgtt

SEQ ID NO: 421102 - DNA, 3098 bp, Homo sapiens
  misc_feature (16)..(16): n is a, c, g, or t
agcggaagtgagccgnggggaaggattgaatacagagacgctgtctgcttgctgccttaagacagctagctgaattgctgattaacttttaaaatacccagcttggtttatttttcttagaatctgttgctaagactggggacgctgttttcttttacaaagggaaatctaagttaatttcaaggcattcgaaatggggaaagactattattgcattttgggaattgagaaaggagcttcagatgaagatattaaaaaggcttaccgaaaacaagccctcaaatttcatccggacaagaacaaatctcctcaggcagaggaaaaatttaaagaggtcgcagaagcttatgaagtattgagtgatcctaaaaagagagaaatatatgatcagtttggggaggaaggcattgtgtggctgctcaattaatgtaccaacactggatggaagaaacatacctatgtcagtaaatgatattgtgaaacccggaatgaggagaagaattattggatatgggctgccatttccaaaaaatcctgaccaacgtggtgaccttctaatagaatttgaggtgtccttcccagatactatatcttcttcatccaaagaagtacttaggaaacatcttcctgcctcatagaatgaagaactttgttacacatattttgataaggcactgaaaatataaaaggactggtagtttactgatgtagatgtgaattctgtataaagatgtgtaaattcttttgagggttcattaaattgcatgaatagagacgggtcaaataaataggcaaaagggatttttacagttagagataaaagagaaaaccattcactgtattttatttcatttctcctgattcagatatttttagtaatttgcttatatgtaaaagttgtttttgtggagtcagtggatatatttctaatgaagtgctagactatccaattacttaatttcttatacctttagataatcagtatgaaaagttcccatttataatggaaatgaaaattcttaactaaactatacatgtaatatgtatttctagaagagaataaaaacccaagtcagttattagatttaaatcaccttctgaaatgctgctatagggctggtatctgtaaaagaatatcctgatgcatctgtttcaccattttgatttttaaagtatgctgtagcatttcttaataacatcgttgtgatgttcttaaggcagatctttcttcataaaaaggaaagtaatggcaatttctctcctgtggaaatcccaattgcttgaattactgatattttagaatagactttttaaaatgccatatgtaattttatgcaagttgactatatatcttgtacttaataaattataggctcattttgttctctgctagtttaaagtaattcgtttaataatagatgtgtttttagaggaaatgctgttacttggaattaattttccagttatacagtcttctataacttactaataatattctatatgtactttatgtaatttccctaaaaagaatgaactaccactacactatggtgttaaaccaaaatatagggaaaataaacactaactgctgcttatggataatgttgcaactacttgttatgcatataaatattttactttttcacatgtatagattgcatttcttaggtgttttaattttttaaatatatttatgttttaaaaatttagttttgttttctgttttataactatagtgagaatgatgttttgaagcaaaatttttggttataaaatagttttcaggattatatatatatatactggatcctatcgccttttagtagaatatgaaatattcttttagaaatccaatataaataggttataatagccatattctttattactttattgagatataatttacatgccataaagtttacccttaaaatatataattcagtggtttttagtgatatttacaaagtggtacaatcatcatcactttctaattccagaatattttcatcaccccaaaaagaaatcctaaatccattagcagttacttcccattcttcccttcctccagcccctgaaaacactaccatctacttttcatctgtatggatttgtctgttctggacatttcacataaatagactcaaacaatatatggcttttttttttttttggtctggcctctttcatttagcttaatgttttcaaggttcatctatgttgtatcacgtatcagtactttattttttgtgtggcacgtcatatggatataccacaatttgtttatcttttcattaattatgggcatttggcttatttctacttttttggctattataaataatgctgctgtgaacatttgtgtgcaagtttttgtgtttcaattctcatgggtatatacctaaaagtggaatttctgggagtaaccatatatttgagttgcaaatggaaaatgcttgaaaaaaaatgccacagaattcagctaatcgtatttattactctaattcataaatgattcctctataactgtctctctgaatgacagttaaaactccctacagaagtgtgaacattacagaaattttctcacaagtctaaagatctagatctgaaaagcatcagtcaacgtggtgaatgatagtggtttctgttttaaacccatcattatttattgcaattttcttgattaagcattttctcccaggtaaaataaatgatttatagatagatatataataatctttggattaaaaagtttttttaagcagagaattattattctagtagtaaataaatttacataactacacaaaaccagtataccagtatctctcttatcttaaaggatattgacaatgctttagcatgtagtaactgctcagtttttatgtgttgaatgttgaattaaaagtagtaatgagtagagttttaaagttttttaatttattttttcaaattatgagagtactttttattttaaaatgttttctttaaattcaaccaggttcttggatagccggaatagttttgaagtactatagatcccataaagaagatgtttatcttccctaaaagaaaaaccacaaattgcttatgtt

SEQ ID NO: 421103 - DNA, 262 bp, Homo sapiens
aacaaacaaaaatgctgatttggaggaagaatttgaaaacttaacaatttaacttaggatgtaatcatcaagagttttatagctgttctgtatttagtaaagtggcatttctggccaatattaatacattttaatgtaagttagccaaaatttattagcaatacagtttttgaaagtttaacttttaagagttgcaagcttttttctaatcatgcttatctcttcaattagggttgaaaggaggagcaggaggtactgatgg

SEQ ID NO: 421104 - DNA, 461 bp, Homo sapiens
ttgtgtgctagctgcatgtacttgctgttgtactgtgtttaaatgattctctaacttcctttggaaagcactaatgaataagtgctgtttctcttctctattgttgggttttttgtaaagttgctcaaatgctctcaggtatggcggctctgaatggaggacttggcgccacaggcttgacgaatggcacggctggcaccatggacgccctcacccaggcctactcaggaattcaacagtacgcagccgccgcgctgcccactctgtacagccagagcctgctgcagcagcagagcgctgcaggcagccagaaggaaggtaggtgccgcccttggccccaggcagggcccagcccaacaggcagcactggcctctagagcacggttagaaggtatcaaattgaactgaacccatgtcataacagaaagcagttgttttgttattcatgtttaaaaaaaaaa

SEQ ID NO: 421105 - DNA, 5643 bp, Homo sapiens
acaagtgccggctcggcggccgccgggggaggccgcgcgcacctgtccctgcccgtctcgcgccgcccgcggccgctcggacgcgcgcagagccgccccccgccgctgccgccgcgtgcgcccgcgaacatgacttctgccttcaagctggatttcctcccggacatgatggtcgagggccgcctgctcgttcctgacagaattaacggcacagccaacaagatgaacggagctttggatcactcagaccaaccagacccagatgccattaagatgtttgtcggacagatcccccggtcatggtcggaaaaggagctgaaagaactttttgagccttacggagccgtctaccagatcaacgtcctccgggaccggagtcagaaccctccgcagagtaaaggttgttgtttcgtaacattttatacaagaaaagctgcacttgaggcccagaatgcactgcacaatattaaaactttacctgggatgcatcatcccattcagatgaaacctgcagatagtgaaaagtccaacgctgtggaagacagaaaattgttcataggaatggtttcgaagaaatgtaatgagaacgacatcagggtgatgttctctccatttggccagatagaagaatgccggatcctccggggacctgatgggctgagtcgaggctgtgcgtttgtcacattttctacaagggcaatggcacagaatgcaatcaaagccatgcatcagtctcagaccatggagggctgctcttcacctatcgtggtgaagtttgctgacactcagaaggacaaagagcaaaggcgcctccagcagcagctcgctcagcagatgcagcagctcaacactgccacctgggggaacctgacagggctgggcggactgaccccacagtatctggcgctcctgcagcaggccacctcctccagcaacctgggtgcgttcagcggcattcaacaaatggcaggcatgaatgctttacagttgcagaacctggcgacgctggctgctgctgcagctgcggcccagacctcagccaccagcaccaatgcaaaccctctctctaccacgagcagcgccctgggagccctcacgagtcccgtggctgcttcaacccccaactccactgctggtgcagccatgaactccttgacctctctcgggactctgcaaggactggctggagccactgttggactgaataatattaatgcactagcagttgctcaaatgctctcaggtatggcggctctgaatggaggacttggcgccacaggcttgacgaatggcacggctggcaccatggacgccctcacccaggcctactcaggaattcaacagtacgcagccgccgcgctgcccactctgtacagccagagcctgctgcagcagcagagcgctgcaggcagccagaaggaaggtccagagggggcaaacctctttatttaccaccttccacaggaatttggagaccaggacattctgcagatgttcatgccttttggaaatgttatctctgctaaagtcttcattgacaaacagaccaatctgagcaagtgctttggttttgttagctacgacaatccagtctctgcacaagctgctatccaagctatgaatggctttcagatcggcatgaaacgcttgaaggtgcagctgaagcgttccaaaaacgacagcaaaccttactgatcctaaccccagaggctccctgctctcattttagctttcttaggacatcttcatgcccgttagttcatcgtttgcctagcatgtccctgtggcgtctcaaaaaaaagtttcatcgtcccgtcattgtttctgatgtctttctgacctcacatcatatttggttctcctactgacctttgatctagtttgacctttgaaatttgcatgtgacctcatctagctatgaattctgggaagtcaatgtgaaaaacattgctgcattcatgcaagactgaaatttattattagacaaattcattatagaaaaaacctgtggcaaaaacgtttctttcttattttttttcttttcctaaaacagacttgaaagtattatacagggattggcattcttcccggtcactggtaacaatagcaatatgtgtccagggacacagaatgttggtttctaacagactacttccaaaaacagtttgagaaaaaaactgtctgattttaagtctctagaggtctgtaatagtttttacatttttcaggcagtgtaaagttttttgataaggccattttaggtggctcactttctcattaagatatatatatagaaccactttttgtagattagtataagaaaaatatttaccctgttttggggcaaatgctacctatttgtgtcaccttttgctgaactcacagttagacaatccatggtttaatgcacatgaaattacctatattttatactgtttcaatgtacaggagaaaggttactgtaaactgtgttatgttggtgcttctgtgaattaagttgtggtttcatcatgagtcttaatgttctttgttgataagacaagtttagaattggtttacttaatacaaaaaaaaaaaaaagaatttcaaaaaaaaaagttgtttgcttaaaaaaaatttcatgtgagggaaaaaaaaaaaaacctattccagaataagttttgtgttggcttgtgaagcattgatgtcattttttttaattgtggactatttagatgtgtttgtgttcagcaaaatgtgatctgtttttttcttttaaagaaaaaaagtgaaaatatatagtgccaaattccaaaggtacttccttcctagagcttcagtgtgtttcttgtgagaagtaatttgataacatgggtattttattatgtgttttgtataaatccctaatatttaaaaaaaaaaacaaaacaaaaaaaggttacaaagtttgttaacttgctatcctgtggtcttgttgcctgaaattgttattgtttgttatttctctctgatgttttttgtaagacattgtataagtgcccatgtcccacttttttaaccactccgcacatcagtgctgtgaaggcaacctcaccatgtattttcttcataatctatggaaacctctaaggtgagaaagttttgaacttttaaccctttctacccagagctatctggaatgttgatgactttttatactgtcatgatttgagtttgttttggggtgtttccaatttggatttttttccctgcatctatcctctaagttgtttcggtttgactactttgttctttggttaagatccaaaagaaaacagaaaacaattccacgaggccaatctaaagggaaaaaatcctacactacttttactacttttgattatttctcatttttgggaaaagaattcctaatgtgctactagaattccttcttcagttttaacgagtaattggataaaccctgagggaaaacggaggtagattcagcacctaacaatcctgtatgcttttgagatcacgtttagtgctatgtcctagtctagaatattttcatataccttgcagtaaaacgactttgtggcaggacagtctcttgaggggttttgtttctgtttcctaaatactcctaaataatatttctaatcagccattatgctggggcatctctgatcccagtaggtacctctgaatataccaggtgtctggagttagaagcccatagccctttcccagcctttttggtttttttaattgaacacatttcatctaagtaaagctcagttctttatcacaatttactgaccaaatacctagcaccagttcctgctgccactttttaaagtgccatatgactttctacgaacaggtaccttgctgtcttgacaaatcctaatgtcacgcctacagccccaacacaagctccagtcttcctcttcggcatgccctggaagcttcttggcctcagctccccttccccgctcagcaccctgttaggatcagtgtgtgtggatgggatagccctgggatggaaaggactagcctctactgatgcaaaaaaacaaaaagcaacacaaacgtttccttcttatagcacatgcacttccttacaatgacatgatttgtattatcctcacatgtgtttactactgctggggccttccttcatcctctgagggctattttgtactttctgcagcaatcagcttaataacaacacttattgcacctgtctctctctgagaacacggtgtgtctcgacacgtaccacgtacgtggaaacacaagagcccaccacttgaatttctaagaccatttcattctgaaacttcttatcaattacctaaatctcaacgaaaaacaatttactgaagccgactcccctccccatctccctctcaacctcaacccacctgcatgcatctcccccagaggaaacactgagggtaggggacaggaggctcaggacgcgccctctgaatcgagtgtttcttcttcacaagtcaccaagagaggacatgagggggaaagtccttttttgcccttctccaaaaaataaccttccacagagacaaactgtccttctatccacttttatcttttaataaatatcaaaaggaaaaagctgcaagggtgcaaagggcctgtgccagaagaaaacacacacagggaaaccgctttttttaatcaattgtagagaatagtcatttttaatctaaattagagaattgtgatacaatggcagtcctcaaaggcgtaacgagttcatctttctttcaccataggggttatagttggcttgtgctactctggaatcattttactgtttgtttttattatcttaagtgctaattaaaaaaaaaataaaattttaaaaaaacctgtagtttcattacctttttgaataatgtcatacaaaaaatgtatttgtttttttgtgctgtgagaattgatgtttgtagattaataatcattttgtttagaattacaaaatagtttttaaatattgtctgagaaaagccaaagttaatgcaacctagtggaaactgtaagaccatttgagtattgtttgttttattgatgcatttggattttgttgtttgatggaatttgagccaaaaaaaaaatacgcaggctttcctatttctacaactgattgtacttatgcattttgtaccagtggaactttttatactggagattaaaaaaaaaatggaaatttttgtggcttgctctggtgggcccctgacaatgactgatttcaagtttgatttcgggttgattgattgattgattgatagaaagaaagttgcttttcttttgagaattaaaaactttggcttgatttcttttttccctttgcttatatctagcattagaattttgtcttaaaataacagcggtaagtttcactttttattctgtattgtgcagttacacaataaggtaattagatttagaagtactcagtcactttaagtggataaatgtattagttaaaactttagggtttgcttttttgctgtttagatcaaagttttttctgattcttctgtcctcattgtgaacataaccgtgtagttgaaacagtcaaacttatttttgtaatgtatgttattgtgtgatgcagttttttgcttctgtctccaatattaaaccattttccta

SEQ ID NO: 421106 - DNA, 6898 bp, Homo sapiens
cgactgtggcattgatgtttgagcatacttctgaactggcttttgttgagactatcagtatagaagcatgcgctgtcccaaatccgctgttactatgagaaatgaagagctgcttttaagtaacggcacagccaacaagatgaacggagctttggatcactcagaccaaccagacccagatgccattaagatgtttgtcggacagatcccccggtcatggtcggaaaaggagctgaaagaactttttgagccttacggagccgtctaccagatcaacgtcctccgggaccggagtcagaaccctccgcagagtaaaggttgttgtttcgtaacattttatacaagaaaagctgcacttgaggcccagaatgcactgcacaatattaaaactttacctgggatgcatcatcccattcagatgaaacctgcagatagtgaaaagtccaacgctgtggaagacagaaaattgttcataggaatggtttcgaagaaatgtaatgagaacgacatcagggtgatgttctctccatttggccagatagaagaatgccggatcctccggggacctgatgggctgagtcgaggctgtgcgtttgtcacattttctacaagggcaatggcacagaatgcaatcaaagccatgcatcagtctcagaccatggagggctgctcttcacctatcgtggtgaagtttgctgacactcagaaggacaaagagcaaaggcgcctccagcagcagctcgctcagcagatgcagcagctcaacactgccacctgggggaacctgacagggctgggcggactgaccccacagtatctggcgctcctgcagcaggccacctcctccagcaacctgggtgcgttcagcggcattcaacaaatggcaggcatgaatgctttacagttgcagaacctggcgacgctggctgctgctgcagctgcggcccagacctcagccaccagcaccaatgcaaaccctctctctaccacgagcagcgccctgggagccctcacgagtcccgtggctgcttcaacccccaactccactgctggtgcagccatgaactccttgacctctctcgggactctgcaaggactggctggagccactgttggactgaataatattaatgcactagcagatggcggctctgaatggaggacttggcgccacaggcttgacgaatggcacggctggcaccatggacgccctcacccaggcctactcaggaattcaacagtacgcagccgccgcgctgcccactctgtacagccagagcctgctgcagcagcagagcgctgcaggcagccagaaggaaggtccagagggggcaaacctctttatttaccaccttccacaggaatttggagaccaggacattctgcagatgttcatgccttttggaaatgttatctctgctaaagtcttcattgacaaacagaccaatctgagcaagtgctttggttttgttagctacgacaatccagtctctgcacaagctgctatccaagctatgaatggctttcagatcggcatgaaacgcttgaaggtgcagctgaagcgttccaaaaacgacagcaaaccttactgatcctaaccccagaggctccctgctctcattttagctttcttagggtaagtcccacgagccagcctgtctcaacagggaaggcagaggaggaccacattgccaacttttaccaagagagacggttatttttacaataaggcctccatgtccccacccacttcccctacccagtttgccataattaaaacttgggctactttgtttctattgagtaattcctcctccagttgtgccactgtattctcctttgttttgcgatttgaatctccttttacctttttttttaatttttttcatttttgcttttttttaaagagaagcatatacacaaataaatggcatcttgagaatttaaaaggcaaacaaacaaacgctaatgtgcaattctaactctgaaaccactggtgccccgagagcactgcctggagaattcacccctccttgcccggcgcccgcccccggagggagggcccggtgcttagaggttaacttggtggcctaggagagggagaagccaggagaagcacttactccaaccacacgtctttccactacatcggcttgttttactaagtaggattttattttagggttcaaagaaacatgacatttattggtcaaaatattacactggttgtctattttgttattgttttattttagtttttagaaaggattaatgtacaaaaagatttagagatctgtttcttaaagctacagggtttaaaaaataaaaatgagtgaaaatacttgatgtttcttgaaagataaatttaataataataaataaatacataaatacataaataaaaaagaaagccacaggcctgtaaattttatttgtaaaaaagcatttctatttttatacaaaatttttactgcctcagaaataatggaagttatttattgcctattgttaacttattgggtacctaaagagcagttctctgtctagctagaaccttctgaagtagtctctagaggaattgttctaggaatgggctttttttcaccgttgaaccctagacctgaagttcatgctttatcctctcgttgtttgtatctgtctgattattttgtttgtaacttccattatctagtttacagttcagtcgtctgactttccccgtatgtcacatttgttgaaactggaccttctccccctgtccctcaccccaaaacacccggaatccatcccctttcgctctctccagatggattctcttggggtttcattgtgctgtggataaggagtgtaagaaatgcaaattatgtgaatggctcggagactccctaatgacctaagatttgcattagtttttctcctgcacccttaaaagtgattttgttgccgctgcatagattctgtgtaactttttactcttccttgttttttccctagacatcttcatgcccgttagttcatcgtttgcctagcatgtccctgtggcgtctcaaaaaaaagtttcatcgtcccgtcattgtttctgatgtctttctgacctcacatcatatttggttctcctactgacctttgatctagtttgacctttgaaatttgcatgtgacctcatctagctatgaattctgggaagtcaatgtgaaaaacattgctgcattcatgcaagactgaaatttattattagacaaattcattatagaaaaaacctgtggcaaaaacgtttctttcttattttttttcttttcctaaaacagacttgaaagtattatacagggattggcattcttcccggtcactggtaacaatagcaatatgtgtccagggacacagaatgttggtttctaacagactacttccaaaaacagtttgagaaaaaaactgtctgattttaagtctctagaggtctgtaatagtttttacatttttcaggcagtgtaaagttttttgataaggccattttaggtggctcactttctcattaagatatatatatagaaccactttttgtagattagtataagaaaaatatttaccctgttttggggcaaatgctacctatttgtgtcaccttttgctgaactcacagttagacaatccatggtttaatgcacatgaaattacctatattttatactgtttcaatgtacaggagaaaggttactgtaaactgtgttatgttggtgcttctgtgaattaagttgtggtttcatcatgagtcttaatgttctttgttgataagacaagtttagaattggtttacttaatacaaaaaaaaaaaaaagaatttcaaaaaaaaaagttgtttgcttaaaaaaaatttcatgtgagggaaaaaaaaaaaaacctattccagaataagttttgtgttggcttgtgaagcattgatgtcattttttttaattgtggactatttagatgtgtttgtgttcagcaaaatgtgatctgtttttttcttttaaagaaaaaaagtgaaaatatatagtgccaaattccaaaggtacttccttcctagagcttcagtgtgtttcttgtgagaagtaatttgataacatgggtattttattatgtgttttgtataaatccctaatatttaaaaaaaaaaacaaaacaaaaaaaggttacaaagtttgttaacttgctatcctgtggtcttgttgcctgaaattgttattgtttgttatttctctctgatgttttttgtaagacattgtataagtgcccatgtcccacttttttaaccactccgcacatcagtgctgtgaaggcaacctcaccatgtattttcttcataatctatggaaacctctaaggtgagaaagttttgaacttttaaccctttctacccagagctatctggaatgttgatgactttttatactgtcatgatttgagtttgttttggggtgtttccaatttggatttttttccctgcatctatcctctaagttgtttcggtttgactactttgttctttggttaagatccaaaagaaaacagaaaacaattccacgaggccaatctaaagggaaaaaatcctacactacttttactacttttgattatttctcatttttgggaaaagaattcctaatgtgctactagaattccttcttcagttttaacgagtaattggataaaccctgagggaaaacggaggtagattcagcacctaacaatcctgtatgcttttgagatcacgtttagtgctatgtcctagtctagaatattttcatataccttgcagtaaaacgactttgtggcaggacagtctcttgaggggttttgtttctgtttcctaaatactcctaaataatatttctaatcagccattatgctggggcatctctgatcccagtaggtacctctgaatataccaggtgtctggagttagaagcccatagccctttcccagcctttttggtttttttaattgaacacatttcatctaagtaaagctcagttctttatcacaatttactgaccaaatacctagcaccagttcctgctgccactttttaaagtgccatatgactttctacgaacaggtaccttgctgtcttgacaaatcctaatgtcacgcctacagccccaacacaagctccagtcttcctcttcggcatgccctggaagcttcttggcctcagctccccttccccgctcagcaccctgttaggatcagtgtgtgtggatgggatagccctgggatggaaaggactagcctctactgatgcaaaaaaacaaaaagcaacacaaacgtttccttcttatagcacatgcacttccttacaatgacatgatttgtattatcctcacatgtgtttactactgctggggccttccttcatcctctgagggctattttgtactttctgcagcaatcagcttaataacaacacttattgcacctgtctctctctgagaacacggtgtgtctcgacacgtaccacgtacgtggaaacacaagagcccaccacttgaatttctaagaccatttcattctgaaacttcttatcaattacctaaatctcaacgaaaaacaatttactgaagccgactcccctccccatctccctctcaacctcaacccacctgcatgcatctcccccagaggaaacactgagggtaggggacaggaggctcaggacgcgccctctgaatcgagtgtttcttcttcacaagtcaccaagagaggacatgagggggaaagtccttttttgcccttctccaaaaaataaccttccacagagacaaactgtccttctatccacttttatcttttaataaatatcaaaaggaaaaagctgcaagggtgcaaagggcctgtgccagaagaaaacacacacagggaaaccgctttttttaatcaattgtagagaatagtcatttttaatctaaattagagaattgtgatacaatggcagtcctcaaaggcgtaacgagttcatctttctttcaccataggggttatagttggcttgtgctactctggaatcattttactgtttgtttttattatcttaagtgctaattaaaaaaaaaataaaattttaaaaaaacctgtagtttcattacctttttgaataatgtcatacaaaaaatgtatttgtttttttgtgctgtgagaattgatgtttgtagattaataatcattttgtttagaattacaaaatagtttttaaatattgtctgagaaaagccaaagttaatgcaacctagtggaaactgtaagaccatttgagtattgtttgttttattgatgcatttggattttgttgtttgatggaatttgagccaaaaaaaaaatacgcaggctttcctatttctacaactgattgtacttatgcattttgtaccagtggaactttttatactggagattaaaaaaaaaatggaaatttttgtggcttgctctggtgggcccctgacaatgactgatttcaagtttgatttcgggttgattgattgattgattgatagaaagaaagttgcttttcttttgagaattaaaaactttggcttgatttcttttttccctttgcttatatctagcattagaattttgtcttaaaataacagcggtaagtttcactttttattctgtattgtgcagttacacaataaggtaattagatttagaagtactcagtcactttaagtggataaatgtattagttaaaactttagggtttgcttttttgctgtttagatcaaagttttttctgattcttctgtcctcattgtgaacataaccgtgtagttgaaacagtcaaacttatttttgtaatgtatgttattgtgtgatgcagttttttgcttctgtctccaatattaaaccattttccta

SEQ ID NO: 421107 - DNA, 5669 bp, Homo sapiens
agctctgcctttctttcccagccacagccagggtagggctgataaggcgctgatgcgttgatggcagccttgcagagctagacctgcacttaacttgcagctgcctcccgagcctccaagatgtccacgccctgggtgacaggcggcagggcgctgccccgtgctcccccggctctgctcgacagcagcacgcagtgagagcctcgccgccgccgaggagcaactcatgtaacggcacagccaacaagatgaacggagctttggatcactcagaccaaccagacccagatgccattaagatgtttgtcggacagatcccccggtcatggtcggaaaaggagctgaaagaactttttgagccttacggagccgtctaccagatcaacgtcctccgggaccggagtcagaaccctccgcagagtaaaggttgttgtttcgtaacattttatacaagaaaagctgcacttgaggcccagaatgcactgcacaatattaaaactttacctgggatgcatcatcccattcagatgaaacctgcagatagtgaaaagtccaacgctgtggaagacagaaaattgttcataggaatggtttcgaagaaatgtaatgagaacgacatcagggtgatgttctctccatttggccagatagaagaatgccggatcctccggggacctgatgggctgagtcgaggctgtgcgtttgtcacattttctacaagggcaatggcacagaatgcaatcaaagccatgcatcagtctcagaccatggagggctgctcttcacctatcgtggtgaagtttgctgacactcagaaggacaaagagcaaaggcgcctccagcagcagctcgctcagcagatgcagcagctcaacactgccacctgggggaacctgacagggctgggcggactgaccccacagtatctggcgctcctgcagcaggccacctcctccagcaacctgggtgcgttcagcggcattcaacaaatggcaggcatgaatgctttacagttgcagaacctggcgacgctggctgctgctgcagctgcggcccagacctcagccaccagcaccaatgcaaaccctctctctaccacgagcagcgccctgggagccctcacgagtcccgtggctgcttcaacccccaactccactgctggtgcagccatgaactccttgacctctctcgggactctgcaaggactggctggagccactgttggactgaataatattaatgcactagcagttgctcaaatgctctcaggtatggcggctctgaatggaggacttggcgccacaggcttgacgaatggcacggctggcaccatggacgccctcacccaggcctactcaggaattcaacagtacgcagccgccgcgctgcccactctgtacagccagagcctgctgcagcagcagagcgctgcaggcagccagaaggaaggtccagagggggcaaacctctttatttaccaccttccacaggaatttggagaccaggacattctgcagatgttcatgccttttggaaatgttatctctgctaaagtcttcattgacaaacagaccaatctgagcaagtgctttggttttgttagctacgacaatccagtctctgcacaagctgctatccaagctatgaatggctttcagatcggcatgaaacgcttgaaggtgcagctgaagcgttccaaaaacgacagcaaaccttactgatcctaaccccagaggctccctgctctcattttagctttcttaggacatcttcatgcccgttagttcatcgtttgcctagcatgtccctgtggcgtctcaaaaaaaagtttcatcgtcccgtcattgtttctgatgtctttctgacctcacatcatatttggttctcctactgacctttgatctagtttgacctttgaaatttgcatgtgacctcatctagctatgaattctgggaagtcaatgtgaaaaacattgctgcattcatgcaagactgaaatttattattagacaaattcattatagaaaaaacctgtggcaaaaacgtttctttcttattttttttcttttcctaaaacagacttgaaagtattatacagggattggcattcttcccggtcactggtaacaatagcaatatgtgtccagggacacagaatgttggtttctaacagactacttccaaaaacagtttgagaaaaaaactgtctgattttaagtctctagaggtctgtaatagtttttacatttttcaggcagtgtaaagttttttgataaggccattttaggtggctcactttctcattaagatatatatatagaaccactttttgtagattagtataagaaaaatatttaccctgttttggggcaaatgctacctatttgtgtcaccttttgctgaactcacagttagacaatccatggtttaatgcacatgaaattacctatattttatactgtttcaatgtacaggagaaaggttactgtaaactgtgttatgttggtgcttctgtgaattaagttgtggtttcatcatgagtcttaatgttctttgttgataagacaagtttagaattggtttacttaatacaaaaaaaaaaaaaagaatttcaaaaaaaaaagttgtttgcttaaaaaaaatttcatgtgagggaaaaaaaaaaaaacctattccagaataagttttgtgttggcttgtgaagcattgatgtcattttttttaattgtggactatttagatgtgtttgtgttcagcaaaatgtgatctgtttttttcttttaaagaaaaaaagtgaaaatatatagtgccaaattccaaaggtacttccttcctagagcttcagtgtgtttcttgtgagaagtaatttgataacatgggtattttattatgtgttttgtataaatccctaatatttaaaaaaaaaaacaaaacaaaaaaaggttacaaagtttgttaacttgctatcctgtggtcttgttgcctgaaattgttattgtttgttatttctctctgatgttttttgtaagacattgtataagtgcccatgtcccacttttttaaccactccgcacatcagtgctgtgaaggcaacctcaccatgtattttcttcataatctatggaaacctctaaggtgagaaagttttgaacttttaaccctttctacccagagctatctggaatgttgatgactttttatactgtcatgatttgagtttgttttggggtgtttccaatttggatttttttccctgcatctatcctctaagttgtttcggtttgactactttgttctttggttaagatccaaaagaaaacagaaaacaattccacgaggccaatctaaagggaaaaaatcctacactacttttactacttttgattatttctcatttttgggaaaagaattcctaatgtgctactagaattccttcttcagttttaacgagtaattggataaaccctgagggaaaacggaggtagattcagcacctaacaatcctgtatgcttttgagatcacgtttagtgctatgtcctagtctagaatattttcatataccttgcagtaaaacgactttgtggcaggacagtctcttgaggggttttgtttctgtttcctaaatactcctaaataatatttctaatcagccattatgctggggcatctctgatcccagtaggtacctctgaatataccaggtgtctggagttagaagcccatagccctttcccagcctttttggtttttttaattgaacacatttcatctaagtaaagctcagttctttatcacaatttactgaccaaatacctagcaccagttcctgctgccactttttaaagtgccatatgactttctacgaacaggtaccttgctgtcttgacaaatcctaatgtcacgcctacagccccaacacaagctccagtcttcctcttcggcatgccctggaagcttcttggcctcagctccccttccccgctcagcaccctgttaggatcagtgtgtgtggatgggatagccctgggatggaaaggactagcctctactgatgcaaaaaaacaaaaagcaacacaaacgtttccttcttatagcacatgcacttccttacaatgacatgatttgtattatcctcacatgtgtttactactgctggggccttccttcatcctctgagggctattttgtactttctgcagcaatcagcttaataacaacacttattgcacctgtctctctctgagaacacggtgtgtctcgacacgtaccacgtacgtggaaacacaagagcccaccacttgaatttctaagaccatttcattctgaaacttcttatcaattacctaaatctcaacgaaaaacaatttactgaagccgactcccctccccatctccctctcaacctcaacccacctgcatgcatctcccccagaggaaacactgagggtaggggacaggaggctcaggacgcgccctctgaatcgagtgtttcttcttcacaagtcaccaagagaggacatgagggggaaagtccttttttgcccttctccaaaaaataaccttccacagagacaaactgtccttctatccacttttatcttttaataaatatcaaaaggaaaaagctgcaagggtgcaaagggcctgtgccagaagaaaacacacacagggaaaccgctttttttaatcaattgtagagaatagtcatttttaatctaaattagagaattgtgatacaatggcagtcctcaaaggcgtaacgagttcatctttctttcaccataggggttatagttggcttgtgctactctggaatcattttactgtttgtttttattatcttaagtgctaattaaaaaaaaaataaaattttaaaaaaacctgtagtttcattacctttttgaataatgtcatacaaaaaatgtatttgtttttttgtgctgtgagaattgatgtttgtagattaataatcattttgtttagaattacaaaatagtttttaaatattgtctgagaaaagccaaagttaatgcaacctagtggaaactgtaagaccatttgagtattgtttgttttattgatgcatttggattttgttgtttgatggaatttgagccaaaaaaaaaatacgcaggctttcctatttctacaactgattgtacttatgcattttgtaccagtggaactttttatactggagattaaaaaaaaaatggaaatttttgtggcttgctctggtgggcccctgacaatgactgatttcaagtttgatttcgggttgattgattgattgattgatagaaagaaagttgcttttcttttgagaattaaaaactttggcttgatttcttttttccctttgcttatatctagcattagaattttgtcttaaaataacagcggtaagtttcactttttattctgtattgtgcagttacacaataaggtaattagatttagaagtactcagtcactttaagtggataaatgtattagttaaaactttagggtttgcttttttgctgtttagatcaaagttttttctgattcttctgtcctcattgtgaacataaccgtgtagttgaaacagtcaaacttatttttgtaatgtatgttattgtgtgatgcagttttttgcttctgtctccaatattaaaccattttccta

SEQ ID NO: 421108 - DNA, 6972 bp, Homo sapiens
acaagtgccggctcggcggccgccgggggaggccgcgcgcacctgtccctgcccgtctcgcgccgcccgcggccgctcggacgcgcgcagagccgccccccgccgctgccgccgcgtgcgcccgcgaacatgacttctgccttcaagctggatttcctcccggacatgatggtcgagggccgcctgctcgttcctgacagaattaacggcacagccaacaagatgaacggagctttggatcactcagaccaaccagacccagatgccattaagatgtttgtcggacagatcccccggtcatggtcggaaaaggagctgaaagaactttttgagccttacggagccgtctaccagatcaacgtcctccgggaccggagtcagaaccctccgcagagtaaaggttgttgtttcgtaacattttatacaagaaaagctgcacttgaggcccagaatgcactgcacaatattaaaactttacctgggatgcatcatcccattcagatgaaacctgcagatagtgaaaagtccaacgctgtggaagacagaaaattgttcataggaatggtttcgaagaaatgtaatgagaacgacatcagggtgatgttctctccatttggccagatagaagaatgccggatcctccggggacctgatgggctgagtcgaggctgtgcgtttgtcacattttctacaagggcaatggcacagaatgcaatcaaagccatgcatcagtctcagaccatggagggctgctcttcacctatcgtggtgaagtttgctgacactcagaaggacaaagagcaaaggcgcctccagcagcagctcgctcagcagatgcagcagctcaacactgccacctgggggaacctgacagggctgggcggactgaccccacagtatctggcgctcctgcagcaggccacctcctccagcaacctgggtgcgttcagcggcattcaacaaatggcaggcatgaatgctttacagttgcagaacctggcgacgctggctgctgctgcagctgcggcccagacctcagccaccagcaccaatgcaaaccctctctctaccacgagcagcgccctgggagccctcacgagtcccgtggctgcttcaacccccaactccactgctggtgcagccatgaactccttgacctctctcgggactctgcaaggactggctggagccactgttggactgaataatattaatgcactagcagttgctcaaatgctctcaggtatggcggctctgaatggaggacttggcgccacaggcttgacgaatggcacggctggcaccatggacgccctcacccaggcctactcaggaattcaacagtacgcagccgccgcgctgcccactctgtacagccagagcctgctgcagcagcagagcgctgcaggcagccagaaggaaggtccagagggggcaaacctctttatttaccaccttccacaggaatttggagaccaggacattctgcagatgttcatgccttttggaaatgttatctctgctaaagtcttcattgacaaacagaccaatctgagcaagtgctttggttttgttagctacgacaatccagtctctgcacaagctgctatccaagctatgaatggctttcagatcggcatgaaacgcttgaaggtgcagctgaagcgttccaaaaacgacagcaaaccttactgatcctaaccccagaggctccctgctctcattttagctttcttaggacatcttcatgcccgttagttcatcgtttgcctagcatgtccctgtggcgtctcaaaaaaaagtttcatcgtcccgtcattgtttctgatgtctttctgacctcacatcatatttggttctcctactgacctttgatctagtttgacctttgaaatttgcatgtgacctcatctagctatgaattctgggaagtcaatgtgaaaaacattgctgcattcatgcaagactgaaatttattattagacaaattcattatagaaaaaacctgtggcaaaaacgtttctttcttattttttttcttttcctaaaacagacttgaaagtattatacagggattggcattcttcccggtcactggtaacaatagcaatatgtgtccagggacacagaatgttggtttctaacagactacttccaaaaacagtttgagaaaaaaactgtctgattttaagtctctagaggtctgtaatagtttttacatttttcaggcagtgtaaagttttttgataaggccattttaggtggctcactttctcattaagatatatatatagaaccactttttgtagattagtataagaaaaatatttaccctgttttggggcaaatgctacctatttgtgtcaccttttgctgaactcacagttagacaatccatggtttaatgcacatgaaattacctatattttatactgtttcaatgtacaggagaaaggttactgtaaactgtgttatgttggtgcttctgtgaattaagttgtggtttcatcatgagtcttaatgttctttgttgataagacaagtttagaattggtttacttaatacaaaaaaaaaaaaaagaatttcaaaaaaaaaagttgtttgcttaaaaaaaatttcatgtgagggaaaaaaaaaaaaacctattccagaataagttttgtgttggcttgtgaagcattgatgtcattttttttaattgtggactatttagatgtgtttgtgttcagcaaaatgtgatctgtttttttcttttaaagaaaaaaagtgaaaatatatagtgccaaattccaaaggtacttccttcctagagcttcagtgtgtttcttgtgagaagtaatttgataacatgggtattttattatgtgttttgtataaatccctaatatttaaaaaaaaaaacaaaacaaaaaaaggttacaaagtttgttaacttgctatcctgtggtcttgttgcctgaaattgttattgtttgttatttctctctgatgttttttgtaagacattgtataagtgcccatgtcccacttttttaaccactccgcacatcagtgctgtgaaggcaacctcaccatgtattttcttcataatctatggaaacctctaaggtgagaaagttttgaacttttaaccctttctacccagagctatctggaatgttgatgactttttatactgtcatgatttgagtttgttttggggtgtttccaatttggatttttttccctgcatctatcctctaagttgtttcggtttgactactttgttctttggttaagatccaaaagaaaacagaaaacaattccacgaggccaatctaaagggaaaaaatcctacactacttttactacttttgattatttctcatttttgggaaaagaattcctaatgtgctactagaattccttcttcagttttaacgagtaattggataaaccctgagggaaaacggaggtagattcagcacctaacaatcctgtatgcttttgagatcacgtttagtgctatgtcctagtctagaatattttcatataccttgcagtaaaacgactttgtggcaggacagtctcttgaggggttttgtttctgtttcctaaatactcctaaataatatttctaatcagccattatgctggggcatctctgatcccagtaggtacctctgaatataccaggtgtctggagttagaagcccatagccctttcccagcctttttggtttttttaattgaacacatttcatctaagtaaagctcagttctttatcacaatttactgaccaaatacctagcaccagttcctgctgccactttttaaagtgccatatgactttctacgaacaggtaccttgctgtcttgacaaatcctaatgtcacgcctacagccccaacacaagctccagtcttcctcttcggcatgccctggaagcttcttggcctcagctccccttccccgctcagcaccctgttaggatcagtgtgtgtggatgggatagccctgggatggaaaggactagcctctactgatgcaaaaaaacaaaaagcaacacaaacgtttccttcttatagcacatgcacttccttacaatgacatgatttgtattatcctcacatgtgtttactactgctggggccttccttcatcctctgagggctattttgtactttctgcagcaatcagcttaataacaacacttattgcacctgtctctctctgagaacacggtgtgtctcgacacgtaccacgtacgtggaaacacaagagcccaccacttgaatttctaagaccatttcattctgaaacttcttatcaattacctaaatctcaacgaaaaacaatttactgaagccgactcccctccccatctccctctcaacctcaacccacctgcatgcatctcccccagaggaaacactgagggtaggggacaggaggctcaggacgcgccctctgaatcgagtgtttcttcttcacaagtcaccaagagaggacatgagggggaaagtccttttttgcccttctccaaaaaataaccttccacagagacaaactgtccttctatccacttttatcttttaataaatatcaaaaggaaaaagctgcaagggtgcaaagggcctgtgccagaagaaaacacacacagggaaaccgctttttttaatcaattgtagagaatagtcatttttaatctaaattagagaattgtgatacaatggcagtcctcaaaggcgtaacgagttcatctttctttcaccataggggttatagttggcttgtgctactctggaatcattttactgtttgtttttattatcttaagtgctaattaaaaaaaaaataaaattttaaaaaaacctgtagtttcattacctttttgaataatgtcatacaaaaaatgtatttgtttttttgtgctgtgagaattgatgtttgtagattaataatcattttgtttagaattacaaaatagtttttaaatattgtctgagaaaagccaaagttaatgcaacctagtggaaactgtaagaccatttgagtattgtttgttttattgatgcatttggattttgttgtttgatggaatttgagccaaaaaaaaaatacgcaggctttcctatttctacaactgattgtacttatgcattttgtaccagtggaactttttatactggagattaaaaaaaaaatggaaatttttgtggcttgctctggtgggcccctgacaatgactgatttcaagtttgatttcgggttgattgattgattgattgatagaaagaaagttgcttttcttttgagaattaaaaactttggcttgatttcttttttccctttgcttatatctagcattagaattttgtcttaaaataacagcggtaagtttcactttttattctgtattgtgcagttacacaataaggtaattagatttagaagtactcagtcactttaagtggataaatgtattagttaaaactttagggtttgcttttttgctgtttagatcaaagttttttctgattcttctgtcctcattgtgaacataaccgtgtagttgaaacagtcaaacttatttttgtaatgtatgttattgtgtgatgcagttttttgcttctgtctccaatattaaaccattttcctaatacttgtttctctctctgcgtgttgtattgttggtagtcattatatgttggtgatacatctgcacacctcactgtttcacgtatctgtttttttctctatgttgtgtaaaaagatacagtcgattccacttaagtgaatatctgatttggggaagaggaaactgcacagcagccacctttgatttatgtacaaccgcccacttgaactcctgcttccaagatttatacacttttttcctacagttcacctcagtaactgcctttggggttggatttgccaaggtgttttacggtcttttgaccacacaggttaatttccccttctctcccctccctcatgagtctatccacgcagttcttaacatacattccaaactgctgcggggtttcctctccacacccacgaggccaaacccgcatcattacagtccaactcttcttagacactaatcactttctaaaagaagtgagttctccagggaagaaaaatcaacttagccagtgaaaagggttaaacttaagtctattatttgttgccctcaatcaaaagatatgtatagaaaagtcatttaaattatttatttctacaagctaattgaatccaggagcagctttaattattaacactaacggaagagaaaagaagtatttccaagggctcaaatggaagctgtactcagtccggtggaggcagggggaggtaaagtttctcacactcaagtcgtcttcatagtttactgtccttttccaaacaaaagctaataacgccatacgcatccacacactccctcctggatgaacctaagtctcgtccccactgtcaccccaaggccagttatcaaaaactgttccttctctgccctcaaagactgaagccgcagccctgttctgcctctgctcaggaatctgattgctcttaaagtgctcttacaagattccgtcgatgtttgctccctctgtcttatctctccttccagtattttcagacgcacaagctctgactcaggccacccagcacctggcagccttcctctgcgtgccagtggaaatctctcccagtagggtgctcaggctcttcaccctctcgttgcagcagcccctctggcccgagattgtattttctagtctgctcaagaacagaggggcctggcgaggtggaggaagggaggctccctccccggggctggccgcctcagtgatggtgatgccaccagctccagcctgcacggatggagctcacttcctaccatcacttctgctttcagtctcctcatagccttcggcagtctcctctgaaaaaacactgcctacgttagtgggaaaggatg

SEQ ID NO: 421109 - DNA, 7175 bp, Homo sapiens
agctctgcctttctttcccagccacagccagggtagggctgataaggcgctgatgcgttgatggcagccttgcagagctagacctgcacttaacttgcagctgcctcccgagcctccaagatgtccacgccctgggtgacaggcggcagggcgctgccccgtgctcccccggctctgctcgacagcagcacgcagtgagagcctcgccgccgccgaggagcaactcatggtgcctccgctttgttttagttcatcaaatttctacgactcattaggcactttgccactgctcttcttcctcctccttccgcctccccgctcccccacccccactattttttcttcctgtccctcatcgtgccgccctaactctggctcccggttccgtttttgacagtaacggcacagccaacaagatgaacggagctttggatcactcagaccaaccagacccagatgccattaagatgtttgtcggacagatcccccggtcatggtcggaaaaggagctgaaagaactttttgagccttacggagccgtctaccagatcaacgtcctccgggaccggagtcagaaccctccgcagagtaaaggttgttgtttcgtaacattttatacaagaaaagctgcacttgaggcccagaatgcactgcacaatattaaaactttacctgggatgcatcatcccattcagatgaaacctgcagatagtgaaaagtccaacgctgtggaagacagaaaattgttcataggaatggtttcgaagaaatgtaatgagaacgacatcagggtgatgttctctccatttggccagatagaagaatgccggatcctccggggacctgatgggctgagtcgaggctgtgcgtttgtcacattttctacaagggcaatggcacagaatgcaatcaaagccatgcatcagtctcagaccatggagggctgctcttcacctatcgtggtgaagtttgctgacactcagaaggacaaagagcaaaggcgcctccagcagcagctcgctcagcagatgcagcagctcaacactgccacctgggggaacctgacagggctgggcggactgaccccacagtatctggcgctcctgcagcaggccacctcctccagcaacctgggtgcgttcagcggcattcaacaaatggcaggcatgaatgctttacagttgcagaacctggcgacgctggctgctgctgcagctgcggcccagacctcagccaccagcaccaatgcaaaccctctctctaccacgagcagcgccctgggagccctcacgagtcccgtggctgcttcaacccccaactccactgctggtgcagccatgaactccttgacctctctcgggactctgcaaggactggctggagccactgttggactgaataatattaatgcactagcagatggcggctctgaatggaggacttggcgccacaggcttgacgaatggcacggctggcaccatggacgccctcacccaggcctactcaggaattcaacagtacgcagccgccgcgctgcccactctgtacagccagagcctgctgcagcagcagagcgctgcaggcagccagaaggaaggtccagagggggcaaacctctttatttaccaccttccacaggaatttggagaccaggacattctgcagatgttcatgccttttggaaatgttatctctgctaaagtcttcattgacaaacagaccaatctgagcaagtgctttggttttgttagctacgacaatccagtctctgcacaagctgctatccaagctatgaatggctttcagatcggcatgaaacgcttgaaggtgcagctgaagcgttccaaaaacgacagcaaaccttactgatcctaaccccagaggctccctgctctcattttagctttcttagggtaagtcccacgagccagcctgtctcaacagggaaggcagaggaggaccacattgccaacttttaccaagagagacggttatttttacaataaggcctccatgtccccacccacttcccctacccagtttgccataattaaaacttgggctactttgtttctattgagtaattcctcctccagttgtgccactgtattctcctttgttttgcgatttgaatctccttttacctttttttttaatttttttcatttttgcttttttttaaagagaagcatatacacaaataaatggcatcttgagaatttaaaaggcaaacaaacaaacgctaatgtgcaattctaactctgaaaccactggtgccccgagagcactgcctggagaattcacccctccttgcccggcgcccgcccccggagggagggcccggtgcttagaggttaacttggtggcctaggagagggagaagccaggagaagcacttactccaaccacacgtctttccactacatcggcttgttttactaagtaggattttattttagggttcaaagaaacatgacatttattggtcaaaatattacactggttgtctattttgttattgttttattttagtttttagaaaggattaatgtacaaaaagatttagagatctgtttcttaaagctacagggtttaaaaaataaaaatgagtgaaaatacttgatgtttcttgaaagataaatttaataataataaataaatacataaatacataaataaaaaagaaagccacaggcctgtaaattttatttgtaaaaaagcatttctatttttatacaaaatttttactgcctcagaaataatggaagttatttattgcctattgttaacttattgggtacctaaagagcagttctctgtctagctagaaccttctgaagtagtctctagaggaattgttctaggaatgggctttttttcaccgttgaaccctagacctgaagttcatgctttatcctctcgttgtttgtatctgtctgattattttgtttgtaacttccattatctagtttacagttcagtcgtctgactttccccgtatgtcacatttgttgaaactggaccttctccccctgtccctcaccccaaaacacccggaatccatcccctttcgctctctccagatggattctcttggggtttcattgtgctgtggataaggagtgtaagaaatgcaaattatgtgaatggctcggagactccctaatgacctaagatttgcattagtttttctcctgcacccttaaaagtgattttgttgccgctgcatagattctgtgtaactttttactcttccttgttttttccctagacatcttcatgcccgttagttcatcgtttgcctagcatgtccctgtggcgtctcaaaaaaaagtttcatcgtcccgtcattgtttctgatgtctttctgacctcacatcatatttggttctcctactgacctttgatctagtttgacctttgaaatttgcatgtgacctcatctagctatgaattctgggaagtcaatgtgaaaaacattgctgcattcatgcaagactgaaatttattattagacaaattcattatagaaaaaacctgtggcaaaaacgtttctttcttattttttttcttttcctaaaacagacttgaaagtattatacagggattggcattcttcccggtcactggtaacaatagcaatatgtgtccagggacacagaatgttggtttctaacagactacttccaaaaacagtttgagaaaaaaactgtctgattttaagtctctagaggtctgtaatagtttttacatttttcaggcagtgtaaagttttttgataaggccattttaggtggctcactttctcattaagatatatatatagaaccactttttgtagattagtataagaaaaatatttaccctgttttggggcaaatgctacctatttgtgtcaccttttgctgaactcacagttagacaatccatggtttaatgcacatgaaattacctatattttatactgtttcaatgtacaggagaaaggttactgtaaactgtgttatgttggtgcttctgtgaattaagttgtggtttcatcatgagtcttaatgttctttgttgataagacaagtttagaattggtttacttaatacaaaaaaaaaaaaaagaatttcaaaaaaaaaagttgtttgcttaaaaaaaatttcatgtgagggaaaaaaaaaaaaacctattccagaataagttttgtgttggcttgtgaagcattgatgtcattttttttaattgtggactatttagatgtgtttgtgttcagcaaaatgtgatctgtttttttcttttaaagaaaaaaagtgaaaatatatagtgccaaattccaaaggtacttccttcctagagcttcagtgtgtttcttgtgagaagtaatttgataacatgggtattttattatgtgttttgtataaatccctaatatttaaaaaaaaaaacaaaacaaaaaaaggttacaaagtttgttaacttgctatcctgtggtcttgttgcctgaaattgttattgtttgttatttctctctgatgttttttgtaagacattgtataagtgcccatgtcccacttttttaaccactccgcacatcagtgctgtgaaggcaacctcaccatgtattttcttcataatctatggaaacctctaaggtgagaaagttttgaacttttaaccctttctacccagagctatctggaatgttgatgactttttatactgtcatgatttgagtttgttttggggtgtttccaatttggatttttttccctgcatctatcctctaagttgtttcggtttgactactttgttctttggttaagatccaaaagaaaacagaaaacaattccacgaggccaatctaaagggaaaaaatcctacactacttttactacttttgattatttctcatttttgggaaaagaattcctaatgtgctactagaattccttcttcagttttaacgagtaattggataaaccctgagggaaaacggaggtagattcagcacctaacaatcctgtatgcttttgagatcacgtttagtgctatgtcctagtctagaatattttcatataccttgcagtaaaacgactttgtggcaggacagtctcttgaggggttttgtttctgtttcctaaatactcctaaataatatttctaatcagccattatgctggggcatctctgatcccagtaggtacctctgaatataccaggtgtctggagttagaagcccatagccctttcccagcctttttggtttttttaattgaacacatttcatctaagtaaagctcagttctttatcacaatttactgaccaaatacctagcaccagttcctgctgccactttttaaagtgccatatgactttctacgaacaggtaccttgctgtcttgacaaatcctaatgtcacgcctacagccccaacacaagctccagtcttcctcttcggcatgccctggaagcttcttggcctcagctccccttccccgctcagcaccctgttaggatcagtgtgtgtggatgggatagccctgggatggaaaggactagcctctactgatgcaaaaaaacaaaaagcaacacaaacgtttccttcttatagcacatgcacttccttacaatgacatgatttgtattatcctcacatgtgtttactactgctggggccttccttcatcctctgagggctattttgtactttctgcagcaatcagcttaataacaacacttattgcacctgtctctctctgagaacacggtgtgtctcgacacgtaccacgtacgtggaaacacaagagcccaccacttgaatttctaagaccatttcattctgaaacttcttatcaattacctaaatctcaacgaaaaacaatttactgaagccgactcccctccccatctccctctcaacctcaacccacctgcatgcatctcccccagaggaaacactgagggtaggggacaggaggctcaggacgcgccctctgaatcgagtgtttcttcttcacaagtcaccaagagaggacatgagggggaaagtccttttttgcccttctccaaaaaataaccttccacagagacaaactgtccttctatccacttttatcttttaataaatatcaaaaggaaaaagctgcaagggtgcaaagggcctgtgccagaagaaaacacacacagggaaaccgctttttttaatcaattgtagagaatagtcatttttaatctaaattagagaattgtgatacaatggcagtcctcaaaggcgtaacgagttcatctttctttcaccataggggttatagttggcttgtgctactctggaatcattttactgtttgtttttattatcttaagtgctaattaaaaaaaaaataaaattttaaaaaaacctgtagtttcattacctttttgaataatgtcatacaaaaaatgtatttgtttttttgtgctgtgagaattgatgtttgtagattaataatcattttgtttagaattacaaaatagtttttaaatattgtctgagaaaagccaaagttaatgcaacctagtggaaactgtaagaccatttgagtattgtttgttttattgatgcatttggattttgttgtttgatggaatttgagccaaaaaaaaaatacgcaggctttcctatttctacaactgattgtacttatgcattttgtaccagtggaactttttatactggagattaaaaaaaaaatggaaatttttgtggcttgctctggtgggcccctgacaatgactgatttcaagtttgatttcgggttgattgattgattgattgatagaaagaaagttgcttttcttttgagaattaaaaactttggcttgatttcttttttccctttgcttatatctagcattagaattttgtcttaaaataacagcggtaagtttcactttttattctgtattgtgcagttacacaataaggtaattagatttagaagtactcagtcactttaagtggataaatgtattagttaaaactttagggtttgcttttttgctgtttagatcaaagttttttctgattcttctgtcctcattgtgaacataaccgtgtagttgaaacagtcaaacttatttttgtaatgtatgttattgtgtgatgcagttttttgcttctgtctccaatattaaaccattttccta

SEQ ID NO: 421110 - DNA, 7095 bp, Homo sapiens
agctctgcctttctttcccagccacagccagggtagggctgataaggcgctgatgcgttgatggcagccttgcagagctagacctgcacttaacttgcagctgcctcccgagcctccaagatgtccacgccctgggtgacaggcggcagggcgctgccccgtgctcccccggctctgctcgacagcagcacgcagtgagagcctcgccgccgccgaggagcaactcatggtgcctccgctttgttttagttcatcaaatttctacgactcattaggcactttgccactgctcttcttcctcctccttccgcctccccgctcccccacccccactattttttcttcctgtccctcatcgtgccgccctaactctggctcccggttccgtttttgacagtaacggcacagccaacaagatgaacggagctttggatcactcagaccaaccagacccagatgccattaagatgtttgtcggacagatcccccggtcatggtcggaaaaggagctgaaagaactttttgagccttacggagccgtctaccagatcaacgtcctccgggaccggagtcagaaccctccgcagagtaaaggttgttgtttcgtaacattttatacaagaaaagctgcacttgaggcccagaatgcactgcacaatattaaaactttacctgggatgcatcatcccattcagatgaaacctgcagatagtgaaaagtccaacgctgtggaagacagaaaattgttcataggaatggtttcgaagaaatgtaatgagaacgacatcagggtgatgttctctccatttggccagatagaagaatgccggatcctccggggacctgatgggctgagtcgagggctgctcttcacctatcgtggtgaagtttgctgacactcagaaggacaaagagcaaaggcgcctccagcagcagctcgctcagcagatgcagcagctcaacactgccacctgggggaacctgacagggctgggcggactgaccccacagtatctggcgctcctgcagcaggccacctcctccagcaacctgggtgcgttcagcggcattcaacaaatggcaggcatgaatgctttacagttgcagaacctggcgacgctggctgctgctgcagctgcggcccagacctcagccaccagcaccaatgcaaaccctctctctaccacgagcagcgccctgggagccctcacgagtcccgtggctgcttcaacccccaactccactgctggtgcagccatgaactccttgacctctctcgggactctgcaaggactggctggagccactgttggactgaataatattaatgcactagcagatggcggctctgaatggaggacttggcgccacaggcttgacgaatggcacggctggcaccatggacgccctcacccaggcctactcaggaattcaacagtacgcagccgccgcgctgcccactctgtacagccagagcctgctgcagcagcagagcgctgcaggcagccagaaggaaggtccagagggggcaaacctctttatttaccaccttccacaggaatttggagaccaggacattctgcagatgttcatgccttttggaaatgttatctctgctaaagtcttcattgacaaacagaccaatctgagcaagtgctttggttttgttagctacgacaatccagtctctgcacaagctgctatccaagctatgaatggctttcagatcggcatgaaacgcttgaaggtgcagctgaagcgttccaaaaacgacagcaaaccttactgatcctaaccccagaggctccctgctctcattttagctttcttagggtaagtcccacgagccagcctgtctcaacagggaaggcagaggaggaccacattgccaacttttaccaagagagacggttatttttacaataaggcctccatgtccccacccacttcccctacccagtttgccataattaaaacttgggctactttgtttctattgagtaattcctcctccagttgtgccactgtattctcctttgttttgcgatttgaatctccttttacctttttttttaatttttttcatttttgcttttttttaaagagaagcatatacacaaataaatggcatcttgagaatttaaaaggcaaacaaacaaacgctaatgtgcaattctaactctgaaaccactggtgccccgagagcactgcctggagaattcacccctccttgcccggcgcccgcccccggagggagggcccggtgcttagaggttaacttggtggcctaggagagggagaagccaggagaagcacttactccaaccacacgtctttccactacatcggcttgttttactaagtaggattttattttagggttcaaagaaacatgacatttattggtcaaaatattacactggttgtctattttgttattgttttattttagtttttagaaaggattaatgtacaaaaagatttagagatctgtttcttaaagctacagggtttaaaaaataaaaatgagtgaaaatacttgatgtttcttgaaagataaatttaataataataaataaatacataaatacataaataaaaaagaaagccacaggcctgtaaattttatttgtaaaaaagcatttctatttttatacaaaatttttactgcctcagaaataatggaagttatttattgcctattgttaacttattgggtacctaaagagcagttctctgtctagctagaaccttctgaagtagtctctagaggaattgttctaggaatgggctttttttcaccgttgaaccctagacctgaagttcatgctttatcctctcgttgtttgtatctgtctgattattttgtttgtaacttccattatctagtttacagttcagtcgtctgactttccccgtatgtcacatttgttgaaactggaccttctccccctgtccctcaccccaaaacacccggaatccatcccctttcgctctctccagatggattctcttggggtttcattgtgctgtggataaggagtgtaagaaatgcaaattatgtgaatggctcggagactccctaatgacctaagatttgcattagtttttctcctgcacccttaaaagtgattttgttgccgctgcatagattctgtgtaactttttactcttccttgttttttccctagacatcttcatgcccgttagttcatcgtttgcctagcatgtccctgtggcgtctcaaaaaaaagtttcatcgtcccgtcattgtttctgatgtctttctgacctcacatcatatttggttctcctactgacctttgatctagtttgacctttgaaatttgcatgtgacctcatctagctatgaattctgggaagtcaatgtgaaaaacattgctgcattcatgcaagactgaaatttattattagacaaattcattatagaaaaaacctgtggcaaaaacgtttctttcttattttttttcttttcctaaaacagacttgaaagtattatacagggattggcattcttcccggtcactggtaacaatagcaatatgtgtccagggacacagaatgttggtttctaacagactacttccaaaaacagtttgagaaaaaaactgtctgattttaagtctctagaggtctgtaatagtttttacatttttcaggcagtgtaaagttttttgataaggccattttaggtggctcactttctcattaagatatatatatagaaccactttttgtagattagtataagaaaaatatttaccctgttttggggcaaatgctacctatttgtgtcaccttttgctgaactcacagttagacaatccatggtttaatgcacatgaaattacctatattttatactgtttcaatgtacaggagaaaggttactgtaaactgtgttatgttggtgcttctgtgaattaagttgtggtttcatcatgagtcttaatgttctttgttgataagacaagtttagaattggtttacttaatacaaaaaaaaaaaaaagaatttcaaaaaaaaaagttgtttgcttaaaaaaaatttcatgtgagggaaaaaaaaaaaaacctattccagaataagttttgtgttggcttgtgaagcattgatgtcattttttttaattgtggactatttagatgtgtttgtgttcagcaaaatgtgatctgtttttttcttttaaagaaaaaaagtgaaaatatatagtgccaaattccaaaggtacttccttcctagagcttcagtgtgtttcttgtgagaagtaatttgataacatgggtattttattatgtgttttgtataaatccctaatatttaaaaaaaaaaacaaaacaaaaaaaggttacaaagtttgttaacttgctatcctgtggtcttgttgcctgaaattgttattgtttgttatttctctctgatgttttttgtaagacattgtataagtgcccatgtcccacttttttaaccactccgcacatcagtgctgtgaaggcaacctcaccatgtattttcttcataatctatggaaacctctaaggtgagaaagttttgaacttttaaccctttctacccagagctatctggaatgttgatgactttttatactgtcatgatttgagtttgttttggggtgtttccaatttggatttttttccctgcatctatcctctaagttgtttcggtttgactactttgttctttggttaagatccaaaagaaaacagaaaacaattccacgaggccaatctaaagggaaaaaatcctacactacttttactacttttgattatttctcatttttgggaaaagaattcctaatgtgctactagaattccttcttcagttttaacgagtaattggataaaccctgagggaaaacggaggtagattcagcacctaacaatcctgtatgcttttgagatcacgtttagtgctatgtcctagtctagaatattttcatataccttgcagtaaaacgactttgtggcaggacagtctcttgaggggttttgtttctgtttcctaaatactcctaaataatatttctaatcagccattatgctggggcatctctgatcccagtaggtacctctgaatataccaggtgtctggagttagaagcccatagccctttcccagcctttttggtttttttaattgaacacatttcatctaagtaaagctcagttctttatcacaatttactgaccaaatacctagcaccagttcctgctgccactttttaaagtgccatatgactttctacgaacaggtaccttgctgtcttgacaaatcctaatgtcacgcctacagccccaacacaagctccagtcttcctcttcggcatgccctggaagcttcttggcctcagctccccttccccgctcagcaccctgttaggatcagtgtgtgtggatgggatagccctgggatggaaaggactagcctctactgatgcaaaaaaacaaaaagcaacacaaacgtttccttcttatagcacatgcacttccttacaatgacatgatttgtattatcctcacatgtgtttactactgctggggccttccttcatcctctgagggctattttgtactttctgcagcaatcagcttaataacaacacttattgcacctgtctctctctgagaacacggtgtgtctcgacacgtaccacgtacgtggaaacacaagagcccaccacttgaatttctaagaccatttcattctgaaacttcttatcaattacctaaatctcaacgaaaaacaatttactgaagccgactcccctccccatctccctctcaacctcaacccacctgcatgcatctcccccagaggaaacactgagggtaggggacaggaggctcaggacgcgccctctgaatcgagtgtttcttcttcacaagtcaccaagagaggacatgagggggaaagtccttttttgcccttctccaaaaaataaccttccacagagacaaactgtccttctatccacttttatcttttaataaatatcaaaaggaaaaagctgcaagggtgcaaagggcctgtgccagaagaaaacacacacagggaaaccgctttttttaatcaattgtagagaatagtcatttttaatctaaattagagaattgtgatacaatggcagtcctcaaaggcgtaacgagttcatctttctttcaccataggggttatagttggcttgtgctactctggaatcattttactgtttgtttttattatcttaagtgctaattaaaaaaaaaataaaattttaaaaaaacctgtagtttcattacctttttgaataatgtcatacaaaaaatgtatttgtttttttgtgctgtgagaattgatgtttgtagattaataatcattttgtttagaattacaaaatagtttttaaatattgtctgagaaaagccaaagttaatgcaacctagtggaaactgtaagaccatttgagtattgtttgttttattgatgcatttggattttgttgtttgatggaatttgagccaaaaaaaaaatacgcaggctttcctatttctacaactgattgtacttatgcattttgtaccagtggaactttttatactggagattaaaaaaaaaatggaaatttttgtggcttgctctggtgggcccctgacaatgactgatttcaagtttgatttcgggttgattgattgattgattgatagaaagaaagttgcttttcttttgagaattaaaaactttggcttgatttcttttttccctttgcttatatctagcattagaattttgtcttaaaataacagcggtaagtttcactttttattctgtattgtgcagttacacaataaggtaattagatttagaagtactcagtcactttaagtggataaatgtattagttaaaactttagggtttgcttttttgctgtttagatcaaagttttttctgattcttctgtcctcattgtgaacataaccgtgtagttgaaacagtcaaacttatttttgtaatgtatgttattgtgtgatgcagttttttgcttctgtctccaatattaaaccattttccta

SEQ ID NO: 421111 - DNA, 6927 bp, Homo sapiens
agctctgcctttctttcccagccacagccagggtagggctgataaggcgctgatgcgttgatggcagccttgcagagctagacctgcacttaacttgcagctgcctcccgagcctccaagatgtccacgccctgggtgacaggcggcagggcgctgccccgtgctcccccggctctgctcgacagcagcacgcagtgagagcctcgccgccgccgaggagcaactcatgtaacggcacagccaacaagatgaacggagctttggatcactcagaccaaccagacccagatgccattaagatgtttgtcggacagatcccccggtcatggtcggaaaaggagctgaaagaactttttgagccttacggagccgtctaccagatcaacgtcctccgggaccggagtcagaaccctccgcagagtaaaggttgttgtttcgtaacattttatacaagaaaagctgcacttgaggcccagaatgcactgcacaatattaaaactttacctgggatgcatcatcccattcagatgaaacctgcagatagtgaaaagtccaacgctgtggaagacagaaaattgttcataggaatggtttcgaagaaatgtaatgagaacgacatcagggtgatgttctctccatttggccagatagaagaatgccggatcctccggggacctgatgggctgagtcgagggctgctcttcacctatcgtggtgaagtttgctgacactcagaaggacaaagagcaaaggcgcctccagcagcagctcgctcagcagatgcagcagctcaacactgccacctgggggaacctgacagggctgggcggactgaccccacagtatctggcgctcctgcagcaggccacctcctccagcaacctgggtgcgttcagcggcattcaacaaatggcaggcatgaatgctttacagttgcagaacctggcgacgctggctgctgctgcagctgcggcccagacctcagccaccagcaccaatgcaaaccctctctctaccacgagcagcgccctgggagccctcacgagtcccgtggctgcttcaacccccaactccactgctggtgcagccatgaactccttgacctctctcgggactctgcaaggactggctggagccactgttggactgaataatattaatgcactagcagatggcggctctgaatggaggacttggcgccacaggcttgacgaatggcacggctggcaccatggacgccctcacccaggcctactcaggaattcaacagtacgcagccgccgcgctgcccactctgtacagccagagcctgctgcagcagcagagcgctgcaggcagccagaaggaaggtccagagggggcaaacctctttatttaccaccttccacaggaatttggagaccaggacattctgcagatgttcatgccttttggaaatgttatctctgctaaagtcttcattgacaaacagaccaatctgagcaagtgctttggttttgttagctacgacaatccagtctctgcacaagctgctatccaagctatgaatggctttcagatcggcatgaaacgcttgaaggtgcagctgaagcgttccaaaaacgacagcaaaccttactgatcctaaccccagaggctccctgctctcattttagctttcttagggtaagtcccacgagccagcctgtctcaacagggaaggcagaggaggaccacattgccaacttttaccaagagagacggttatttttacaataaggcctccatgtccccacccacttcccctacccagtttgccataattaaaacttgggctactttgtttctattgagtaattcctcctccagttgtgccactgtattctcctttgttttgcgatttgaatctccttttacctttttttttaatttttttcatttttgcttttttttaaagagaagcatatacacaaataaatggcatcttgagaatttaaaaggcaaacaaacaaacgctaatgtgcaattctaactctgaaaccactggtgccccgagagcactgcctggagaattcacccctccttgcccggcgcccgcccccggagggagggcccggtgcttagaggttaacttggtggcctaggagagggagaagccaggagaagcacttactccaaccacacgtctttccactacatcggcttgttttactaagtaggattttattttagggttcaaagaaacatgacatttattggtcaaaatattacactggttgtctattttgttattgttttattttagtttttagaaaggattaatgtacaaaaagatttagagatctgtttcttaaagctacagggtttaaaaaataaaaatgagtgaaaatacttgatgtttcttgaaagataaatttaataataataaataaatacataaatacataaataaaaaagaaagccacaggcctgtaaattttatttgtaaaaaagcatttctatttttatacaaaatttttactgcctcagaaataatggaagttatttattgcctattgttaacttattgggtacctaaagagcagttctctgtctagctagaaccttctgaagtagtctctagaggaattgttctaggaatgggctttttttcaccgttgaaccctagacctgaagttcatgctttatcctctcgttgtttgtatctgtctgattattttgtttgtaacttccattatctagtttacagttcagtcgtctgactttccccgtatgtcacatttgttgaaactggaccttctccccctgtccctcaccccaaaacacccggaatccatcccctttcgctctctccagatggattctcttggggtttcattgtgctgtggataaggagtgtaagaaatgcaaattatgtgaatggctcggagactccctaatgacctaagatttgcattagtttttctcctgcacccttaaaagtgattttgttgccgctgcatagattctgtgtaactttttactcttccttgttttttccctagacatcttcatgcccgttagttcatcgtttgcctagcatgtccctgtggcgtctcaaaaaaaagtttcatcgtcccgtcattgtttctgatgtctttctgacctcacatcatatttggttctcctactgacctttgatctagtttgacctttgaaatttgcatgtgacctcatctagctatgaattctgggaagtcaatgtgaaaaacattgctgcattcatgcaagactgaaatttattattagacaaattcattatagaaaaaacctgtggcaaaaacgtttctttcttattttttttcttttcctaaaacagacttgaaagtattatacagggattggcattcttcccggtcactggtaacaatagcaatatgtgtccagggacacagaatgttggtttctaacagactacttccaaaaacagtttgagaaaaaaactgtctgattttaagtctctagaggtctgtaatagtttttacatttttcaggcagtgtaaagttttttgataaggccattttaggtggctcactttctcattaagatatatatatagaaccactttttgtagattagtataagaaaaatatttaccctgttttggggcaaatgctacctatttgtgtcaccttttgctgaactcacagttagacaatccatggtttaatgcacatgaaattacctatattttatactgtttcaatgtacaggagaaaggttactgtaaactgtgttatgttggtgcttctgtgaattaagttgtggtttcatcatgagtcttaatgttctttgttgataagacaagtttagaattggtttacttaatacaaaaaaaaaaaaaagaatttcaaaaaaaaaagttgtttgcttaaaaaaaatttcatgtgagggaaaaaaaaaaaaacctattccagaataagttttgtgttggcttgtgaagcattgatgtcattttttttaattgtggactatttagatgtgtttgtgttcagcaaaatgtgatctgtttttttcttttaaagaaaaaaagtgaaaatatatagtgccaaattccaaaggtacttccttcctagagcttcagtgtgtttcttgtgagaagtaatttgataacatgggtattttattatgtgttttgtataaatccctaatatttaaaaaaaaaaacaaaacaaaaaaaggttacaaagtttgttaacttgctatcctgtggtcttgttgcctgaaattgttattgtttgttatttctctctgatgttttttgtaagacattgtataagtgcccatgtcccacttttttaaccactccgcacatcagtgctgtgaaggcaacctcaccatgtattttcttcataatctatggaaacctctaaggtgagaaagttttgaacttttaaccctttctacccagagctatctggaatgttgatgactttttatactgtcatgatttgagtttgttttggggtgtttccaatttggatttttttccctgcatctatcctctaagttgtttcggtttgactactttgttctttggttaagatccaaaagaaaacagaaaacaattccacgaggccaatctaaagggaaaaaatcctacactacttttactacttttgattatttctcatttttgggaaaagaattcctaatgtgctactagaattccttcttcagttttaacgagtaattggataaaccctgagggaaaacggaggtagattcagcacctaacaatcctgtatgcttttgagatcacgtttagtgctatgtcctagtctagaatattttcatataccttgcagtaaaacgactttgtggcaggacagtctcttgaggggttttgtttctgtttcctaaatactcctaaataatatttctaatcagccattatgctggggcatctctgatcccagtaggtacctctgaatataccaggtgtctggagttagaagcccatagccctttcccagcctttttggtttttttaattgaacacatttcatctaagtaaagctcagttctttatcacaatttactgaccaaatacctagcaccagttcctgctgccactttttaaagtgccatatgactttctacgaacaggtaccttgctgtcttgacaaatcctaatgtcacgcctacagccccaacacaagctccagtcttcctcttcggcatgccctggaagcttcttggcctcagctccccttccccgctcagcaccctgttaggatcagtgtgtgtggatgggatagccctgggatggaaaggactagcctctactgatgcaaaaaaacaaaaagcaacacaaacgtttccttcttatagcacatgcacttccttacaatgacatgatttgtattatcctcacatgtgtttactactgctggggccttccttcatcctctgagggctattttgtactttctgcagcaatcagcttaataacaacacttattgcacctgtctctctctgagaacacggtgtgtctcgacacgtaccacgtacgtggaaacacaagagcccaccacttgaatttctaagaccatttcattctgaaacttcttatcaattacctaaatctcaacgaaaaacaatttactgaagccgactcccctccccatctccctctcaacctcaacccacctgcatgcatctcccccagaggaaacactgagggtaggggacaggaggctcaggacgcgccctctgaatcgagtgtttcttcttcacaagtcaccaagagaggacatgagggggaaagtccttttttgcccttctccaaaaaataaccttccacagagacaaactgtccttctatccacttttatcttttaataaatatcaaaaggaaaaagctgcaagggtgcaaagggcctgtgccagaagaaaacacacacagggaaaccgctttttttaatcaattgtagagaatagtcatttttaatctaaattagagaattgtgatacaatggcagtcctcaaaggcgtaacgagttcatctttctttcaccataggggttatagttggcttgtgctactctggaatcattttactgtttgtttttattatcttaagtgctaattaaaaaaaaaataaaattttaaaaaaacctgtagtttcattacctttttgaataatgtcatacaaaaaatgtatttgtttttttgtgctgtgagaattgatgtttgtagattaataatcattttgtttagaattacaaaatagtttttaaatattgtctgagaaaagccaaagttaatgcaacctagtggaaactgtaagaccatttgagtattgtttgttttattgatgcatttggattttgttgtttgatggaatttgagccaaaaaaaaaatacgcaggctttcctatttctacaactgattgtacttatgcattttgtaccagtggaactttttatactggagattaaaaaaaaaatggaaatttttgtggcttgctctggtgggcccctgacaatgactgatttcaagtttgatttcgggttgattgattgattgattgatagaaagaaagttgcttttcttttgagaattaaaaactttggcttgatttcttttttccctttgcttatatctagcattagaattttgtcttaaaataacagcggtaagtttcactttttattctgtattgtgcagttacacaataaggtaattagatttagaagtactcagtcactttaagtggataaatgtattagttaaaactttagggtttgcttttttgctgtttagatcaaagttttttctgattcttctgtcctcattgtgaacataaccgtgtagttgaaacagtcaaacttatttttgtaatgtatgttattgtgtgatgcagttttttgcttctgtctccaatattaaaccattttccta

SEQ ID NO: 421112 - DNA, 6924 bp, Homo sapiens
agctctgcctttctttcccagccacagccagggtagggctgataaggcgctgatgcgttgatggcagccttgcagagctagacctgcacttaacttgcagctgcctcccgagcctccaagatgtccacgccctgggtgacaggcggcagggcgctgccccgtgctcccccggctctgctcgacagcagcacgcagtgagagcctcgccgccgccgaggagcaactcatgtaacggcacagccaacaagatgaacggagctttggatcactcagaccaaccagacccagatgccattaagatgtttgtcggacagatcccccggtcatggtcggaaaaggagctgaaagaactttttgagccttacggagccgtctaccagatcaacgtcctccgggaccggagtcagaaccctccgcagagtaaagatgcatcatcccattcagatgaaacctgcagatagtgaaaagtccaacgctgtggaagacagaaaattgttcataggaatggtttcgaagaaatgtaatgagaacgacatcagggtgatgttctctccatttggccagatagaagaatgccggatcctccggggacctgatgggctgagtcgaggctgtgcgtttgtcacattttctacaagggcaatggcacagaatgcaatcaaagccatgcatcagtctcagaccatggagggctgctcttcacctatcgtggtgaagtttgctgacactcagaaggacaaagagcaaaggcgcctccagcagcagctcgctcagcagatgcagcagctcaacactgccacctgggggaacctgacagggctgggcggactgaccccacagtatctggcgctcctgcagcaggccacctcctccagcaacctgggtgcgttcagcggcattcaacaaatggcaggcatgaatgctttacagttgcagaacctggcgacgctggctgctgctgcagctgcggcccagacctcagccaccagcaccaatgcaaaccctctctctaccacgagcagcgccctgggagccctcacgagtcccgtggctgcttcaacccccaactccactgctggtgcagccatgaactccttgacctctctcgggactctgcaaggactggctggagccactgttggactgaataatattaatgcactagcagatggcggctctgaatggaggacttggcgccacaggcttgacgaatggcacggctggcaccatggacgccctcacccaggcctactcaggaattcaacagtacgcagccgccgcgctgcccactctgtacagccagagcctgctgcagcagcagagcgctgcaggcagccagaaggaaggtccagagggggcaaacctctttatttaccaccttccacaggaatttggagaccaggacattctgcagatgttcatgccttttggaaatgttatctctgctaaagtcttcattgacaaacagaccaatctgagcaagtgctttggttttgttagctacgacaatccagtctctgcacaagctgctatccaagctatgaatggctttcagatcggcatgaaacgcttgaaggtgcagctgaagcgttccaaaaacgacagcaaaccttactgatcctaaccccagaggctccctgctctcattttagctttcttagggtaagtcccacgagccagcctgtctcaacagggaaggcagaggaggaccacattgccaacttttaccaagagagacggttatttttacaataaggcctccatgtccccacccacttcccctacccagtttgccataattaaaacttgggctactttgtttctattgagtaattcctcctccagttgtgccactgtattctcctttgttttgcgatttgaatctccttttacctttttttttaatttttttcatttttgcttttttttaaagagaagcatatacacaaataaatggcatcttgagaatttaaaaggcaaacaaacaaacgctaatgtgcaattctaactctgaaaccactggtgccccgagagcactgcctggagaattcacccctccttgcccggcgcccgcccccggagggagggcccggtgcttagaggttaacttggtggcctaggagagggagaagccaggagaagcacttactccaaccacacgtctttccactacatcggcttgttttactaagtaggattttattttagggttcaaagaaacatgacatttattggtcaaaatattacactggttgtctattttgttattgttttattttagtttttagaaaggattaatgtacaaaaagatttagagatctgtttcttaaagctacagggtttaaaaaataaaaatgagtgaaaatacttgatgtttcttgaaagataaatttaataataataaataaatacataaatacataaataaaaaagaaagccacaggcctgtaaattttatttgtaaaaaagcatttctatttttatacaaaatttttactgcctcagaaataatggaagttatttattgcctattgttaacttattgggtacctaaagagcagttctctgtctagctagaaccttctgaagtagtctctagaggaattgttctaggaatgggctttttttcaccgttgaaccctagacctgaagttcatgctttatcctctcgttgtttgtatctgtctgattattttgtttgtaacttccattatctagtttacagttcagtcgtctgactttccccgtatgtcacatttgttgaaactggaccttctccccctgtccctcaccccaaaacacccggaatccatcccctttcgctctctccagatggattctcttggggtttcattgtgctgtggataaggagtgtaagaaatgcaaattatgtgaatggctcggagactccctaatgacctaagatttgcattagtttttctcctgcacccttaaaagtgattttgttgccgctgcatagattctgtgtaactttttactcttccttgttttttccctagacatcttcatgcccgttagttcatcgtttgcctagcatgtccctgtggcgtctcaaaaaaaagtttcatcgtcccgtcattgtttctgatgtctttctgacctcacatcatatttggttctcctactgacctttgatctagtttgacctttgaaatttgcatgtgacctcatctagctatgaattctgggaagtcaatgtgaaaaacattgctgcattcatgcaagactgaaatttattattagacaaattcattatagaaaaaacctgtggcaaaaacgtttctttcttattttttttcttttcctaaaacagacttgaaagtattatacagggattggcattcttcccggtcactggtaacaatagcaatatgtgtccagggacacagaatgttggtttctaacagactacttccaaaaacagtttgagaaaaaaactgtctgattttaagtctctagaggtctgtaatagtttttacatttttcaggcagtgtaaagttttttgataaggccattttaggtggctcactttctcattaagatatatatatagaaccactttttgtagattagtataagaaaaatatttaccctgttttggggcaaatgctacctatttgtgtcaccttttgctgaactcacagttagacaatccatggtttaatgcacatgaaattacctatattttatactgtttcaatgtacaggagaaaggttactgtaaactgtgttatgttggtgcttctgtgaattaagttgtggtttcatcatgagtcttaatgttctttgttgataagacaagtttagaattggtttacttaatacaaaaaaaaaaaaaagaatttcaaaaaaaaaagttgtttgcttaaaaaaaatttcatgtgagggaaaaaaaaaaaaacctattccagaataagttttgtgttggcttgtgaagcattgatgtcattttttttaattgtggactatttagatgtgtttgtgttcagcaaaatgtgatctgtttttttcttttaaagaaaaaaagtgaaaatatatagtgccaaattccaaaggtacttccttcctagagcttcagtgtgtttcttgtgagaagtaatttgataacatgggtattttattatgtgttttgtataaatccctaatatttaaaaaaaaaaacaaaacaaaaaaaggttacaaagtttgttaacttgctatcctgtggtcttgttgcctgaaattgttattgtttgttatttctctctgatgttttttgtaagacattgtataagtgcccatgtcccacttttttaaccactccgcacatcagtgctgtgaaggcaacctcaccatgtattttcttcataatctatggaaacctctaaggtgagaaagttttgaacttttaaccctttctacccagagctatctggaatgttgatgactttttatactgtcatgatttgagtttgttttggggtgtttccaatttggatttttttccctgcatctatcctctaagttgtttcggtttgactactttgttctttggttaagatccaaaagaaaacagaaaacaattccacgaggccaatctaaagggaaaaaatcctacactacttttactacttttgattatttctcatttttgggaaaagaattcctaatgtgctactagaattccttcttcagttttaacgagtaattggataaaccctgagggaaaacggaggtagattcagcacctaacaatcctgtatgcttttgagatcacgtttagtgctatgtcctagtctagaatattttcatataccttgcagtaaaacgactttgtggcaggacagtctcttgaggggttttgtttctgtttcctaaatactcctaaataatatttctaatcagccattatgctggggcatctctgatcccagtaggtacctctgaatataccaggtgtctggagttagaagcccatagccctttcccagcctttttggtttttttaattgaacacatttcatctaagtaaagctcagttctttatcacaatttactgaccaaatacctagcaccagttcctgctgccactttttaaagtgccatatgactttctacgaacaggtaccttgctgtcttgacaaatcctaatgtcacgcctacagccccaacacaagctccagtcttcctcttcggcatgccctggaagcttcttggcctcagctccccttccccgctcagcaccctgttaggatcagtgtgtgtggatgggatagccctgggatggaaaggactagcctctactgatgcaaaaaaacaaaaagcaacacaaacgtttccttcttatagcacatgcacttccttacaatgacatgatttgtattatcctcacatgtgtttactactgctggggccttccttcatcctctgagggctattttgtactttctgcagcaatcagcttaataacaacacttattgcacctgtctctctctgagaacacggtgtgtctcgacacgtaccacgtacgtggaaacacaagagcccaccacttgaatttctaagaccatttcattctgaaacttcttatcaattacctaaatctcaacgaaaaacaatttactgaagccgactcccctccccatctccctctcaacctcaacccacctgcatgcatctcccccagaggaaacactgagggtaggggacaggaggctcaggacgcgccctctgaatcgagtgtttcttcttcacaagtcaccaagagaggacatgagggggaaagtccttttttgcccttctccaaaaaataaccttccacagagacaaactgtccttctatccacttttatcttttaataaatatcaaaaggaaaaagctgcaagggtgcaaagggcctgtgccagaagaaaacacacacagggaaaccgctttttttaatcaattgtagagaatagtcatttttaatctaaattagagaattgtgatacaatggcagtcctcaaaggcgtaacgagttcatctttctttcaccataggggttatagttggcttgtgctactctggaatcattttactgtttgtttttattatcttaagtgctaattaaaaaaaaaataaaattttaaaaaaacctgtagtttcattacctttttgaataatgtcatacaaaaaatgtatttgtttttttgtgctgtgagaattgatgtttgtagattaataatcattttgtttagaattacaaaatagtttttaaatattgtctgagaaaagccaaagttaatgcaacctagtggaaactgtaagaccatttgagtattgtttgttttattgatgcatttggattttgttgtttgatggaatttgagccaaaaaaaaaatacgcaggctttcctatttctacaactgattgtacttatgcattttgtaccagtggaactttttatactggagattaaaaaaaaaatggaaatttttgtggcttgctctggtgggcccctgacaatgactgatttcaagtttgatttcgggttgattgattgattgattgatagaaagaaagttgcttttcttttgagaattaaaaactttggcttgatttcttttttccctttgcttatatctagcattagaattttgtcttaaaataacagcggtaagtttcactttttattctgtattgtgcagttacacaataaggtaattagatttagaagtactcagtcactttaagtggataaatgtattagttaaaactttagggtttgcttttttgctgtttagatcaaagttttttctgattcttctgtcctcattgtgaacataaccgtgtagttgaaacagtcaaacttatttttgtaatgtatgttattgtgtgatgcagttttttgcttctgtctccaatattaaaccattttccta

SEQ ID NO: 421113 - DNA, 7017 bp, Homo sapiens
acaagtgccggctcggcggccgccgggggaggccgcgcgcacctgtccctgcccgtctcgcgccgcccgcggccgctcggacgcgcgcagagccgccccccgccgctgccgccgcgtgcgcccgcgaacatgacttctgccttcaagctggatttcctcccggacatgatggtcgagggccgcctgctcgttcctgacagaattaacggcacagccaacaagatgaacggagctttggatcactcagaccaaccagacccagatgccattaagatgtttgtcggacagatcccccggtcatggtcggaaaaggagctgaaagaactttttgagccttacggagccgtctaccagatcaacgtcctccgggaccggagtcagaaccctccgcagagtaaaggtacagagcgcggggcgggggtcgccaggcgtccaggttgttgtttcgtaacattttatacaagaaaagctgcacttgaggcccagaatgcactgcacaatattaaaactttacctgggatgcatcatcccattcagatgaaacctgcagatagtgaaaagtccaacgctgtggaagacagaaaattgttcataggaatggtttcgaagaaatgtaatgagaacgacatcagggtgatgttctctccatttggccagatagaagaatgccggatcctccggggacctgatgggctgagtcgaggctgtgcgtttgtcacattttctacaagggcaatggcacagaatgcaatcaaagccatgcatcagtctcagaccatggagggctgctcttcacctatcgtggtgaagtttgctgacactcagaaggacaaagagcaaaggcgcctccagcagcagctcgctcagcagatgcagcagctcaacactgccacctgggggaacctgacagggctgggcggactgaccccacagtatctggcgctcctgcagcaggccacctcctccagcaacctgggtgcgttcagcggcattcaacaaatggcaggcatgaatgctttacagttgcagaacctggcgacgctggctgctgctgcagctgcggcccagacctcagccaccagcaccaatgcaaaccctctctctaccacgagcagcgccctgggagccctcacgagtcccgtggctgcttcaacccccaactccactgctggtgcagccatgaactccttgacctctctcgggactctgcaaggactggctggagccactgttggactgaataatattaatgcactagcagatggcggctctgaatggaggacttggcgccacaggcttgacgaatggcacggctggcaccatggacgccctcacccaggcctactcaggaattcaacagtacgcagccgccgcgctgcccactctgtacagccagagcctgctgcagcagcagagcgctgcaggcagccagaaggaaggtccagagggggcaaacctctttatttaccaccttccacaggaatttggagaccaggacattctgcagatgttcatgccttttggaaatgttatctctgctaaagtcttcattgacaaacagaccaatctgagcaagtgctttggttttgttagctacgacaatccagtctctgcacaagctgctatccaagctatgaatggctttcagatcggcatgaaacgcttgaaggtgcagctgaagcgttccaaaaacgacagcaaaccttactgatcctaaccccagaggctccctgctctcattttagctttcttagggtaagtcccacgagccagcctgtctcaacagggaaggcagaggaggaccacattgccaacttttaccaagagagacggttatttttacaataaggcctccatgtccccacccacttcccctacccagtttgccataattaaaacttgggctactttgtttctattgagtaattcctcctccagttgtgccactgtattctcctttgttttgcgatttgaatctccttttacctttttttttaatttttttcatttttgcttttttttaaagagaagcatatacacaaataaatggcatcttgagaatttaaaaggcaaacaaacaaacgctaatgtgcaattctaactctgaaaccactggtgccccgagagcactgcctggagaattcacccctccttgcccggcgcccgcccccggagggagggcccggtgcttagaggttaacttggtggcctaggagagggagaagccaggagaagcacttactccaaccacacgtctttccactacatcggcttgttttactaagtaggattttattttagggttcaaagaaacatgacatttattggtcaaaatattacactggttgtctattttgttattgttttattttagtttttagaaaggattaatgtacaaaaagatttagagatctgtttcttaaagctacagggtttaaaaaataaaaatgagtgaaaatacttgatgtttcttgaaagataaatttaataataataaataaatacataaatacataaataaaaaagaaagccacaggcctgtaaattttatttgtaaaaaagcatttctatttttatacaaaatttttactgcctcagaaataatggaagttatttattgcctattgttaacttattgggtacctaaagagcagttctctgtctagctagaaccttctgaagtagtctctagaggaattgttctaggaatgggctttttttcaccgttgaaccctagacctgaagttcatgctttatcctctcgttgtttgtatctgtctgattattttgtttgtaacttccattatctagtttacagttcagtcgtctgactttccccgtatgtcacatttgttgaaactggaccttctccccctgtccctcaccccaaaacacccggaatccatcccctttcgctctctccagatggattctcttggggtttcattgtgctgtggataaggagtgtaagaaatgcaaattatgtgaatggctcggagactccctaatgacctaagatttgcattagtttttctcctgcacccttaaaagtgattttgttgccgctgcatagattctgtgtaactttttactcttccttgttttttccctagacatcttcatgcccgttagttcatcgtttgcctagcatgtccctgtggcgtctcaaaaaaaagtttcatcgtcccgtcattgtttctgatgtctttctgacctcacatcatatttggttctcctactgacctttgatctagtttgacctttgaaatttgcatgtgacctcatctagctatgaattctgggaagtcaatgtgaaaaacattgctgcattcatgcaagactgaaatttattattagacaaattcattatagaaaaaacctgtggcaaaaacgtttctttcttattttttttcttttcctaaaacagacttgaaagtattatacagggattggcattcttcccggtcactggtaacaatagcaatatgtgtccagggacacagaatgttggtttctaacagactacttccaaaaacagtttgagaaaaaaactgtctgattttaagtctctagaggtctgtaatagtttttacatttttcaggcagtgtaaagttttttgataaggccattttaggtggctcactttctcattaagatatatatatagaaccactttttgtagattagtataagaaaaatatttaccctgttttggggcaaatgctacctatttgtgtcaccttttgctgaactcacagttagacaatccatggtttaatgcacatgaaattacctatattttatactgtttcaatgtacaggagaaaggttactgtaaactgtgttatgttggtgcttctgtgaattaagttgtggtttcatcatgagtcttaatgttctttgttgataagacaagtttagaattggtttacttaatacaaaaaaaaaaaaaagaatttcaaaaaaaaaagttgtttgcttaaaaaaaatttcatgtgagggaaaaaaaaaaaaacctattccagaataagttttgtgttggcttgtgaagcattgatgtcattttttttaattgtggactatttagatgtgtttgtgttcagcaaaatgtgatctgtttttttcttttaaagaaaaaaagtgaaaatatatagtgccaaattccaaaggtacttccttcctagagcttcagtgtgtttcttgtgagaagtaatttgataacatgggtattttattatgtgttttgtataaatccctaatatttaaaaaaaaaaacaaaacaaaaaaaggttacaaagtttgttaacttgctatcctgtggtcttgttgcctgaaattgttattgtttgttatttctctctgatgttttttgtaagacattgtataagtgcccatgtcccacttttttaaccactccgcacatcagtgctgtgaaggcaacctcaccatgtattttcttcataatctatggaaacctctaaggtgagaaagttttgaacttttaaccctttctacccagagctatctggaatgttgatgactttttatactgtcatgatttgagtttgttttggggtgtttccaatttggatttttttccctgcatctatcctctaagttgtttcggtttgactactttgttctttggttaagatccaaaagaaaacagaaaacaattccacgaggccaatctaaagggaaaaaatcctacactacttttactacttttgattatttctcatttttgggaaaagaattcctaatgtgctactagaattccttcttcagttttaacgagtaattggataaaccctgagggaaaacggaggtagattcagcacctaacaatcctgtatgcttttgagatcacgtttagtgctatgtcctagtctagaatattttcatataccttgcagtaaaacgactttgtggcaggacagtctcttgaggggttttgtttctgtttcctaaatactcctaaataatatttctaatcagccattatgctggggcatctctgatcccagtaggtacctctgaatataccaggtgtctggagttagaagcccatagccctttcccagcctttttggtttttttaattgaacacatttcatctaagtaaagctcagttctttatcacaatttactgaccaaatacctagcaccagttcctgctgccactttttaaagtgccatatgactttctacgaacaggtaccttgctgtcttgacaaatcctaatgtcacgcctacagccccaacacaagctccagtcttcctcttcggcatgccctggaagcttcttggcctcagctccccttccccgctcagcaccctgttaggatcagtgtgtgtggatgggatagccctgggatggaaaggactagcctctactgatgcaaaaaaacaaaaagcaacacaaacgtttccttcttatagcacatgcacttccttacaatgacatgatttgtattatcctcacatgtgtttactactgctggggccttccttcatcctctgagggctattttgtactttctgcagcaatcagcttaataacaacacttattgcacctgtctctctctgagaacacggtgtgtctcgacacgtaccacgtacgtggaaacacaagagcccaccacttgaatttctaagaccatttcattctgaaacttcttatcaattacctaaatctcaacgaaaaacaatttactgaagccgactcccctccccatctccctctcaacctcaacccacctgcatgcatctcccccagaggaaacactgagggtaggggacaggaggctcaggacgcgccctctgaatcgagtgtttcttcttcacaagtcaccaagagaggacatgagggggaaagtccttttttgcccttctccaaaaaataaccttccacagagacaaactgtccttctatccacttttatcttttaataaatatcaaaaggaaaaagctgcaagggtgcaaagggcctgtgccagaagaaaacacacacagggaaaccgctttttttaatcaattgtagagaatagtcatttttaatctaaattagagaattgtgatacaatggcagtcctcaaaggcgtaacgagttcatctttctttcaccataggggttatagttggcttgtgctactctggaatcattttactgtttgtttttattatcttaagtgctaattaaaaaaaaaataaaattttaaaaaaacctgtagtttcattacctttttgaataatgtcatacaaaaaatgtatttgtttttttgtgctgtgagaattgatgtttgtagattaataatcattttgtttagaattacaaaatagtttttaaatattgtctgagaaaagccaaagttaatgcaacctagtggaaactgtaagaccatttgagtattgtttgttttattgatgcatttggattttgttgtttgatggaatttgagccaaaaaaaaaatacgcaggctttcctatttctacaactgattgtacttatgcattttgtaccagtggaactttttatactggagattaaaaaaaaaatggaaatttttgtggcttgctctggtgggcccctgacaatgactgatttcaagtttgatttcgggttgattgattgattgattgatagaaagaaagttgcttttcttttgagaattaaaaactttggcttgatttcttttttccctttgcttatatctagcattagaattttgtcttaaaataacagcggtaagtttcactttttattctgtattgtgcagttacacaataaggtaattagatttagaagtactcagtcactttaagtggataaatgtattagttaaaactttagggtttgcttttttgctgtttagatcaaagttttttctgattcttctgtcctcattgtgaacataaccgtgtagttgaaacagtcaaacttatttttgtaatgtatgttattgtgtgatgcagttttttgcttctgtctccaatattaaaccattttccta

SEQ ID NO: 421114 - DNA, 6735 bp, Homo sapiens
cgactgtggcattgatgtttgagcatacttctgaactggcttttgttgagactatcagtatagaagcatgcgctgtcccaaatccgctgttactatgagaaatgaagagctgcttttaagtaacggcacagccaacaagatgaacggagctttggatcactcagaccaaccagacccagatgccattaagatgtttgtcggacagatcccccggtcatggtcggaaaaggagctgaaagaactttttgagccttacggagccgtctaccagatcaacgtcctccgggaccggagtcagaaccctccgcagagtaaagatgcatcatcccattcagatgaaacctgcagatagtgaaaagtccaacgctgtggaagacagaaaattgttcataggaatggtttcgaagaaatgtaatgagaacgacatcagggtgatgttctctccatttggccagatagaagaatgccggatcctccggggacctgatgggctgagtcgagggctgctcttcacctatcgtggtgaagtttgctgacactcagaaggacaaagagcaaaggcgcctccagcagcagctcgctcagcagatgcagcagctcaacactgccacctgggggaacctgacagggctgggcggactgaccccacagtatctggcgctcctgcagcaggccacctcctccagcaacctgggtgcgttcagcggcattcaacaaatggcaggcatgaatgctttacagttgcagaacctggcgacgctggctgctgctgcagctgcggcccagacctcagccaccagcaccaatgcaaaccctctctctaccacgagcagcgccctgggagccctcacgagtcccgtggctgcttcaacccccaactccactgctggtgcagccatgaactccttgacctctctcgggactctgcaaggactggctggagccactgttggactgaataatattaatgcactagcagatggcggctctgaatggaggacttggcgccacaggcttgacgaatggcacggctggcaccatggacgccctcacccaggcctactcaggaattcaacagtacgcagccgccgcgctgcccactctgtacagccagagcctgctgcagcagcagagcgctgcaggcagccagaaggaaggtccagagggggcaaacctctttatttaccaccttccacaggaatttggagaccaggacattctgcagatgttcatgccttttggaaatgttatctctgctaaagtcttcattgacaaacagaccaatctgagcaagtgctttggttttgttagctacgacaatccagtctctgcacaagctgctatccaagctatgaatggctttcagatcggcatgaaacgcttgaaggtgcagctgaagcgttccaaaaacgacagcaaaccttactgatcctaaccccagaggctccctgctctcattttagctttcttagggtaagtcccacgagccagcctgtctcaacagggaaggcagaggaggaccacattgccaacttttaccaagagagacggttatttttacaataaggcctccatgtccccacccacttcccctacccagtttgccataattaaaacttgggctactttgtttctattgagtaattcctcctccagttgtgccactgtattctcctttgttttgcgatttgaatctccttttacctttttttttaatttttttcatttttgcttttttttaaagagaagcatatacacaaataaatggcatcttgagaatttaaaaggcaaacaaacaaacgctaatgtgcaattctaactctgaaaccactggtgccccgagagcactgcctggagaattcacccctccttgcccggcgcccgcccccggagggagggcccggtgcttagaggttaacttggtggcctaggagagggagaagccaggagaagcacttactccaaccacacgtctttccactacatcggcttgttttactaagtaggattttattttagggttcaaagaaacatgacatttattggtcaaaatattacactggttgtctattttgttattgttttattttagtttttagaaaggattaatgtacaaaaagatttagagatctgtttcttaaagctacagggtttaaaaaataaaaatgagtgaaaatacttgatgtttcttgaaagataaatttaataataataaataaatacataaatacataaataaaaaagaaagccacaggcctgtaaattttatttgtaaaaaagcatttctatttttatacaaaatttttactgcctcagaaataatggaagttatttattgcctattgttaacttattgggtacctaaagagcagttctctgtctagctagaaccttctgaagtagtctctagaggaattgttctaggaatgggctttttttcaccgttgaaccctagacctgaagttcatgctttatcctctcgttgtttgtatctgtctgattattttgtttgtaacttccattatctagtttacagttcagtcgtctgactttccccgtatgtcacatttgttgaaactggaccttctccccctgtccctcaccccaaaacacccggaatccatcccctttcgctctctccagatggattctcttggggtttcattgtgctgtggataaggagtgtaagaaatgcaaattatgtgaatggctcggagactccctaatgacctaagatttgcattagtttttctcctgcacccttaaaagtgattttgttgccgctgcatagattctgtgtaactttttactcttccttgttttttccctagacatcttcatgcccgttagttcatcgtttgcctagcatgtccctgtggcgtctcaaaaaaaagtttcatcgtcccgtcattgtttctgatgtctttctgacctcacatcatatttggttctcctactgacctttgatctagtttgacctttgaaatttgcatgtgacctcatctagctatgaattctgggaagtcaatgtgaaaaacattgctgcattcatgcaagactgaaatttattattagacaaattcattatagaaaaaacctgtggcaaaaacgtttctttcttattttttttcttttcctaaaacagacttgaaagtattatacagggattggcattcttcccggtcactggtaacaatagcaatatgtgtccagggacacagaatgttggtttctaacagactacttccaaaaacagtttgagaaaaaaactgtctgattttaagtctctagaggtctgtaatagtttttacatttttcaggcagtgtaaagttttttgataaggccattttaggtggctcactttctcattaagatatatatatagaaccactttttgtagattagtataagaaaaatatttaccctgttttggggcaaatgctacctatttgtgtcaccttttgctgaactcacagttagacaatccatggtttaatgcacatgaaattacctatattttatactgtttcaatgtacaggagaaaggttactgtaaactgtgttatgttggtgcttctgtgaattaagttgtggtttcatcatgagtcttaatgttctttgttgataagacaagtttagaattggtttacttaatacaaaaaaaaaaaaaagaatttcaaaaaaaaaagttgtttgcttaaaaaaaatttcatgtgagggaaaaaaaaaaaaacctattccagaataagttttgtgttggcttgtgaagcattgatgtcattttttttaattgtggactatttagatgtgtttgtgttcagcaaaatgtgatctgtttttttcttttaaagaaaaaaagtgaaaatatatagtgccaaattccaaaggtacttccttcctagagcttcagtgtgtttcttgtgagaagtaatttgataacatgggtattttattatgtgttttgtataaatccctaatatttaaaaaaaaaaacaaaacaaaaaaaggttacaaagtttgttaacttgctatcctgtggtcttgttgcctgaaattgttattgtttgttatttctctctgatgttttttgtaagacattgtataagtgcccatgtcccacttttttaaccactccgcacatcagtgctgtgaaggcaacctcaccatgtattttcttcataatctatggaaacctctaaggtgagaaagttttgaacttttaaccctttctacccagagctatctggaatgttgatgactttttatactgtcatgatttgagtttgttttggggtgtttccaatttggatttttttccctgcatctatcctctaagttgtttcggtttgactactttgttctttggttaagatccaaaagaaaacagaaaacaattccacgaggccaatctaaagggaaaaaatcctacactacttttactacttttgattatttctcatttttgggaaaagaattcctaatgtgctactagaattccttcttcagttttaacgagtaattggataaaccctgagggaaaacggaggtagattcagcacctaacaatcctgtatgcttttgagatcacgtttagtgctatgtcctagtctagaatattttcatataccttgcagtaaaacgactttgtggcaggacagtctcttgaggggttttgtttctgtttcctaaatactcctaaataatatttctaatcagccattatgctggggcatctctgatcccagtaggtacctctgaatataccaggtgtctggagttagaagcccatagccctttcccagcctttttggtttttttaattgaacacatttcatctaagtaaagctcagttctttatcacaatttactgaccaaatacctagcaccagttcctgctgccactttttaaagtgccatatgactttctacgaacaggtaccttgctgtcttgacaaatcctaatgtcacgcctacagccccaacacaagctccagtcttcctcttcggcatgccctggaagcttcttggcctcagctccccttccccgctcagcaccctgttaggatcagtgtgtgtggatgggatagccctgggatggaaaggactagcctctactgatgcaaaaaaacaaaaagcaacacaaacgtttccttcttatagcacatgcacttccttacaatgacatgatttgtattatcctcacatgtgtttactactgctggggccttccttcatcctctgagggctattttgtactttctgcagcaatcagcttaataacaacacttattgcacctgtctctctctgagaacacggtgtgtctcgacacgtaccacgtacgtggaaacacaagagcccaccacttgaatttctaagaccatttcattctgaaacttcttatcaattacctaaatctcaacgaaaaacaatttactgaagccgactcccctccccatctccctctcaacctcaacccacctgcatgcatctcccccagaggaaacactgagggtaggggacaggaggctcaggacgcgccctctgaatcgagtgtttcttcttcacaagtcaccaagagaggacatgagggggaaagtccttttttgcccttctccaaaaaataaccttccacagagacaaactgtccttctatccacttttatcttttaataaatatcaaaaggaaaaagctgcaagggtgcaaagggcctgtgccagaagaaaacacacacagggaaaccgctttttttaatcaattgtagagaatagtcatttttaatctaaattagagaattgtgatacaatggcagtcctcaaaggcgtaacgagttcatctttctttcaccataggggttatagttggcttgtgctactctggaatcattttactgtttgtttttattatcttaagtgctaattaaaaaaaaaataaaattttaaaaaaacctgtagtttcattacctttttgaataatgtcatacaaaaaatgtatttgtttttttgtgctgtgagaattgatgtttgtagattaataatcattttgtttagaattacaaaatagtttttaaatattgtctgagaaaagccaaagttaatgcaacctagtggaaactgtaagaccatttgagtattgtttgttttattgatgcatttggattttgttgtttgatggaatttgagccaaaaaaaaaatacgcaggctttcctatttctacaactgattgtacttatgcattttgtaccagtggaactttttatactggagattaaaaaaaaaatggaaatttttgtggcttgctctggtgggcccctgacaatgactgatttcaagtttgatttcgggttgattgattgattgattgatagaaagaaagttgcttttcttttgagaattaaaaactttggcttgatttcttttttccctttgcttatatctagcattagaattttgtcttaaaataacagcggtaagtttcactttttattctgtattgtgcagttacacaataaggtaattagatttagaagtactcagtcactttaagtggataaatgtattagttaaaactttagggtttgcttttttgctgtttagatcaaagttttttctgattcttctgtcctcattgtgaacataaccgtgtagttgaaacagtcaaacttatttttgtaatgtatgttattgtgtgatgcagttttttgcttctgtctccaatattaaaccattttccta

SEQ ID NO: 421115 - DNA, 6105 bp, Homo sapiens
agcagtgagtgtgtttgcagtattggtaaaacagtgctgtgaagatttttttaatcaccaaatctgtcaaaattgccacaagtacaatcccacatgtccttcacccaaagccacaagcacagctcctcagctccgtccactgagatgatgacagaaggatttccagtctcggctctcactcacctcgtgtcttctctccccttgtctctgttttccttttgtttttcagtggctgcttcaacccccaactccactgctggtgcagccatgaactccttgacctctctcgggactctgcaaggactggctggagccactgttggactgaataatattaatgcactagcagatggcggctctgaatggaggacttggcgccacaggcttgacgaatggcacggctggcaccatggacgccctcacccaggcctactcaggaattcaacagtacgcagccgccgcgctgcccactctgtacagccagagcctgctgcagcagcagagcgctgcaggcagccagaaggaaggtccagagggggcaaacctctttatttaccaccttccacaggaatttggagaccaggacattctgcagatgttcatgccttttggaaatgttatctctgctaaagtcttcattgacaaacagaccaatctgagcaagtgctttggttttgttagctacgacaatccagtctctgcacaagctgctatccaagctatgaatggctttcagatcggcatgaaacgcttgaaggtgcagctgaagcgttccaaaaacgacagcaaaccttactgatcctaaccccagaggctccctgctctcattttagctttcttagggtaagtcccacgagccagcctgtctcaacagggaaggcagaggaggaccacattgccaacttttaccaagagagacggttatttttacaataaggcctccatgtccccacccacttcccctacccagtttgccataattaaaacttgggctactttgtttctattgagtaattcctcctccagttgtgccactgtattctcctttgttttgcgatttgaatctccttttacctttttttttaatttttttcatttttgcttttttttaaagagaagcatatacacaaataaatggcatcttgagaatttaaaaggcaaacaaacaaacgctaatgtgcaattctaactctgaaaccactggtgccccgagagcactgcctggagaattcacccctccttgcccggcgcccgcccccggagggagggcccggtgcttagaggttaacttggtggcctaggagagggagaagccaggagaagcacttactccaaccacacgtctttccactacatcggcttgttttactaagtaggattttattttagggttcaaagaaacatgacatttattggtcaaaatattacactggttgtctattttgttattgttttattttagtttttagaaaggattaatgtacaaaaagatttagagatctgtttcttaaagctacagggtttaaaaaataaaaatgagtgaaaatacttgatgtttcttgaaagataaatttaataataataaataaatacataaatacataaataaaaaagaaagccacaggcctgtaaattttatttgtaaaaaagcatttctatttttatacaaaatttttactgcctcagaaataatggaagttatttattgcctattgttaacttattgggtacctaaagagcagttctctgtctagctagaaccttctgaagtagtctctagaggaattgttctaggaatgggctttttttcaccgttgaaccctagacctgaagttcatgctttatcctctcgttgtttgtatctgtctgattattttgtttgtaacttccattatctagtttacagttcagtcgtctgactttccccgtatgtcacatttgttgaaactggaccttctccccctgtccctcaccccaaaacacccggaatccatcccctttcgctctctccagatggattctcttggggtttcattgtgctgtggataaggagtgtaagaaatgcaaattatgtgaatggctcggagactccctaatgacctaagatttgcattagtttttctcctgcacccttaaaagtgattttgttgccgctgcatagattctgtgtaactttttactcttccttgttttttccctagacatcttcatgcccgttagttcatcgtttgcctagcatgtccctgtggcgtctcaaaaaaaagtttcatcgtcccgtcattgtttctgatgtctttctgacctcacatcatatttggttctcctactgacctttgatctagtttgacctttgaaatttgcatgtgacctcatctagctatgaattctgggaagtcaatgtgaaaaacattgctgcattcatgcaagactgaaatttattattagacaaattcattatagaaaaaacctgtggcaaaaacgtttctttcttattttttttcttttcctaaaacagacttgaaagtattatacagggattggcattcttcccggtcactggtaacaatagcaatatgtgtccagggacacagaatgttggtttctaacagactacttccaaaaacagtttgagaaaaaaactgtctgattttaagtctctagaggtctgtaatagtttttacatttttcaggcagtgtaaagttttttgataaggccattttaggtggctcactttctcattaagatatatatatagaaccactttttgtagattagtataagaaaaatatttaccctgttttggggcaaatgctacctatttgtgtcaccttttgctgaactcacagttagacaatccatggtttaatgcacatgaaattacctatattttatactgtttcaatgtacaggagaaaggttactgtaaactgtgttatgttggtgcttctgtgaattaagttgtggtttcatcatgagtcttaatgttctttgttgataagacaagtttagaattggtttacttaatacaaaaaaaaaaaaaagaatttcaaaaaaaaaagttgtttgcttaaaaaaaatttcatgtgagggaaaaaaaaaaaaacctattccagaataagttttgtgttggcttgtgaagcattgatgtcattttttttaattgtggactatttagatgtgtttgtgttcagcaaaatgtgatctgtttttttcttttaaagaaaaaaagtgaaaatatatagtgccaaattccaaaggtacttccttcctagagcttcagtgtgtttcttgtgagaagtaatttgataacatgggtattttattatgtgttttgtataaatccctaatatttaaaaaaaaaaacaaaacaaaaaaaggttacaaagtttgttaacttgctatcctgtggtcttgttgcctgaaattgttattgtttgttatttctctctgatgttttttgtaagacattgtataagtgcccatgtcccacttttttaaccactccgcacatcagtgctgtgaaggcaacctcaccatgtattttcttcataatctatggaaacctctaaggtgagaaagttttgaacttttaaccctttctacccagagctatctggaatgttgatgactttttatactgtcatgatttgagtttgttttggggtgtttccaatttggatttttttccctgcatctatcctctaagttgtttcggtttgactactttgttctttggttaagatccaaaagaaaacagaaaacaattccacgaggccaatctaaagggaaaaaatcctacactacttttactacttttgattatttctcatttttgggaaaagaattcctaatgtgctactagaattccttcttcagttttaacgagtaattggataaaccctgagggaaaacggaggtagattcagcacctaacaatcctgtatgcttttgagatcacgtttagtgctatgtcctagtctagaatattttcatataccttgcagtaaaacgactttgtggcaggacagtctcttgaggggttttgtttctgtttcctaaatactcctaaataatatttctaatcagccattatgctggggcatctctgatcccagtaggtacctctgaatataccaggtgtctggagttagaagcccatagccctttcccagcctttttggtttttttaattgaacacatttcatctaagtaaagctcagttctttatcacaatttactgaccaaatacctagcaccagttcctgctgccactttttaaagtgccatatgactttctacgaacaggtaccttgctgtcttgacaaatcctaatgtcacgcctacagccccaacacaagctccagtcttcctcttcggcatgccctggaagcttcttggcctcagctccccttccccgctcagcaccctgttaggatcagtgtgtgtggatgggatagccctgggatggaaaggactagcctctactgatgcaaaaaaacaaaaagcaacacaaacgtttccttcttatagcacatgcacttccttacaatgacatgatttgtattatcctcacatgtgtttactactgctggggccttccttcatcctctgagggctattttgtactttctgcagcaatcagcttaataacaacacttattgcacctgtctctctctgagaacacggtgtgtctcgacacgtaccacgtacgtggaaacacaagagcccaccacttgaatttctaagaccatttcattctgaaacttcttatcaattacctaaatctcaacgaaaaacaatttactgaagccgactcccctccccatctccctctcaacctcaacccacctgcatgcatctcccccagaggaaacactgagggtaggggacaggaggctcaggacgcgccctctgaatcgagtgtttcttcttcacaagtcaccaagagaggacatgagggggaaagtccttttttgcccttctccaaaaaataaccttccacagagacaaactgtccttctatccacttttatcttttaataaatatcaaaaggaaaaagctgcaagggtgcaaagggcctgtgccagaagaaaacacacacagggaaaccgctttttttaatcaattgtagagaatagtcatttttaatctaaattagagaattgtgatacaatggcagtcctcaaaggcgtaacgagttcatctttctttcaccataggggttatagttggcttgtgctactctggaatcattttactgtttgtttttattatcttaagtgctaattaaaaaaaaaataaaattttaaaaaaacctgtagtttcattacctttttgaataatgtcatacaaaaaatgtatttgtttttttgtgctgtgagaattgatgtttgtagattaataatcattttgtttagaattacaaaatagtttttaaatattgtctgagaaaagccaaagttaatgcaacctagtggaaactgtaagaccatttgagtattgtttgttttattgatgcatttggattttgttgtttgatggaatttgagccaaaaaaaaaatacgcaggctttcctatttctacaactgattgtacttatgcattttgtaccagtggaactttttatactggagattaaaaaaaaaatggaaatttttgtggcttgctctggtgggcccctgacaatgactgatttcaagtttgatttcgggttgattgattgattgattgatagaaagaaagttgcttttcttttgagaattaaaaactttggcttgatttcttttttccctttgcttatatctagcattagaattttgtcttaaaataacagcggtaagtttcactttttattctgtattgtgcagttacacaataaggtaattagatttagaagtactcagtcactttaagtggataaatgtattagttaaaactttagggtttgcttttttgctgtttagatcaaagttttttctgattcttctgtcctcattgtgaacataaccgtgtagttgaaacagtcaaacttatttttgtaatgtatgttattgtgtgatgcagttttttgcttctgtctccaatattaaaccattttccta

SEQ ID NO: 421116 - DNA, 5504 bp, Homo sapiens
atgaaacgcttgaaggtgcagctgaagcgttccatgccggatctgaaagccattcatagcttggatagcagcttgtgcagagactggattgtcgtagctaacaaaaccaaagcacttgctatgaatggctttcagatcggcatgaaacgcttgaaggtgcagctgaagcgttccaaaaacgacagcaaaccttactgatcctaaccccagaggctccctgctctcattttagctttcttagggtaagtcccacgagccagcctgtctcaacagggaaggcagaggaggaccacattgccaacttttaccaagagagacggttatttttacaataaggcctccatgtccccacccacttcccctacccagtttgccataattaaaacttgggctactttgtttctattgagtaattcctcctccagttgtgccactgtattctcctttgttttgcgatttgaatctccttttacctttttttttaatttttttcatttttgcttttttttaaagagaagcatatacacaaataaatggcatcttgagaatttaaaaggcaaacaaacaaacgctaatgtgcaattctaactctgaaaccactggtgccccgagagcactgcctggagaattcacccctccttgcccggcgcccgcccccggagggagggcccggtgcttagaggttaacttggtggcctaggagagggagaagccaggagaagcacttactccaaccacacgtctttccactacatcggcttgttttactaagtaggattttattttagggttcaaagaaacatgacatttattggtcaaaatattacactggttgtctattttgttattgttttattttagtttttagaaaggattaatgtacaaaaagatttagagatctgtttcttaaagctacagggtttaaaaaataaaaatgagtgaaaatacttgatgtttcttgaaagataaatttaataataataaataaatacataaatacataaataaaaaagaaagccacaggcctgtaaattttatttgtaaaaaagcatttctatttttatacaaaatttttactgcctcagaaataatggaagttatttattgcctattgttaacttattgggtacctaaagagcagttctctgtctagctagaaccttctgaagtagtctctagaggaattgttctaggaatgggctttttttcaccgttgaaccctagacctgaagttcatgctttatcctctcgttgtttgtatctgtctgattattttgtttgtaacttccattatctagtttacagttcagtcgtctgactttccccgtatgtcacatttgttgaaactggaccttctccccctgtccctcaccccaaaacacccggaatccatcccctttcgctctctccagatggattctcttggggtttcattgtgctgtggataaggagtgtaagaaatgcaaattatgtgaatggctcggagactccctaatgacctaagatttgcattagtttttctcctgcacccttaaaagtgattttgttgccgctgcatagattctgtgtaactttttactcttccttgttttttccctagacatcttcatgcccgttagttcatcgtttgcctagcatgtccctgtggcgtctcaaaaaaaagtttcatcgtcccgtcattgtttctgatgtctttctgacctcacatcatatttggttctcctactgacctttgatctagtttgacctttgaaatttgcatgtgacctcatctagctatgaattctgggaagtcaatgtgaaaaacattgctgcattcatgcaagactgaaatttattattagacaaattcattatagaaaaaacctgtggcaaaaacgtttctttcttattttttttcttttcctaaaacagacttgaaagtattatacagggattggcattcttcccggtcactggtaacaatagcaatatgtgtccagggacacagaatgttggtttctaacagactacttccaaaaacagtttgagaaaaaaactgtctgattttaagtctctagaggtctgtaatagtttttacatttttcaggcagtgtaaagttttttgataaggccattttaggtggctcactttctcattaagatatatatatagaaccactttttgtagattagtataagaaaaatatttaccctgttttggggcaaatgctacctatttgtgtcaccttttgctgaactcacagttagacaatccatggtttaatgcacatgaaattacctatattttatactgtttcaatgtacaggagaaaggttactgtaaactgtgttatgttggtgcttctgtgaattaagttgtggtttcatcatgagtcttaatgttctttgttgataagacaagtttagaattggtttacttaatacaaaaaaaaaaaaaagaatttcaaaaaaaaaagttgtttgcttaaaaaaaatttcatgtgagggaaaaaaaaaaaaacctattccagaataagttttgtgttggcttgtgaagcattgatgtcattttttttaattgtggactatttagatgtgtttgtgttcagcaaaatgtgatctgtttttttcttttaaagaaaaaaagtgaaaatatatagtgccaaattccaaaggtacttccttcctagagcttcagtgtgtttcttgtgagaagtaatttgataacatgggtattttattatgtgttttgtataaatccctaatatttaaaaaaaaaaacaaaacaaaaaaaggttacaaagtttgttaacttgctatcctgtggtcttgttgcctgaaattgttattgtttgttatttctctctgatgttttttgtaagacattgtataagtgcccatgtcccacttttttaaccactccgcacatcagtgctgtgaaggcaacctcaccatgtattttcttcataatctatggaaacctctaaggtgagaaagttttgaacttttaaccctttctacccagagctatctggaatgttgatgactttttatactgtcatgatttgagtttgttttggggtgtttccaatttggatttttttccctgcatctatcctctaagttgtttcggtttgactactttgttctttggttaagatccaaaagaaaacagaaaacaattccacgaggccaatctaaagggaaaaaatcctacactacttttactacttttgattatttctcatttttgggaaaagaattcctaatgtgctactagaattccttcttcagttttaacgagtaattggataaaccctgagggaaaacggaggtagattcagcacctaacaatcctgtatgcttttgagatcacgtttagtgctatgtcctagtctagaatattttcatataccttgcagtaaaacgactttgtggcaggacagtctcttgaggggttttgtttctgtttcctaaatactcctaaataatatttctaatcagccattatgctggggcatctctgatcccagtaggtacctctgaatataccaggtgtctggagttagaagcccatagccctttcccagcctttttggtttttttaattgaacacatttcatctaagtaaagctcagttctttatcacaatttactgaccaaatacctagcaccagttcctgctgccactttttaaagtgccatatgactttctacgaacaggtaccttgctgtcttgacaaatcctaatgtcacgcctacagccccaacacaagctccagtcttcctcttcggcatgccctggaagcttcttggcctcagctccccttccccgctcagcaccctgttaggatcagtgtgtgtggatgggatagccctgggatggaaaggactagcctctactgatgcaaaaaaacaaaaagcaacacaaacgtttccttcttatagcacatgcacttccttacaatgacatgatttgtattatcctcacatgtgtttactactgctggggccttccttcatcctctgagggctattttgtactttctgcagcaatcagcttaataacaacacttattgcacctgtctctctctgagaacacggtgtgtctcgacacgtaccacgtacgtggaaacacaagagcccaccacttgaatttctaagaccatttcattctgaaacttcttatcaattacctaaatctcaacgaaaaacaatttactgaagccgactcccctccccatctccctctcaacctcaacccacctgcatgcatctcccccagaggaaacactgagggtaggggacaggaggctcaggacgcgccctctgaatcgagtgtttcttcttcacaagtcaccaagagaggacatgagggggaaagtccttttttgcccttctccaaaaaataaccttccacagagacaaactgtccttctatccacttttatcttttaataaatatcaaaaggaaaaagctgcaagggtgcaaagggcctgtgccagaagaaaacacacacagggaaaccgctttttttaatcaattgtagagaatagtcatttttaatctaaattagagaattgtgatacaatggcagtcctcaaaggcgtaacgagttcatctttctttcaccataggggttatagttggcttgtgctactctggaatcattttactgtttgtttttattatcttaagtgctaattaaaaaaaaaataaaattttaaaaaaacctgtagtttcattacctttttgaataatgtcatacaaaaaatgtatttgtttttttgtgctgtgagaattgatgtttgtagattaataatcattttgtttagaattacaaaatagtttttaaatattgtctgagaaaagccaaagttaatgcaacctagtggaaactgtaagaccatttgagtattgtttgttttattgatgcatttggattttgttgtttgatggaatttgagccaaaaaaaaaatacgcaggctttcctatttctacaactgattgtacttatgcattttgtaccagtggaactttttatactggagattaaaaaaaaaatggaaatttttgtggcttgctctggtgggcccctgacaatgactgatttcaagtttgatttcgggttgattgattgattgattgatagaaagaaagttgcttttcttttgagaattaaaaactttggcttgatttcttttttccctttgcttatatctagcattagaattttgtcttaaaataacagcggtaagtttcactttttattctgtattgtgcagttacacaataaggtaattagatttagaagtactcagtcactttaagtggataaatgtattagttaaaactttagggtttgcttttttgctgtttagatcaaagttttttctgattcttctgtcctcattgtgaacataaccgtgtagttgaaacagtcaaacttatttttgtaatgtatgttattgtgtgatgcagttttttgcttctgtctccaatattaaaccattttccta

SEQ ID NO: 421117 - DNA, 5581 bp, Homo sapiens
acaagtgccggctcggcggccgccgggggaggccgcgcgcacctgtccctgcccgtctcgcgccgcccgcggccgctcggacgcgcgcagagccgccccccgccgctgccgccgcgtgcgcccgcgaacatgacttctgccttcaagctggatttcctcccggacatgatggtcgagggccgcctgctcgttcctgacagaattaacggcacagccaacaagatgaacggagctttggatcactcagaccaaccagacccagatgccattaagatgtttgtcggacagatcccccggtcatggtcggaaaaggagctgaaagaactttttgagccttacggagccgtctaccagatcaacgtcctccgggaccggagtcagaaccctccgcagagtaaaggttgttgtttcgtaacattttatacaagaaaagctgcacttgaggcccagaatgcactgcacaatattaaaactttacctgggatgcatcatcccattcagatgaaacctgcagatagtgaaaagtccaacgctgtggaagacagaaaattgttcataggaatggtttcgaagaaatgtaatgagaacgacatcagggtgatgttctctccatttggccagatagaagaatgccggatcctccggggacctgatgggctgagtcgaggctgtgcgtttgtcacattttctacaagggcaatggcacagaatgcaatcaaagccatgcatcagtctcagaccatggagggctgctcttcacctatcgtggtgaagtttgctgacactcagaaggacaaagagcaaaggcgcctccagcagcagctcgctcagcagatgcagcagctcaacactgccacctgggggaacctgacagggctgggcggactgaccccacagtatctggcgctcctgcagcaggccacctcctccagcaacctgggtgcgttcagcggcattcaacaaatggcaggcatgaatgctttacagttgcagaacctggcgacgctggctgctgctgcagctgcggcccagacctcagccaccagcaccaatgcaaaccctctctctaccacgagcagcgccctgggagccctcacgagtcccgtggctgcttcaacccccaactccactgctggtgcagccatgaactccttgacctctctcgggactctgcaaggactggatggcggctctgaatggaggacttggcgccacaggcttgacgaatggcacggctggcaccatggacgccctcacccaggcctactcaggaattcaacagtacgcagccgccgcgctgcccactctgtacagccagagcctgctgcagcagcagagcgctgcaggcagccagaaggaaggtccagagggggcaaacctctttatttaccaccttccacaggaatttggagaccaggacattctgcagatgttcatgccttttggaaatgttatctctgctaaagtcttcattgacaaacagaccaatctgagcaagtgctttggttttgttagctacgacaatccagtctctgcacaagctgctatccaagctatgaatggctttcagatcggcatgaaacgcttgaaggtgcagctgaagcgttccaaaaacgacagcaaaccttactgatcctaaccccagaggctccctgctctcattttagctttcttaggacatcttcatgcccgttagttcatcgtttgcctagcatgtccctgtggcgtctcaaaaaaaagtttcatcgtcccgtcattgtttctgatgtctttctgacctcacatcatatttggttctcctactgacctttgatctagtttgacctttgaaatttgcatgtgacctcatctagctatgaattctgggaagtcaatgtgaaaaacattgctgcattcatgcaagactgaaatttattattagacaaattcattatagaaaaaacctgtggcaaaaacgtttctttcttattttttttcttttcctaaaacagacttgaaagtattatacagggattggcattcttcccggtcactggtaacaatagcaatatgtgtccagggacacagaatgttggtttctaacagactacttccaaaaacagtttgagaaaaaaactgtctgattttaagtctctagaggtctgtaatagtttttacatttttcaggcagtgtaaagttttttgataaggccattttaggtggctcactttctcattaagatatatatatagaaccactttttgtagattagtataagaaaaatatttaccctgttttggggcaaatgctacctatttgtgtcaccttttgctgaactcacagttagacaatccatggtttaatgcacatgaaattacctatattttatactgtttcaatgtacaggagaaaggttactgtaaactgtgttatgttggtgcttctgtgaattaagttgtggtttcatcatgagtcttaatgttctttgttgataagacaagtttagaattggtttacttaatacaaaaaaaaaaaaaagaatttcaaaaaaaaaagttgtttgcttaaaaaaaatttcatgtgagggaaaaaaaaaaaaacctattccagaataagttttgtgttggcttgtgaagcattgatgtcattttttttaattgtggactatttagatgtgtttgtgttcagcaaaatgtgatctgtttttttcttttaaagaaaaaaagtgaaaatatatagtgccaaattccaaaggtacttccttcctagagcttcagtgtgtttcttgtgagaagtaatttgataacatgggtattttattatgtgttttgtataaatccctaatatttaaaaaaaaaaacaaaacaaaaaaaggttacaaagtttgttaacttgctatcctgtggtcttgttgcctgaaattgttattgtttgttatttctctctgatgttttttgtaagacattgtataagtgcccatgtcccacttttttaaccactccgcacatcagtgctgtgaaggcaacctcaccatgtattttcttcataatctatggaaacctctaaggtgagaaagttttgaacttttaaccctttctacccagagctatctggaatgttgatgactttttatactgtcatgatttgagtttgttttggggtgtttccaatttggatttttttccctgcatctatcctctaagttgtttcggtttgactactttgttctttggttaagatccaaaagaaaacagaaaacaattccacgaggccaatctaaagggaaaaaatcctacactacttttactacttttgattatttctcatttttgggaaaagaattcctaatgtgctactagaattccttcttcagttttaacgagtaattggataaaccctgagggaaaacggaggtagattcagcacctaacaatcctgtatgcttttgagatcacgtttagtgctatgtcctagtctagaatattttcatataccttgcagtaaaacgactttgtggcaggacagtctcttgaggggttttgtttctgtttcctaaatactcctaaataatatttctaatcagccattatgctggggcatctctgatcccagtaggtacctctgaatataccaggtgtctggagttagaagcccatagccctttcccagcctttttggtttttttaattgaacacatttcatctaagtaaagctcagttctttatcacaatttactgaccaaatacctagcaccagttcctgctgccactttttaaagtgccatatgactttctacgaacaggtaccttgctgtcttgacaaatcctaatgtcacgcctacagccccaacacaagctccagtcttcctcttcggcatgccctggaagcttcttggcctcagctccccttccccgctcagcaccctgttaggatcagtgtgtgtggatgggatagccctgggatggaaaggactagcctctactgatgcaaaaaaacaaaaagcaacacaaacgtttccttcttatagcacatgcacttccttacaatgacatgatttgtattatcctcacatgtgtttactactgctggggccttccttcatcctctgagggctattttgtactttctgcagcaatcagcttaataacaacacttattgcacctgtctctctctgagaacacggtgtgtctcgacacgtaccacgtacgtggaaacacaagagcccaccacttgaatttctaagaccatttcattctgaaacttcttatcaattacctaaatctcaacgaaaaacaatttactgaagccgactcccctccccatctccctctcaacctcaacccacctgcatgcatctcccccagaggaaacactgagggtaggggacaggaggctcaggacgcgccctctgaatcgagtgtttcttcttcacaagtcaccaagagaggacatgagggggaaagtccttttttgcccttctccaaaaaataaccttccacagagacaaactgtccttctatccacttttatcttttaataaatatcaaaaggaaaaagctgcaagggtgcaaagggcctgtgccagaagaaaacacacacagggaaaccgctttttttaatcaattgtagagaatagtcatttttaatctaaattagagaattgtgatacaatggcagtcctcaaaggcgtaacgagttcatctttctttcaccataggggttatagttggcttgtgctactctggaatcattttactgtttgtttttattatcttaagtgctaattaaaaaaaaaataaaattttaaaaaaacctgtagtttcattacctttttgaataatgtcatacaaaaaatgtatttgtttttttgtgctgtgagaattgatgtttgtagattaataatcattttgtttagaattacaaaatagtttttaaatattgtctgagaaaagccaaagttaatgcaacctagtggaaactgtaagaccatttgagtattgtttgttttattgatgcatttggattttgttgtttgatggaatttgagccaaaaaaaaaatacgcaggctttcctatttctacaactgattgtacttatgcattttgtaccagtggaactttttatactggagattaaaaaaaaaatggaaatttttgtggcttgctctggtgggcccctgacaatgactgatttcaagtttgatttcgggttgattgattgattgattgatagaaagaaagttgcttttcttttgagaattaaaaactttggcttgatttcttttttccctttgcttatatctagcattagaattttgtcttaaaataacagcggtaagtttcactttttattctgtattgtgcagttacacaataaggtaattagatttagaagtactcagtcactttaagtggataaatgtattagttaaaactttagggtttgcttttttgctgtttagatcaaagttttttctgattcttctgtcctcattgtgaacataaccgtgtagttgaaacagtcaaacttatttttgtaatgtatgttattgtgtgatgcagttttttgcttctgtctccaatattaaaccattttccta

SEQ ID NO: 421118 - DNA, 3974 bp, Homo sapiens
agttgagaacggtgaataggaatatgactagacagaagatgctccctgctctcattttagctttcttaggacatcttcatgcccgttagttcatcgtttgcctagcatgtccctgtggcgtctcaaaaaaaagtttcatcgtcccgtcattgtttctgatgtctttctgacctcacatcatatttggttctcctactgacctttgatctagtttgacctttgaaatttgcatgtgacctcatctagctatgaattctgggaagtcaatgtgaaaaacattgctgcattcatgcaagactgaaatttattattagacaaattcattatagaaaaaacctgtggcaaaaacgtttctttcttattttttttcttttcctaaaacagacttgaaagtattatacagggattggcattcttcccggtcactggtaacaatagcaatatgtgtccagggacacagaatgttggtttctaacagactacttccaaaaacagtttgagaaaaaaactgtctgattttaagtctctagaggtctgtaatagtttttacatttttcaggcagtgtaaagttttttgataaggccattttaggtggctcactttctcattaagatatatatatagaaccactttttgtagattagtataagaaaaatatttaccctgttttggggcaaatgctacctatttgtgtcaccttttgctgaactcacagttagacaatccatggtttaatgcacatgaaattacctatattttatactgtttcaatgtacaggagaaaggttactgtaaactgtgttatgttggtgcttctgtgaattaagttgtggtttcatcatgagtcttaatgttctttgttgataagacaagtttagaattggtttacttaatacaaaaaaaaaaaaaagaatttcaaaaaaaaaagttgtttgcttaaaaaaaatttcatgtgagggaaaaaaaaaaaaacctattccagaataagttttgtgttggcttgtgaagcattgatgtcattttttttaattgtggactatttagatgtgtttgtgttcagcaaaatgtgatctgtttttttcttttaaagaaaaaaagtgaaaatatatagtgccaaattccaaaggtacttccttcctagagcttcagtgtgtttcttgtgagaagtaatttgataacatgggtattttattatgtgttttgtataaatccctaatatttaaaaaaaaaaacaaaacaaaaaaaggttacaaagtttgttaacttgctatcctgtggtcttgttgcctgaaattgttattgtttgttatttctctctgatgttttttgtaagacattgtataagtgcccatgtcccacttttttaaccactccgcacatcagtgctgtgaaggcaacctcaccatgtattttcttcataatctatggaaacctctaaggtgagaaagttttgaacttttaaccctttctacccagagctatctggaatgttgatgactttttatactgtcatgatttgagtttgttttggggtgtttccaatttggatttttttccctgcatctatcctctaagttgtttcggtttgactactttgttctttggttaagatccaaaagaaaacagaaaacaattccacgaggccaatctaaagggaaaaaatcctacactacttttactacttttgattatttctcatttttgggaaaagaattcctaatgtgctactagaattccttcttcagttttaacgagtaattggataaaccctgagggaaaacggaggtagattcagcacctaacaatcctgtatgcttttgagatcacgtttagtgctatgtcctagtctagaatattttcatataccttgcagtaaaacgactttgtggcaggacagtctcttgaggggttttgtttctgtttcctaaatactcctaaataatatttctaatcagccattatgctggggcatctctgatcccagtaggtacctctgaatataccaggtgtctggagttagaagcccatagccctttcccagcctttttggtttttttaattgaacacatttcatctaagtaaagctcagttctttatcacaatttactgaccaaatacctagcaccagttcctgctgccactttttaaagtgccatatgactttctacgaacaggtaccttgctgtcttgacaaatcctaatgtcacgcctacagccccaacacaagctccagtcttcctcttcggcatgccctggaagcttcttggcctcagctccccttccccgctcagcaccctgttaggatcagtgtgtgtggatgggatagccctgggatggaaaggactagcctctactgatgcaaaaaaacaaaaagcaacacaaacgtttccttcttatagcacatgcacttccttacaatgacatgatttgtattatcctcacatgtgtttactactgctggggccttccttcatcctctgagggctattttgtactttctgcagcaatcagcttaataacaacacttattgcacctgtctctctctgagaacacggtgtgtctcgacacgtaccacgtacgtggaaacacaagagcccaccacttgaatttctaagaccatttcattctgaaacttcttatcaattacctaaatctcaacgaaaaacaatttactgaagccgactcccctccccatctccctctcaacctcaacccacctgcatgcatctcccccagaggaaacactgagggtaggggacaggaggctcaggacgcgccctctgaatcgagtgtttcttcttcacaagtcaccaagagaggacatgagggggaaagtccttttttgcccttctccaaaaaataaccttccacagagacaaactgtccttctatccacttttatcttttaataaatatcaaaaggaaaaagctgcaagggtgcaaagggcctgtgccagaagaaaacacacacagggaaaccgctttttttaatcaattgtagagaatagtcatttttaatctaaattagagaattgtgatacaatggcagtcctcaaaggcgtaacgagttcatctttctttcaccataggggttatagttggcttgtgctactctggaatcattttactgtttgtttttattatcttaagtgctaattaaaaaaaaaataaaattttaaaaaaacctgtagtttcattacctttttgaataatgtcatacaaaaaatgtatttgtttttttgtgctgtgagaattgatgtttgtagattaataatcattttgtttagaattacaaaatagtttttaaatattgtctgagaaaagccaaagttaatgcaacctagtggaaactgtaagaccatttgagtattgtttgttttattgatgcatttggattttgttgtttgatggaatttgagccaaaaaaaaaatacgcaggctttcctatttctacaactgattgtacttatgcattttgtaccagtggaactttttatactggagattaaaaaaaaaatggaaatttttgtggcttgctctggtgggcccctgacaatgactgatttcaagtttgatttcgggttgattgattgattgattgatagaaagaaagttgcttttcttttgagaattaaaaactttggcttgatttcttttttccctttgcttatatctagcattagaattttgtcttaaaataacagcggtaagtttcactttttattctgtattgtgcagttacacaataaggtaattagatttagaagtactcagtcactttaagtggataaatgtattagttaaaactttagggtttgcttttttgctgtttagatcaaagttttttctgattcttctgtcctcattgtgaacataaccgtgtagttgaaacagtcaaacttatttttgtaatgtatgttattgtgtgatgcagttttttgcttctgtctccaatattaaaccattttccta

SEQ ID NO: 421119 - DNA, 3181 bp, Homo sapiens
gtttcatcatgagtcttaatgttttttgtattaagtaaaccaattctaaacttgtcttatcaacaaagaacattaagactcatgatgaaaccacaacttaatacaaaaaaaaaaaaaagaatttcaaaaaaaaaagttgtttgcttaaaaaaaatttcatgtgagggaaaaaaaaaaaaacctattccagaataagttttgtgttggcttgtgaagcattgatgtcattttttttaattgtggactatttagatgtgtttgtgttcagcaaaatgtgatctgtttttttcttttaaagaaaaaaagtgaaaatatatagtgccaaattccaaaggtacttccttcctagagcttcagtgtgtttcttgtgagaagtaatttgataacatgggtattttattatgtgttttgtataaatccctaatatttaaaaaaaaaaacaaaacaaaaaaaggttacaaagtttgttaacttgctatcctgtggtcttgttgcctgaaattgttattgtttgttatttctctctgatgttttttgtaagacattgtataagtgcccatgtcccacttttttaaccactccgcacatcagtgctgtgaaggcaacctcaccatgtattttcttcataatctatggaaacctctaaggtgagaaagttttgaacttttaaccctttctacccagagctatctggaatgttgatgactttttatactgtcatgatttgagtttgttttggggtgtttccaatttggatttttttccctgcatctatcctctaagttgtttcggtttgactactttgttctttggttaagatccaaaagaaaacagaaaacaattccacgaggccaatctaaagggaaaaaatcctacactacttttactacttttgattatttctcatttttgggaaaagaattcctaatgtgctactagaattccttcttcagttttaacgagtaattggataaaccctgagggaaaacggaggtagattcagcacctaacaatcctgtatgcttttgagatcacgtttagtgctatgtcctagtctagaatattttcatataccttgcagtaaaacgactttgtggcaggacagtctcttgaggggttttgtttctgtttcctaaatactcctaaataatatttctaatcagccattatgctggggcatctctgatcccagtaggtacctctgaatataccaggtgtctggagttagaagcccatagccctttcccagcctttttggtttttttaattgaacacatttcatctaagtaaagctcagttctttatcacaatttactgaccaaatacctagcaccagttcctgctgccactttttaaagtgccatatgactttctacgaacaggtaccttgctgtcttgacaaatcctaatgtcacgcctacagccccaacacaagctccagtcttcctcttcggcatgccctggaagcttcttggcctcagctccccttccccgctcagcaccctgttaggatcagtgtgtgtggatgggatagccctgggatggaaaggactagcctctactgatgcaaaaaaacaaaaagcaacacaaacgtttccttcttatagcacatgcacttccttacaatgacatgatttgtattatcctcacatgtgtttactactgctggggccttccttcatcctctgagggctattttgtactttctgcagcaatcagcttaataacaacacttattgcacctgtctctctctgagaacacggtgtgtctcgacacgtaccacgtacgtggaaacacaagagcccaccacttgaatttctaagaccatttcattctgaaacttcttatcaattacctaaatctcaacgaaaaacaatttactgaagccgactcccctccccatctccctctcaacctcaacccacctgcatgcatctcccccagaggaaacactgagggtaggggacaggaggctcaggacgcgccctctgaatcgagtgtttcttcttcacaagtcaccaagagaggacatgagggggaaagtccttttttgcccttctccaaaaaataaccttccacagagacaaactgtccttctatccacttttatcttttaataaatatcaaaaggaaaaagctgcaagggtgcaaagggcctgtgccagaagaaaacacacacagggaaaccgctttttttaatcaattgtagagaatagtcatttttaatctaaattagagaattgtgatacaatggcagtcctcaaaggcgtaacgagttcatctttctttcaccataggggttatagttggcttgtgctactctggaatcattttactgtttgtttttattatcttaagtgctaattaaaaaaaaaataaaattttaaaaaaacctgtagtttcattacctttttgaataatgtcatacaaaaaatgtatttgtttttttgtgctgtgagaattgatgtttgtagattaataatcattttgtttagaattacaaaatagtttttaaatattgtctgagaaaagccaaagttaatgcaacctagtggaaactgtaagaccatttgagtattgtttgttttattgatgcatttggattttgttgtttgatggaatttgagccaaaaaaaaaatacgcaggctttcctatttctacaactgattgtacttatgcattttgtaccagtggaactttttatactggagattaaaaaaaaaatggaaatttttgtggcttgctctggtgggcccctgacaatgactgatttcaagtttgatttcgggttgattgattgattgattgatagaaagaaagttgcttttcttttgagaattaaaaactttggcttgatttcttttttccctttgcttatatctagcattagaattttgtcttaaaataacagcggtaagtttcactttttattctgtattgtgcagttacacaataaggtaattagatttagaagtactcagtcactttaagtggataaatgtattagttaaaactttagggtttgcttttttgctgtttagatcaaagttttttctgattcttctgtcctcattgtgaacataaccgtgtagttgaaacagtcaaacttatttttgtaatgtatgttattgtgtgatgcagttttttgcttctgtctccaatattaaaccattttccta

SEQ ID NO: 421120 - DNA, 1102 bp, Homo sapiens
cattttccagagtacagagtaggctgatggtttcgataataactagtatggggaaaaagctgcaagggtgcaaagggcctgtgccagaagaaaacacacacagggaaaccgctttttttaatcaattgtagagaatagtcatttttaatctaaattagagaattgtgatacaatggcagtcctcaaaggcgtaacgagttcatctttctttcaccataggggttatagttggcttgtgctactctggaatcattttactgtttgtttttattatcttaagtgctaattaaaaaaaaaataaaattttaaaaaaacctgtagtttcattacctttttgaataatgtcatacaaaaaatgtatttgtttttttgtgctgtgagaattgatgtttgtagattaataatcattttgtttagaattacaaaatagtttttaaatattgtctgagaaaagccaaagttaatgcaacctagtggaaactgtaagaccatttgagtattgtttgttttattgatgcatttggattttgttgtttgatggaatttgagccaaaaaaaaaatacgcaggctttcctatttctacaactgattgtacttatgcattttgtaccagtggaactttttatactggagattaaaaaaaaaatggaaatttttgtggcttgctctggtgggcccctgacaatgactgatttcaagtttgatttcgggttgattgattgattgattgatagaaagaaagttgcttttcttttgagaattaaaaactttggcttgatttcttttttccctttgcttatatctagcattagaattttgtcttaaaataacagcggtaagtttcactttttattctgtattgtgcagttacacaataaggtaattagatttagaagtactcagtcactttaagtggataaatgtattagttaaaactttagggtttgcttttttgctgtttagatcaaagttttttctgattcttctgtcctcattgtgaacataaccgtgtagttgaaacagtcaaacttatttttgtaatgtatgttattgtgtgatgcagttttttgcttctgtctccaatattaaaccattttccta

SEQ ID NO: 421121 - DNA, 2364 bp, Homo sapiens
acaagtgccggctcggcggccgccgggggaggccgcgcgcacctgtccctgcccgtctcgcgccgcccgcggccgctcggacgcgcgcagagccgccccccgccgctgccgccgcgtgcgcccgcgaacatgacttctgccttcaagctggatttcctcccggacatgatggtcgagggccgcctgctcgttcctgacagaattaacggcacagccaacaagatgaacggagctttggatcactcagaccaaccagacccagatgccattaagatgtttgtcggacagatcccccggtcatggtcggaaaaggagctgaaagaactttttgagccttacggagccgtctaccagatcaacgtcctccgggaccggagtcagaaccctccgcagagtaaaggttgttgtttcgtaacattttatacaagaaaagctgcacttgaggcccagaatgcactgcacaatattaaaactttacctgggatgcatcatcccattcagatgaaacctgcagatagtgaaaagtccaacgctgtggaagacagaaaattgttcataggaatggtttcgaagaaatgtaatgagaacgacatcagggtgatgttctctccatttggccagatagaagaatgccggatcctccggggacctgatgggctgagtcgaggctgtgcgtttgtcacattttctacaagggcaatggcacagaatgcaatcaaagccatgcatcagtctcagaccatggagggctgctcttcacctatcgtggtgaagtttgctgacactcagaaggacaaagagcaaaggcgcctccagcagcagctcgctcagcagatgcagcagctcaacactgccacctgggggaacctgacagggctgggcggactgaccccacagtatctggcgctcctgcagcaggccacctcctccagcaacctgggtgcgttcagcggcattcaacaaatggcaggcatgaatgctttacagttgcagaacctggcgacgctggctgctgctgcagctgcggcccagacctcagccaccagcaccaatgcaaaccctctctctaccacgagcagcgccctgggagccctcacgagtcccgtggctgcttcaacccccaactccactgctggtgcagccatgaactccttgacctctctcgggactctgcaaggactggctggagccactgttggactgaataatattaatgcactagcagatggcggctctgaatggaggacttggcgccacaggcttgacgaatggcacggctggcaccatggacgccctcacccaggcctactcaggaattcaacagtacgcagccgccgcgctgcccactctgtacagccagagcctgctgcagcagcagagcgctgcaggcagccagaaggaaggtccagagggggcaaacctctttatttaccaccttccacaggaatttggagaccaggacattctgcagatgttcatgccttttggaaatgttatctctgctaaagtcttcattgacaaacagaccaatctgagcaagtgctttggttttgttagctacgacaatccagtctctgcacaagctgctatccaagctatgaatggctttcagatcggcatgaaacgcttgaaggtgcagctgaagcgttccaaaaacgacagcaaaccttactgatcctaaccccagaggctccctgctctcattttagctttcttagggtaagtcccacgagccagcctgtctcaacagggaaggcagaggaggaccacattgccaacttttaccaagagagacggttatttttacaataaggcctccatgtccccacccacttcccctacccagtttgccataattaaaacttgggctactttgtttctattgagtaattcctcctccagttgtgccactgtattctcctttgttttgcgatttgaatctccttttacctttttttttaatttttttcatttttgcttttttttaaagagaagcatatacacaaataaatggcatcttgagaatttaaaaggcaaacaaacaaacgctaatgtgcaattctaactctgaaaccactggtgccccgagagcactgcctggagaattcacccctccttgcccggcgcccgcccccggagggagggcccggtgcttagaggttaacttggtggcctaggagagggagaagccaggagaagcacttactccaaccacacgtctttccactacatcggcttgttttactaagtaggattttattttagggttcaaagaaacatgacatttattggtcaaaatattacacacggggggccatttgggaaatgggtaaattaaggtttaaaaagggataaggtccaaaa

SEQ ID NO: 421122 - DNA, 1546 bp, Homo sapiens
acaagtgccggctcggcggccgccgggggaggccgcgcgcacctgtccctgcccgtctcgcgccgcccgcggccgctcggacgcgcgcagagccgccccccgccgctgccgccgcgtgcgcccgcgaacatgacttctgccttcaagctggatttcctcccggacatgatggtcgagggccgcctgctcgttcctgacagaattaacggcacagccaacaagatgaacggagctttggatcactcagaccaaccagacccagatgccattaagatgtttgtcggacagatcccccggtcatggtcggaaaaggagctgaaagaactttttgagccttacggagccgtctaccagatcaacgtcctccgggaccggagtcagaaccctccgcagagtaaaggttgttgtttcgtaacattttatacaagaaaagctgcacttgaggcccagaatgcactgcacaatattaaaactttacctgggatgcatcatcccattcagatgaaacctgcagatagtgaaaagtccaacgctgtggaagacagaaaattgttcataggaatggtttcgaagaaatgtaatgagaacgacatcagggtgatgttctctccatttggccagatagaagaatgccggatcctccggggacctgatgggctgagtcgaggctgtgcgtttgtcacattttctacaagggcaatggcacagaatgcaatcaaagccatgcatcagtctcagaccatggagggctgctcttcacctatcgtggtgaagtttgctgacactcagaaggacaaagagcaaaggcgcctccagcagcagctcgctcagcagatgcagcagctcaacactgccacctgggggaacctgacagggctgggcggactgaccccacagtatctggcgctcctgcagcaggccacctcctccagcaacctgggtgcgttcagcggcattcaacaaatggcaggcatgaatgctttacagttgcagaacctggcgacgctggctgctgctgcagctgcggcccagacctcagccaccagcaccaatgcaaaccctctctctaccacgagcagcgccctgggagccctcacgagtcccgtggctgcttcaacccccaactccactgctggtgcagccatgaactccttgacctctctcgggactctgcaaggactggctggagccactgttggactgaataatattaatgcactagcagatggcggctctgaatggaggacttggcgccacaggcttgacgaatggcacggctggcaccatggacgccctcacccaggcctactcaggaattcaacagtacgcagccgccgcgctgcccactctgtacagccagagcctgctgcagcagcagagcgctgcaggcagccagaaggaaggtaggtgccgcccttggccccaggcagggcccagcccaacaggcagcactggcctctagagcacggttagaaggtatcaaattgaactgaacccatgtcataacagaaagcagttgttttgttattcatgtttaaaaaaaaaa

SEQ ID NO: 421123 - DNA, 1747 bp, Homo sapiens
acaagtgccggctcggcggccgccgggggaggccgcgcgcacctgtccctgcccgtctcgcgccgcccgcggccgctcggacgcgcgcagagccgccccccgccgctgccgccgcgtgcgcccgcgaacatgacttctgccttcaagctggatttcctcccggacatgatggtcgagggccgcctgctcgttcctgacagaattaacggcacagccaacaagatgaacggagctttggatcactcagaccaaccagacccagatgccattaagatgtttgtcggacagatcccccggtcatggtcggaaaaggagctgaaagaactttttgagccttacggagccgtctaccagatcaacgtcctccgggaccggagtcagaaccctccgcagagtaaaggttgttgtttcgtaacattttatacaagaaaagctgcacttgaggcccagaatgcactgcacaatattaaaactttacctgggatgcatcatcccattcagatgaaacctgcagatagtgaaaagtccaacgctgtggaagacagaaaattgttcataggaatggtttcgaagaaatgtaatgagaacgacatcagggtgatgttctctccatttggccagatagaagaatgccggatcctccggggacctgatgggctgagtcgaggctgtgcgtttgtcacattttctacaagggcaatggcacagaatgcaatcaaagccatgcatcagtctcagaccatggagggctgctcttcacctatcgtggtgaagtttgctgacactcagaaggacaaagagcaaaggcgcctccagcagcagctcgctcagcagatgcagcagctcaacactgccacctgggggaacctgacagggctgggcggactgaccccacagtatctggcgctcctgcagcaggccacctcctccagcaacctgggtgcgttcagcggcattcaacaaatggcaggcatgaatgctttacagttgcagaacctggcgacgctggctgctgctgcagctgcggcccagacctcagccaccagcaccaatgcaaaccctctctctaccacgagcagcgccctgggagccctcacgagtcccgtggctgcttcaacccccaactccactgctggtgcagccatgaactccttgacctctctcgggactctgcaaggactggctggagccactgttggactgaataatattaatgcactagcagatggcggctctgaatggaggacttggcgccacaggcttgacgaatggcacggctggcaccatggacgccctcacccaggcctactcaggaattcaacagtacgcagccgccgcgctgcccactctgtacagccagagcctgctgcagcagcagagcgctgcaggcagccagaaggaaggtccagagggggcaaacctctttatttaccaccttccacaggaatttggagaccaggacattctgcagatgttcatgccttttggaaatgttatctctgctaaagtcttcattgacaaacagaccaatctgagcaagtgctttggttttgttagctacgacaatccagtctctgcacaagctgctatccaagctatgaatggctttcagatcggcatgaaacgcttgaaggtgcagctgaagcgttccaaaaacgacagcaaaccgtggactagatagccaaccgtggactagtagccaagccgtggactagtagccaaccgtggactagtagccaacactagt

SEQ ID NO: 421124 - DNA, 1104 bp, Homo sapiens
agctctgcctttctttcccagccacagccagggtagggctgataaggcgctgatgcgttgatggcagccttgcagagctagacctgcacttaacttgcagctgcctcccgagcctccaagatgtccacgccctgggtgacaggcggcagggcgctgccccgtgctcccccggctctgctcgacagcagcacgcagtgagagcctcgccgccgccgaggagcaactcatggtgcctccgctttgttttagttcatcaaatttctacgactcattaggcactttgccactgctcttcttcctcctccttccgcctccccgctcccccacccccactattttttcttcctgtccctcatcgtgccgccctaactctggctcccggttccgtttttgacagtaacggcacagccaacaagatgaacggagctttggatcactcagaccaaccagacccagatgccattaagatgtttgtcggacagatcccccggtcatggtcggaaaaggagctgaaagaactttttgagccttacggagccgtctaccagatcaacgtcctccgggaccggagtcagaaccctccgcagagtaaaggttgttgtttcgtaacattttatacaagaaaagctgcacttgaggcccagaatgcactgcacaatattaaaactttacctgggatgcatcatcccattcagatgaaacctgcagatagtgaaaagtccaacgctgtggaagacagaaaattgttcataggaatggtttcgaagaaatgtaatgagaacgacatcagggtgatgttctctccatttggccagatagaagaatgccggatcctccggggacctgatgggctgagtcgaggtgagtgtgctgtctggaaagcctctccccttcagtgctaattggagctctgtgtcacagtcgagacagatgtaggcaccgcacacggcaagaggtcaccctgtaatacatcccatgtgataaagttatccaacctgaacttttcaccatagctgaaatcatcaccttttatttctccagttcagaaggccttggtgccaccatattagctcaagttatcactgtcaggtgtgaagccaacag

SEQ ID NO: 421125 - DNA, 627 bp, Homo sapiens
agtgacaggctggggcttggcagtatctgctgttctccagcccttcccttcccgagcctgcctgttggcctcacctggctgggacacgtgagcccctaggggcccccacagccctgaaatatttacaccactgcttgtatgagtagcatgtatggacctggggttcttttggagagatactaaaggacttgaaacacaatgatttgagcgagttcagtaagtggaactgaattcagccaaacaattgagtctgaggtttcagtgttgtggggaggggtgtgtgctccatgatgccacatttccagtccagccagctgctccacagctgctcagtgggcacgccccatcatccactcacggtggactcacgatcagttccgcagagctgtgctgggcccgtggggctggcacctcatgctggctcttcagccttccccagagctccagcccccttttctgttttctgctgggcttcctctccaggctgactccctctctcggtattttccaggttttgttagctacgacaatccagtctctgcacaagctgctatccaagctatgaatggctttcagatcggcatgaaacgcttgaaggtgcagctgaagcgttccaaaaacgacagc

SEQ ID NO: 421126 - DNA, 515 bp, Homo sapiens
  misc_feature (510)..(512): n is a, c, g, or t
  misc_feature (514)..(515): n is a, c, g, or t
ctggagacccggaagcagattacgtggagtgacggtcatgctgcggcgtggacacttggcattcagggacgtggccatagaattccctcaggaggagtggaaatgtctggaccctgctcagaggactttatacagggaagtgatggtggagaactacaggaacctggtctttctgggaatctgtcttcctgacctgagtgttatctccatgttggagcaaaggagagatccccggaatctgcagagtgaagtgaaaatagcaaacaatccagggtcttgctctgtcacccaggctgtcgtagagtggcaatcatcagtggcaatcgtggcttaactcatagcctcaaactcctggtctcaagtgatcctccttcctctgcttccgaaagtggtgggattacaagcatgagccactgtaccctgcaaaaccacactttgagtttctgtttgggagctctctgcaagtgagagaattctttgggaaaataaaagtttaaatcctgtgaaaannnann

SEQ ID NO: 421127 - DNA, 1177 bp, Homo sapiens
ctggagacccggaagcagattacgtggagtgacggtcatgctgcggcgtggacacttggcattcagggacgtggccatagaattccctcaggaggagtggaaatgtctggaccctgctcagaggactttatacagggaagtgatggtggagaactacaggaacctggtctttctgggaatctgtcttcctgacctgagtgttatctccatgttggagcaaaggagagatccccggaatctgcagagtgaagtgaaaatagcaaacaatccaggtggcagggagtgcatcaaaggtgtgaacgcagagagcagctctaaattgggaagcaatgccggaaacaagtctcttaaaatcaacttggattaacctttcagttacatctgagtgaactgcagctatttcaagctgaaaggaatatttctggatgtaaacatgtcgaaaaacctatcaacaagcaattccttagtttcaccacgttcaaaaaatttattctagtgtcgaaatcccacattttaggataaatacagaagtgatttggatgattctccatttctcccagaagaacaaaaagcacaaatcagggaaaaaccgtgtgaatgtatgagcatggcaaagcctttagagtgtcttcaagccttgctaaccatccagtaatccacactgcagataacctttacaatgtcactgcatgtgacgagggtcctatcagtaaccagctcagaaacttgttgccaccatcccgtgaattcataccctgggagagaaagcctttacacagtgtcctggactgtggcaaggcccttcaagcgaatctcatccctggacgcacatagagcaataactactgggaagaaacactacacactgtccgattcgccacgctaagctcaagacgcaaccgggaaagcctaaggacagcccaacggggggagaaaaccgtcaacgtgatcaggggagcaggaggttcacgaagaggcgtcctgggacgaagagaaaagtaagcggggaaaacaacaaagggacgacgagcacacatcggggaccgaagggaaccatagacagcagaacaagcggagcagggctccaaagagacgcaaacacgcagacaaacagggagcgacagaacagccagcgtggagctggcctccacacccgcgtacgggcagaatcgagaga

SEQ ID NO: 421128 - DNA, 604 bp, Homo sapiens
  misc_feature (599)..(601): n is a, c, g, or t
  misc_feature (603)..(604): n is a, c, g, or t
ctggagacccggaagcagattacgtggagtgacggtcatgctgcggcgtggacacttggcattcagggacgtggccatagaattccctcaggaggagtggaaatgtctggaccctgctcagaggactttatacagggaagtgatggtggagaactacaggaacctggtctttctgggaatctgtcttcctgacctgagtgttatctccatgttggagcaaaggagagatccccggaatctgcagagtgaagtgaaaatagcaaacaatccaggtggcagggagtgcatcaaaggtgtgaacgcaggtaagagcttggatggccagagtggaggccccataattttttttttttttaaacagggtcttgctctgtcacccaggctgtcgtagagtggcaatcatcagtggcaatcgtggcttaactcatagcctcaaactcctggtctcaagtgatcctccttcctctgcttccgaaagtggtgggattacaagcatgagccactgtaccctgcaaaaccacactttgagtttctgtttgggagctctctgcaagtgagagaattctttgggaaaataaaagtttaaatcctgtgaaaannnann

SEQ ID NO: 421129 - DNA, 1496 bp, Homo sapiens
tggagcattattgatttattagaaaaactagtaaatgggtttcctctggttggtggaagcacggttgagcaggtggaggacaggacccagctggccccagggccagccccagattgcatggtctgtgcccaacagggttgcattcctctgcagccgccgcctcctcatttcctccctgagcttgtttgtccaagccaccaagccatgtggtcccgctggcttcatcctcctctggattcctgcccccctcccatgaagggaggaagaggattcagggtcagcctaggggaccctggctccctccgataggcaggaaggaggagggatgcggaggagaggctgagccttccacgggcctcctgttaggggtgttggtggaggccaggttggggagggaagcctaaggaccctccacacctcccacagccagagtcagttgaggctgggacaaaggggaaggagagagggaaggaggaccgcctgaccttgcccagaaggagcttcctctaaactgccctgggaaggaagcctggtatgctggtgtggactggagctgtgtcaacctcgtttgggaatactgtcaaaagactgtagagtagaataaggagagaaaaaaaaaaaaagaccttgctagggcactgggagagcttagccctggtgtggcacacacagggtctcccaaagctggatgcctgcattttcagtctagttggtcgaatgtcttggagcctgggtgacaggagggatgtgtggggagctggcaacagaatggtcacatgcagctggctgccctggaccaggccaggggacctggggtggtgagatgctagctcttccactagagcccttcctttctcgggtctgtggagttgcttgctggaaatgcctcacttcaggtgctgatttggcacacgtggaagggggagggtgggcccttgtccctaggctccctaaagactggcccagggaaacagttgagggagatgtttgccaccatctgcccttcagcaaggaacctgctctctgccccagaggaggacatgcctgcaagtgcaccaaaggcctactttattgctaggtgagtgcagtcacctcactgccttggtttccccagatacagaaagaggctggtgagtgatacacactaggttccctgtatagggtcatatgtaccaaagccaaatgaagaccttgctcaccagggcgggaacctggggatgtcaggctccatcggatgacgtcttccttcctgtggctcctgcctgctgcagttggtgtcaccctgacatatagtgtcagggccacagggtggaactgatttctgccggcactggtcagcactcagggttcctcagggggcctcattctggatgcctgcccctgtggcttctacctgaacctcacccacttcatctccatggaactaaggtccttctcacggggaaggtgatagaaacttgactgcaggccctggggactttcatggtttccttggg

SEQ ID NO: 421130 - DNA, 6845 bp, Homo sapiens
  misc_feature (552)..(552): n is a, c, g, or t
acactgtgagaaacccccgtgtaaggtagaagatgggcagcggtgccatttgctggtttaatttacgtgatgttggttctcaggctcctgaggacagatggtatgaggcagagaaagtctggctggctcagaaggatggatttactcttgctacggtgctaaagccagatgagggaacagcagacctgccagcaggaagggtgagactttggattgatgctgacaaaaccatcactgaggtggatgaggagcatgtccatcgggccaaccctcctgagctggaccaggtcgaggacctggcctctctcatcagtgtcaacgaatccagtgtcctgaacacgcttctgcagcgctacaaagctcagctgctgcacacctgcacagggcctgatctgattgtcctccagccccgggggccctcggtgccttctgcagggaaggtgcccaagggccgccgggatggcctgcctgcccacattggctccatggcacagcgggcatactgggcgctgctgaaccagcggagagaccagagcattgtggccctgggcnggagtggcgctgggaagaccacctgctgtgagcaggtcctggaacacctggtggggatggcaggcagtgtggatggcagggtctcagtggagaagatccgagccaccttcactgtcctccgggccttcggctctgtgtccatggcccacagccgcagtgccacccggttctccatggtgatgtcgctggacttcaacgctacaggccgcatcacagctgctcagctccagacaatgcttttggagaagagccgcgtggcacggcagccggaaggggaaagtaacttcctggttttctcccagatgctggctggattggacttggatctcaggacggagctgaacctgcaccagatggcagatagcagctcctttggcatgggcgtgtggtccaagcctgaagataaacagaaggcggcagctgcctttgcccagctccagggtgccatggagatgctcggcatctcagagagcgagcagcgggctgtttggcgggtcctggcagccatctaccacctgggtgcggcgggggcctgcaaagtgggtcggaagcagttcatgaggtttgagtgggcaaactacgcagctgaggccctgggctgcgagtatgaggagctgaacacggccaccttcaagcaccaccttcgacagatcatccagcaaatgacgtttgggccaagccgatggggcctcgaggatgaggaaaccagctcagggctcaagatgacaggagtggactgtgtggaggggatggcctcgggcctgtaccaggaactctttgcggctgtggtctcactcatcaacagatccttttcctcccaccatctctccatggcctccatcatggtggtggactctccaggcttccagaacccccggcaccagggcaaggaccgggcggccacctttgaggagctgtgccacaactacgcccatgagcgcctgcagctgctgttctaccagcggacctttgtctccacgctacagcgatatcaagaggaaggtgttcctgtgcagtttgacctcccggacccctccccagggaccaccgtggctgttgtggatcaaaatccctctcaggtccgcttaccagctggaggaggtgcccaggatgccagaggccttttctgggtcttagatgaggaagtccatgtagagggctccagtgacagtgtggtgctcgagcgtctgtgtgctgctttcgagaagaaaggagctgggactgaagggtcctctgccctgcggacctgtgagcagcccctccagtgtgagattttccaccagttgggatgggaccctgtgcggtacgacctcacgggctggctccacagagccaagcccaacctctcggccctggatgcaccccaggtcctgcaccagtcaaaaagagaggagctgcggagtctattccaggcccgggccaagctgcctcctgtgtgccgggctgtggcaggcctggagggcacctcccagcaggccctgcagaggagccgcatggtgaggaggacctttgccagcagccttgccgcggtgaggaggaaagccccgtgctcccagatcaagctgcagatggatgcgctgaccagcatgatcaaaaggtcccggctgcactttatccactgcctggtaccaaaccctgtggtggaaagcaggagtgggcaggaatctccaccaccaccgcagcctggtagagacaagcctggggcaggtggacctctggccctggatatcccagcactgagggtccagcttgctgggttccacatcctggaggctctgcgtctgcataggacaggctatgctgaccacatggggctcactcgcttccgccggcaattccaggtgctggacgctccactcctgaagaagctcatgtcgacctccgagggaatagatgaaaggaaggccgtggaggagctcctggagaccctggatctggaaaagaaggcggtggctgtggggcacagccaagtttttctcaaggcaggtgtgatctccaggcttgagaagcagcgagagaagctggtatctcagagcatcgttctcttccaggcggcttgcaagggctttctgtctcgccaggaattcaagaagctgaagattcgccgactggctgcacagtgcatccagaagaatgtggctgtgttcctcgcagtcaaggactggccatggtggcagctgcttggttccctccagcctctacttagtgccaccattggaactgagcagctccgagccaaggaggaggagcttacaacgctaagacggaagctagaaaaatcagagaagttgcggaatgaactccggcagaacacagatctgctagaaagcaagattgctgacttgacctctgaccttgccgatgagcgcttcaaaggtgatgtggcctgccaggtgctggagagtgagcgggcagagcggctacaggccttccgggaggtccaggagctcaagagcaagcatgaacaagtccagaaaaaactgggagatgtgaataaacagttggaagaagcccagcagaaaattcagttgaatgacttggaaaggaatcccactggaggagcagacgagtggcagatgcgcttcgactgtgctcagatggagaacgagttcctcagaaagcgtctgcagcaatgcgaggagaggctggactcggagctgacagccaggaaagagctggagcaaaagcttggggagttgcaaagtgcttatgacggggccaagaagatggctcaccaactgaagaggaagtgccaccatcttacctgtgaccttgaggatacctgcgtcctgctagagaaccaacaaagtcgaaaccatgagctggagaagaagcagaagaagtttgacctgcagctggcccaggccctaggtgagtcagtgtttgagaagggtctccgtgagaaagtgacccaggagaacaccagtgtccggtgggagctaggccagcttcagcagcagctgaagcaaaaggagcaggaagcctcacagctgaagcagcaggtggagatgctacaggaccataaacgggagctgctggggtcaccctctctgggggaaaattgcgttgctggcttgaaggagaggctctggaagttggaatccagcgcccttgagcaacagaaaatccagagccagcaggaaaacaccatcaagcagctggagcagctccgccagcggtttgagctggagatcgagcggatgaagcagatgcaccagaaggaccgtgaggaccaggaggaggaactggaggatgtccgtcagtcctgccagaagcggcttcatcagctggaaatgcagctggagcaagagtatgaagagaagcagatggtcctccatgagaagcaagatttggaaggcttgatcggaaccctctgtgaccagattggccatcgggactttgatgtggagaagcgacttcggagagacctcaggaggacacatgcactgttgtcagacgtgcagctccttctgggcaccatggaggatggcaagacatcagtcagcaaggaggagctggagaaagtgcacagccagctggagcagagtgaagccaagtgtgaggaggccttgaagacgcagaaggtgctcacagcggacctggagagcatgcacagcgagctggagaacatgacgcggaacaagagcctggtggatgagcagctgtacaggctgcagtttgagaaggcggacctcctgaagcgcatcgatgaggaccaggatgacctgaatgagctgatgcagaagcacaaggacctcattgctcagtctgctgctgacattgggcagatccaagaactgcagctgcagctggaggaagccaagaaggagaagcacaagctacaagaacaactgcaggtggctcagatgcgcatcgagtacctggaacagtccaccgtggatcgagccatcgtcagcaggcaggaggcggtcatctgtgacctagagaacaagacagagttccagaaggtgcagattaagagatttgaggtcctggtgatccggcttcgggacagcctgatcaagatgggggaggagctttcacaggcggccacctccgagtcccagcagcgggagagcagccagtactaccagcggcgcctggaagagctgaaggccgacatggaagagctggtgcagcgggaggcagaggccagccggcggtgcatggagctggagaagtacgtggaggaacttgcagcagtgaggcaaaccctccagacagacctggagacatccattcggcggattgccgacctgcaggctgccttggaagaagtggcatccagtgacagtgatactgagagtgtccagacggcagtggattgtggcagcagcggccgaaaagagatggataacgtctccatcctcagctcccagccagagggcagcctgcagtcctggttgagctgtactctgtccctggccacagatactatgaggactccttctcgacagtcagccaccagcagccgcatcctcagccccaggataaacgaagaggctggggacactgagaggacccagtcggcattggcactgagcagagcccggtccaccaatgtccacagcaagacctcaggagacaagcctgtttctccccactttgtccgccggcaaaagtactgtcattttggggacggcgaagtgcttgccgtccagagaaagtccacagagagattagaacctgcttcctctcccctggcttctcggagtacaaatacatccccgctgtcgagggaaaagctgcccagtccttcagcggccctctcggagttcgtggaagggctccggaggaagagagcccagagaggccaggggtccacgctgggcctagaggactggcccactctccccatttaccagacgactggggcctccacactaaggaggggcagggctggcagtgacgagggaaacctctcgctgagggttggggcaaagtcacccctggaaatcgaaggggccgctggtggtctcttgaggtccaccagcctcaaatgcatctcttcagacggtgttgggggcacaaccctactccccgaaaagtcgaaaacccaattcagttcctgcgagtccctcttagaatccagaccgagcatggggagaaaactgagctctccgaccacacccagggacatgctgttgtcgcccacactgcgtcctcggaggcggtgtctggagtcctctgtggacgatgcgggctgtccagaccttggaaaggagccgcttgttttccagaaccgccagtttgcccacctgatggaggaacctctaggcagtgacccattcagctggaaactcccaagcctcgactacgaacgcaagaccaaagtggacttcgatgacttcctcccagctatccggaagccccagacacctacctccttggctggatcagccaaaggtgggcaagacggttcacagcgttcaagcatccactttgaaacggaagaggctaaccgttcctttctctcggggatcaagaccattttgaagaagagcccggagcccaaggaggatcccgctcacctgtctgactcgtcctcatcctccggctccatcgtgtccttcaaaagtgctgacagcatcaaaagtcgaccaggaatcccacgacttgcgggtgacggtggcgagcgaacgtcccccgagcggagagagccagggacggggaggaaagacgacgatgttgcgagcataatgaagaaatacctccagaagtaggaaccagttcaggtaaaagcaacaggctggggctattcttgggggaatgagagttcaccttgcagccttggggagagcaggtgccactactgtccttaatgccacaaccgatttctctagagaccaagatttttagaggttttagctgaagtcatgtgttgatggatgcaaagcttttcagaacccctctgctgggtacctctacttccttgtactttgaaatgcagacacatcagaaagtaagaggttcctgtgggataccgctaaagaaggtgccagatgtagccgggcgcggtggctcacgcctgtaatcccagcactttgggaggccaaggcgggtggatcacctaaggtcaggagtttgagaccagactggccaacagggtgaaacctcgtctctactaaaaatacaaaaaattagccaggtgtcttgacgggcgcctgtaatcccagctactcaggaggctgaggcaggacaatcgcttgaaccagggaggcagaggttgcagtgagctgagggtgccaccactgcactccagcctgggaaacaagagcaaaactctgtctcag

SEQ ID NO: 421131 - DNA, 8568 bp, Homo sapiens
  misc_feature (2234)..(2234): n is a, c, g, or t
aaggggaagggatgtgtgtcggtgtgtgtggagagggtgctccttcgctcctgctttcccggctcggtggggtcccttcgcggccacccggggagacgtcttagacagtcgtggttcctgtgatctgtgtcctctttgcagaagttctgtgtccatctcatgtgctgcgtgtgtctgtaaagcctcattccgtgctgtctggcaggaagctccatctcatctcatcatctcacggccctggcactgcctcagcatggccatctcatcacgcctcgccctgtgggagcagaagattcgggaagaggacaagagccctccaccatcctcgccccctcctcttttctctgtcatcccagggggcttcattaagcaactggtccgggggactgaaaaagaggccaaggaagcgagacagaggaagcagttagctgtcgcctctccagaacgagagatcccagaaatttccatcagccaacccaacagcaagtccagcagtggcaccagatctggaagccagcagatctctcaggacgaccagtcaagctctcctgggagctcagacattctgggcaaggagagcgaggggtcccgcagccccgaccctgagcagatgacaagcatcaatggtgagaaggcccaggagctgggctccagtgcgacaccaaccaaaaagactgtccccttcaagaggggcgtgaggaggggtgatgtgttgttgatggtggccaagctggacccggactcagccaagccagagaagactcatccccatgacgcccccccttgcaagacctctccccccgccacagatactggaaaggaaaagaaaggggagacctctaggactccttgtggctcccaggccagcaccgagatcttggccccgaaagctgagaagacccggactgggggtcttggggacccaggccaaggaactgtggcactgaaaaaaggcgaggagggtcaaagcatagtggggaaggggcttgggacccccaagaccacagagctgaaagaggctgagccccagggcaaagacaggcaggggaccaggccccaagcccaagggcccggcgagggggtgcgaccagggaaagcagagaaggagggagcagagcccacaaacacggtggaaaaggggaatgtctctaaggacgtagggagtgaagggaagcacgtaaggccccaaatccctgggagaaagtggggaggtttcctgggaagaaggagtaagtgggacggtccccagaataagaaggacaaagaaggggtgctcttaagtaaggcagagaagacaggtgagcctcagacccagatggagaagacaagccaagtgcagggcgagttgggggacgatctgagaatgggggagaaagcaggtgagcttcggagcacgactgggaaggcaggtgagtcctgggataagaaggaaaagatggggcaaccccagggtaagtccgggaacgcaggtgaagctcggagtcagacagagaagggctgtgaagccccaaaggaggtgagcacaatggtggagtcgccagcagctcctgggaagggaggctggccaggaagccgtgggcaggaagcagaggagccctgctcaagagcaggtgatggggctggtgccctggagacagagctggaaggacccagccagcctgctctggagaaggatgcagaaaggcctcggatacggaaggagaaccaagacgggccagccccgcaggaggagggcaaaggaggccagagcagagactcagaccaggctcctgaggacagatggtatgaggcagagaaagtctggctggctcagaaggatggatttactcttgctacggtgctaaagccagatgagggaacagcagacctgccagcaggaagggtgagactttggattgatgctgacaaaaccatcactgaggtggatgaggagcatgtccatcgggccaaccctcctgagctggaccaggtcgaggacctggcctctctcatcagtgtcaacgaatccagtgtcctgaacacgcttctgcagcgctacaaagctcagctgctgcacacctgcacagggcctgatctgattgtcctccagccccgggggccctcggtgccttctgcagggaaggtgcccaagggccgccgggatggcctgcctgcccacattggctccatggcacagcgggcatactgggcgctgctgaaccagcggagagaccagagcattgtggccctgggcnggagtggcgctgggaagaccacctgctgtgagcaggtcctggaacacctggtggggatggcaggcagtgtggatggcagggtctcagtggagaagatccgagccaccttcactgtcctccgggccttcggctctgtgtccatggcccacagccgcagtgccacccggttctccatggtgatgtcgctggacttcaacgctacaggccgcatcacagctgctcagctccagacaatgcttttggagaagagccgcgtggcacggcagccggaaggggaaagtaacttcctggttttctcccagatgctggctggattggacttggatctcaggacggagctgaacctgcaccagatggcagatagcagctcctttggcatgggcgtgtggtccaagcctgaagataaacagaaggcggcagctgcctttgcccagctccagggtgccatggagatgctcggcatctcagagagcgagcagcgggctgtttggcgggtcctggcagccatctaccacctgggtgcggcgggggcctgcaaagtgggtcggaagcagttcatgaggtttgagtgggcaaactacgcagctgaggccctgggctgcgagtatgaggagctgaacacggccaccttcaagcaccaccttcgacagatcatccagcaaatgacgtttgggccaagccgatggggcctcgaggatgaggaaaccagctcagggctcaagatgacaggagtggactgtgtggaggggatggcctcgggcctgtaccaggaactctttgcggctgtggtctcactcatcaacagatccttttcctcccaccatctctccatggcctccatcatggtggtggactctccaggcttccagaacccccggcaccagggcaaggaccgggcggccacctttgaggagctgtgccacaactacgcccatgagcgcctgcagctgctgttctaccagcggacctttgtctccacgctacagcgatatcaagaggaaggtgttcctgtgcagtttgacctcccggacccctccccagggaccaccgtggctgttgtggatcaaaatccctctcaggtccgcttaccagctggaggaggtgcccaggatgccagaggccttttctgggtcttagatgaggaagtccatgtagagggctccagtgacagtgtggtgctcgagcgtctgtgtgctgctttcgagaagaaaggagctgggactgaagggtcctctgccctgcggacctgtgagcagcccctccagtgtgagattttccaccagttgggatgggaccctgtgcggtacgacctcacgggctggctccacagagccaagcccaacctctcggccctggatgcaccccaggtcctgcaccagtcaaaaagagaggagctgcggagtctattccaggcccgggccaagctgcctcctgtgtgccgggctgtggcaggcctggagggcacctcccagcaggccctgcagaggagccgcatggtgaggaggacctttgccagcagccttgccgcggtgaggaggaaagccccgtgctcccagatcaagctgcagatggatgcgctgaccagcatgatcaaaaggtcccggctgcactttatccactgcctggtaccaaaccctgtggtggaaagcaggagtgggcaggaatctccaccaccaccgcagcctggtagagacaagcctggggcaggtggacctctggccctggatatcccagcactgagggtccagcttgctgggttccacatcctggaggctctgcgtctgcataggacaggctatgctgaccacatggggctcactcgcttccgccggcaattccaggtgctggacgctccactcctgaagaagctcatgtcgacctccgagggaatagatgaaaggaaggccgtggaggagctcctggagaccctggatctggaaaagaaggcggtggctgtggggcacagccaagtttttctcaaggcaggtgtgatctccaggcttgagaagcagcgagagaagctggtatctcagagcatcgttctcttccaggcggcttgcaagggctttctgtctcgccaggaattcaagaagctgaagattcgccgactggctgcacagtgcatccagaagaatgtggctgtgttcctcgcagtcaaggactggccatggtggcagctgcttggttccctccagcctctacttagtgccaccattggaactgagcagctccgagccaaggaggaggagcttacaacgctaagacggaagctagaaaaatcagagaagttgcggaatgaactccggcagaacacagatctgctagaaagcaagattgctgacttgacctctgaccttgccgatgagcgcttcaaaggtgatgtggcctgccaggtgctggagagtgagcgggcagagcggctacaggccttccgggaggtccaggagctcaagagcaagcatgaacaagtccagaaaaaactgggagatgtgaataaacagttggaagaagcccagcagaaaattcagttgaatgacttggaaaggaatcccactggaggagcagacgagtggcagatgcgcttcgactgtgctcagatggagaacgagttcctcagaaagcgtctgcagcaatgcgaggagaggctggactcggagctgacagccaggaaagagctggagcaaaagcttggggagttgcaaagtgcttatgacggggccaagaagatggctcaccaactgaagaggaagtgccaccatcttacctgtgaccttgaggatacctgcgtcctgctagagaaccaacaaagtcgaaaccatgagctggagaagaagcagaagaagtttgacctgcagctggcccaggccctaggtgagtcagtgtttgagaagggtctccgtgagaaagtgacccaggagaacaccagtgtccggtgggagctaggccagcttcagcagcagctgaagcaaaaggagcaggaagcctcacagctgaagcagcaggtggagatgctacaggaccataaacgggagctgctggggtcaccctctctgggggaaaattgcgttgctggcttgaaggagaggctctggaagttggaatccagcgcccttgagcaacagaaaatccagagccagcaggaaaacaccatcaagcagctggagcagctccgccagcggtttgagctggagatcgagcggatgaagcagatgcaccagaaggaccgtgaggaccaggaggaggaactggaggatgtccgtcagtcctgccagaagcggcttcatcagctggaaatgcagctggagcaagagtatgaagagaagcagatggtcctccatgagaagcaagatttggaaggcttgatcggaaccctctgtgaccagattggccatcgggactttgatgtggagaagcgacttcggagagacctcaggaggacacatgcactgttgtcagacgtgcagctccttctgggcaccatggaggatggcaagacatcagtcagcaaggaggagctggagaaagtgcacagccagctggagcagagtgaagccaagtgtgaggaggccttgaagacgcagaaggtgctcacagcggacctggagagcatgcacagcgagctggagaacatgacgcggaacaagagcctggtggatgagcagctgtacaggctgcagtttgagaaggcggacctcctgaagcgcatcgatgaggaccaggatgacctgaatgagctgatgcagaagcacaaggacctcattgctcagtctgctgctgacattgggcagatccaagaactgcagctgcagctggaggaagccaagaaggagaagcacaagctacaagaacaactgcaggtggctcagatgcgcatcgagtacctggaacagtccaccgtggatcgagccatcgtcagcaggcaggaggcggtcatctgtgacctagagaacaagacagagttccagaaggtgcagattaagagatttgaggtcctggtgatccggcttcgggacagcctgatcaagatgggggaggagctttcacaggcggccacctccgagtcccagcagcgggagagcagccagtactaccagcggcgcctggaagagctgaaggccgacatggaagagctggtgcagcgggaggcagaggccagccggcggtgcatggagctggagaagtacgtggaggaacttgcagcagtgaggcaaaccctccagacagacctggagacatccattcggcggattgccgacctgcaggctgccttggaagaagtggcatccagtgacagtgatactgagagtgtccagacggcagtggattgtggcagcagcggccgaaaagagatggataacgtctccatcctcagctcccagccagagggcagcctgcagtcctggttgagctgtactctgtccctggccacagatactatgaggactccttctcgacagtcagccaccagcagccgcatcctcagccccaggataaacgaagaggctggggacactgagaggacccagtcggcattggcactgagcagagcccggtccaccaatgtccacagcaagacctcaggagacaagcctgtttctccccactttgtccgccggcaaaagtactgtcattttggggacggcgaagtgcttgccgtccagagaaagtccacagagagattagaacctgcttcctctcccctggcttctcggagtacaaatacatccccgctgtcgagggaaaagctgcccagtccttcagcggccctctcggagttcgtggaagggctccggaggaagagagcccagagaggccaggggtccacgctgggcctagaggactggcccactctccccatttaccagacgactggggcctccacactaaggaggggcagggctggcagtgacgagggaaacctctcgctgagggttggggcaaagtcacccctggaaatcgaaggggccgctggtggtctcttgaggtccaccagcctcaaatgcatctcttcagacggtgttgggggcacaaccctactccccgaaaagtcgaaaacccaattcagttcctgcgagtccctcttagaatccagaccgagcatggggagaaaactgagctctccgaccacacccagggacatgctgttgtcgcccacactgcgtcctcggaggcggtgtctggagtcctctgtggacgatgcgggctgtccagaccttggaaaggagccgcttgttttccagaaccgccagtttgcccacctgatggaggaacctctaggcagtgacccattcagctggaaactcccaagcctcgactacgaacgcaagaccaaagtggacttcgatgacttcctcccagctatccggaagccccagacacctacctccttggctggatcagccaaaggtgggcaagacggttcacagcgttcaagcatccactttgaaacggaagaggctaaccgttcctttctctcggggatcaagaccattttgaagaagagcccggagcccaaggaggatcccgctcacctgtctgactcgtcctcatcctccggctccatcgtgtccttcaaaagtgctgacagcatcaaaagtcgaccaggaatcccacgacttgcgggtgacggtggcgagcgaacgtcccccgagcggagagagccagggacggggaggaaagacgacgatgttgcgagcataatgaagaaatacctccagaagtaggaaccagttcagcctccttgaagctgcccttgaagacttcccgactctacaataacttggagacagagagactggccaggcctccccggtggccagagccagccagcatggccaccctcaagaggcgagatgagcccacagaggcatatcctgcggggatgctgggctcccagtgtggttggcctgaacaaaataaagtgttgactcctgggcatctgtgccttctctatggccttgctacctgggattccagagagttgatggggtgcagataggggtaggactgttagaatagaaccaacccaaactgtgtgtagtttggggtgtatacttctatttctcttcctacatgtctacatgccatgaccttcctcctcctcttcacttggccagtttcagctcacttcctccaggaagtctttcctgatatatcaaactgaaacaaatgctcctcctccatgctcccttaatccccatgcttgtcgattatattcctttgccaattcatttctctatcctgtgtatgtataagtgtgtacaagcattcaagaaactgatgaatgatgaatgaatgaatgagccaaagaacaaataaatgagcccacacaccc

SEQ ID NO: 421132 - DNA, 489 bp, Homo sapiens
  misc_feature (26)..(26): n is a, c, g, or t
  misc_feature (55)..(55): n is a, c, g, or t
ttatggttcgttggcattgcagagancttagctgcgggacgcaggggcacagggngggaggcccggacaaaggagagggacgaccccgggggcccgcgagcggcggcgagagcccggcggcgcgggagccaggacttgatggggtgcagataggggtaggactgttagaatagaaccaacccaaactgtgtgtagtttggggtgtatacttctatttctcttcctacatgtctacatgccatgaccttcctcctcctcttcacttggccagtttcagctcacttcctccaggaagtctttcctgatatatcaaactgaaacaaatgctcctcctccatgctcccttaatccccatgcttgtcgattatattcctttgccaattcatttctctatcctgtgtatgtataagtgtgtacaagcattcaagaaactgatgaatgatgaatgaatgaatgagccaaagaacaaataaatgagcccacacaccc

SEQ ID NO: 421133 - DNA, 425 bp, Homo sapiens
tcagagaggttaagtagcttgcctgaggtcacacagcctgtaagaggtgagcttggttttgaaaccagttctgctggaggcttggatcagtgtgctcctagattccatgccatctcagacattccacctctctcttctctccctagatccttttcctcccaccatctctccatggcctccatcatggtggtggactctccaggcttccagaacccccggcaccagggcaaggaccgggcggccacctttgaggagctgtgccacaactacgcccatgagcgcctgcagctgctgttctaccagcggacctttgtctccacgctacagcgatatcaagaggaaggtgttcctgtgcagtttgacctctccagaccccacccccagatgcatttattagaaataataaagttctttcttagctaaaa

SEQ ID NO: 421134 - DNA, 3846 bp, Homo sapiens
ctctcagaagtctgagactttgaatgatagtctagtattaaggaacactggatagtcttataataagcgagactttcttgccaccaaaggccaaaccccatgcccacttctgccatatcaagatctctggaacaatgggacttcctgtttgggccaaggggaagtgactgaaagtcacaccttactgaggcttggcaaagccttctctatcggtttcctcacctgtgatactgccaggaggctgagacaactgaacagagtgacataacatccaggaggggcttctcacccagtggtcatcacagaagggcaggagggcccctaacaaggcattaattccctggatgactttcagtttgacctgcagctggcccaggccctaggtgagtcagtgtttgagaagggtctccgtgagaaagtgacccaggagaacaccagtgtccggtgggagctaggccagcttcagcagcagctgaagcaaaaggagcaggaagcctcacagctgaagcagcaggtggagatgctacaggaccataaacgggagctgctggggtcaccctctctgggggaaaattgcgttgctggcttgaaggagaggctctggaagttggaatccagcgcccttgagcaacagaaaatccagagccagcaggaaaacaccatcaagcagctggagcagctccgccagcggtttgagctggagatcgagcggatgaagcagatgcaccagaaggaccgtgaggaccaggaggaggaactggaggatgtccgtcagtcctgccagaagcggcttcatcagctggaaatgcagctggagcaagagtatgaagagaagcagatggtcctccatgagaagcaagatttggaaggcttgatcggaaccctctgtgaccagattggccatcgggactttgatgtggagaagcgacttcggagagacctcaggaggacacatgcactgttgtcagacgtgcagctccttctgggcaccatggaggatggcaagacatcagtcagcaaggaggagctggagaaagtgcacagccagctggagcagagtgaagccaagtgtgaggaggccttgaagacgcagaaggtgctcacagcggacctggagagcatgcacagcgagctggagaacatgacgcggaacaagagcctggtggatgagcagctgtacaggctgcagtttgagaaggcggacctcctgaagcgcatcgatgaggaccaggatgacctgaatgagctgatgcagaagcacaaggacctcattgctcagtctgctgctgacattgggcagatccaagaactgcagctgcagctggaggaagccaagaaggagaagcacaagctacaagaacaactgcaggtggctcagatgcgcatcgagtacctggaacagtccaccgtggatcgagccatcgtcagcaggcaggaggcggtcatctgtgacctagagaacaagacagagttccagaaggtgcagattaagagatttgaggtcctggtgatccggcttcgggacagcctgatcaagatgggggaggagctttcacaggcggccacctccgagtcccagcagcgggagagcagccagtactaccagcggcgcctggaagagctgaaggccgacatggaagagctggtgcagcgggaggcagaggccagccggcggtgcatggagctggagaagtacgtggaggaacttgcagcagtgaggcaaaccctccagacagacctggagacatccattcggcggattgccgacctgcaggctgccttggaagaagtggcatccagtgacagtgatactgagagtgtccagacggcagtggattgtggcagcagcggccgaaaagagatggataacgtctccatcctcagctcccagccagagggcagcctgcagtcctggttgagctgtactctgtccctggccacagatactatgaggactccttctcgacagtcagccaccagcagccgcatcctcagccccaggataaacgaagaggctggggacactgagaggacccagtcggcattggcactgagcagagcccggtccaccaatgtccacagcaagacctcaggagacaagcctgtttctccccactttgtccgccggcaaaagtactgtcattttggggacggcgaagtgcttgccgtccagagaaagtccacagagagattagaacctgcttcctctcccctggcttctcggagtacaaatacatccccgctgtcgagggaaaagctgcccagtccttcagcggccctctcggagttcgtggaagggctccggaggaagagagcccagagaggccaggggtccacgctgggcctagaggactggcccactctccccatttaccagacgactggggcctccacactaaggaggggcagggctggcagtgacgagggaaacctctcgctgagggttggggcaaagtcacccctggaaatcgaaggggccgctggtggtctcttgaggtccaccagcctcaaatgcatctcttcagacggtgttgggggcacaaccctactccccgaaaagtcgaaaacccaattcagttcctgcgagtccctcttagaatccagaccgagcatggggagaaaactgagctctccgaccacacccagggacatgctgttgtcgcccacactgcgtcctcggaggcggtgtctggagtcctctgtggacgatgcgggctgtccagaccttggaaaggagccgcttgttttccagaaccgccagtttgcccacctgatggaggaacctctaggcagtgacccattcagctggaaactcccaagcctcgactacgaacgcaagaccaaagtggacttcgatgacttcctcccagctatccggaagccccagacacctacctccttggctggatcagccaaaggtgggcaagacggttcacagcgttcaagcatccactttgaaacggaagaggctaaccgttcctttctctcggggatcaagaccattttgaagaagagcccggagcccaaggaggatcccgctcacctgtctgactcgtcctcatcctccggctccatcgtgtccttcaaaagtgctgacagcatcaaaagtcgaccaggaatcccacgacttgcgggtgacggtggcgagcgaacgtcccccgagcggagagagccagggacggggaggaaagacgacgatgttgcgagcataatgaagaaatacctccagaagtaggaaccagttcagcctccttgaagctgcccttgaagacttcccgactctacaataacttggagacagagagactggccaggcctccccggtggccagagccagccagcatggccaccctcaagaggcgagatgagcccacagaggcatatcctgcggggatgctgggctcccagtgtggttggcctgaacaaaataaagtgttgactcctgggcatctgtgccttctctatggccttgctacctgggattccagagagttgatggggtgcagataggggtaggactgttagaatagaaccaacccaaactgtgtgtagtttggggtgtatacttctatttctcttcctacatgtctacatgccatgaccttcctcctcctcttcacttggccagtttcagctcacttcctccaggaagtctttcctgatatatcaaactgaaacaaatgctcctcctccatgctcccttaatccccatgcttgtcgattatattcctttgccaattcatttctctatcctgtgtatgtataagtgtgtacaagcattcaagaaactgatgaatgatgaatgaatgaatgagccaaagaacaaataaatgagcccacacaccc

SEQ ID NO: 421135 - DNA, 222 bp, Homo sapiens
atgccgaaggtggctagcccatggtcctggattctgcatggctcagggctgtgcagagggtggccaatccgagccttggaagcacttcatgggtaagatgaccagcccatgtcttctgtccagctctagtttagaccttgagccctttcttctagagcaagcatgaacaagtccagaaaaaactgggagatgtgaataaacagttggaagaagcccagcaga

SEQ ID NO: 421136 - DNA, 367 bp, Homo sapiens
caggcccgggccaagctgcctcctgtgtgccgggctgtggcaggcctggagggcacctcccagcaggccctgcagaggagccgcatggtgaggaggacctttgccagcagccttgccgcggtgaggaggaaagccccgtgctcccagatcaagctgcagatggtgagtgggcaccctgtctcatggtgtcctggccttcactgcctccatcctcatctcctctgggctgagtcatgtgcctacatcatctctaacctccccagcaaggccagaggggcgagtgtcaccccacgctccacagaggaggaaatgggggctcccagcagcaatgaaacttggccctggtcacacccccaggaagtgactg

SEQ ID NO: 421137 - DNA, 979 bp, Homo sapiens
  misc_feature (689)..(689): n is a, c, g, or t
  misc_feature (691)..(691): n is a, c, g, or t
  misc_feature (814)..(814): n is a, c, g, or t
  misc_feature (818)..(818): n is a, c, g, or t
  misc_feature (823)..(824): n is a, c, g, or t
  misc_feature (826)..(826): n is a, c, g, or t
  misc_feature (832)..(832): n is a, c, g, or t
  misc_feature (849)..(849): n is a, c, g, or t
  misc_feature (861)..(861): n is a, c, g, or t
  misc_feature (867)..(867): n is a, c, g, or t
  misc_feature (869)..(869): n is a, c, g, or t
  misc_feature (872)..(873): n is a, c, g, or t
  misc_feature (876)..(876): n is a, c, g, or t
  misc_feature (887)..(887): n is a, c, g, or t
  misc_feature (904)..(904): n is a, c, g, or t
  misc_feature (915)..(916): n is a, c, g, or t
  misc_feature (918)..(918): n is a, c, g, or t
  misc_feature (923)..(923): n is a, c, g, or t
  misc_feature (948)..(949): n is a, c, g, or t
  misc_feature (957)..(957): n is a, c, g, or t
  misc_feature (959)..(959): n is a, c, g, or t
  misc_feature (963)..(963): n is a, c, g, or t
  misc_feature (967)..(967): n is a, c, g, or t
  misc_feature (971)..(972): n is a, c, g, or t
  misc_feature (974)..(975): n is a, c, g, or t
  misc_feature (979)..(979): n is a, c, g, or t
tttaacagagggcagaaattttattaaaccagcaaaaattcttatcatacagctaatatagaaggataacaataaaataaaatatatagaattttaggtggtcgtaagtgctatagaaaaaacgaagcaggaaagatagagaaggcatgctcagtgcagaatggggctaggatgtagggttttaaatttcagtagggtgtcaggtgaaggcatccgcctgcagcccaagaggcctcatagaatgctttgtcgtgcagtgatgatgaaggaatccaaactgacgaacatccagcagcgccacatcatggacatcatgaaaagtaaggggcagtccacagaggcttcctggacagagggatctggggccacacttttaatgcttctccatgttaagggagagaggacctcatataaaaaaaacaaagacagccgggcacgtggctcatgcctgtaattccaacactgggaggctgaggtgggaggatggcttaagcccaggagttcaagaccagcccgggcaacgccacaagccacaagacctcatctccacaaaaccttttttttttttgagacagagtctcactctgtcgcccaggctggagtgcagtggcgcaatctcggctcactgcaacttctgcctcccgggttcatgccattctcctgcctcagcctcccaagtagctgagacnanaggtgcccaccaccacgcctggctaattttttgtatttttagtagagacggcgtttcatcgtgttagccaggatggtctcgatctcctgacctcatgatccgcccacctcggcctcccaaagngggnggatnncntgaggncaggagttcgagaccancctgggcaacanagcgananccnntcnctacaaaaatncaaaaattagccaggcntggtggtgcanncntgtantcccagctactcaggaggctgaggnnggagaatngnttgngccnggannanngctn

SEQ ID NO: 421138 - DNA, 1534 bp, Homo sapiens
aatcacttccgggaggcaggacagagcggggaaagtgcgcatgcgctgactggtgtgtgcgcgtttctatagtagcgagaggcgctagctgccagctccagcagcccagatcgcgcagtatttctgcgtggcaccggtgcggatgcggctgtaaagcagtggtcaccgcctccgggagcccacttctatgtggagaggggagcacccagagagggtcttaggagtcctcccatggcttcacagaagcagatggaggtagtgaccaaaggaactgggttccggcgccgccccaagaccatcacttacaccccggggacctgcgagctgctcagagtgatgatgaaggaatccaaactgacgaacatccagcagcgccacatcatggacatcatgaaaagaggagatgctttgcccctacagtgcagcccaacatccagccagagagtcttaccttccaagcaaatagcctcgcccatctacctgcctcccatcctcgcagcccgtccccacctccggcctgccaacatgtgtcaagccaatggggcctacagccgggagcagttcaagcctcaagccaccagggatttggagaaggagaaacaaagactccaaaatatctttgccacggggaaggacatggaggaacggaaaagaaaggcccctcctgcacgacagaaggctccagcccctgagctagaccgatttgaagagctggtgaaggaaatccaggagaggaaagaattcctggctgacatggaggccctgggacagggcaaacagtaccgaggaatcatccttgctgaaatctcccagaaactccgggaaatggaagacattgaccacagaaggagtgaggaacttaggaagggtcttgccaccacttaatctgtctccagagacgggcagggtagcccaagctcgaccactggagtccactcctctgccaggcagggccatcctcaggccagcccatcctaccagccttctgccacgtcaggtggtggcatagcactgccctgcagtaccccaaggcatactcagcagcctagcccctgccccggaatgcagatggagcctctgagactcacagccccgtccgcagagaagcaaagcccgagcatccctactaggacatgtgtctaaaggtatccactgggcctgcttcccaccacttctgacctgtggcctgttcatttagttttctgaattcaggaatgaatatgattcctttcttcctgttttaggatttacttatttgatttcttaccgccttaggcaagtattcaaccacaatgattaactggccaataaaacatatttaacgtgggtcattacaagcaccattttgttttcagagggataagcttatttgttcaaggcattagactttgtcaagcccagatggtttctagctacctgtttgcatatttcaagtggcaacgggaaccaacctcttgggcaccccatggctggctgctgtggcgggtgctgaattccactctgttaatgatctcaataaacctctgcaacggtt

SEQ ID NO: 421139 - DNA, 1823 bp, Homo sapiens
aatcacttccgggaggcaggacagagcggggaaagtgcgcatgcgctgactggtgtgtgcgcgtttctatagtagcgagaggcgctagctgccagctccagcagcccagatcgcgcagtatttctgcgtggcaccggtgcggatgcggctgtaaagcagtggtcaccgcctccgggagcccacttctatgtggagaggggagcacccagagagggtcttagggtgaaatttcaattttggcatatcactcagtgggtactgttgtgaccatggctgtgttaacactccctcccgaggagacttccctgccacaggcgctgggtcagaatgaggactgtgtgtgtgtatctgtgtgtctggatgggaggtttgggcactgtcgcaatattaactggcggcatcattctctggctcgatccccgcttccagacttctgggggtgttgggcgtcggggaacagagattagggacaggagacagggggtgtgtcattgcgtctttccctcctcagagtcctcccatggcttcacagaagcagatggaggtagtgaccaaaggaactgggttccggcgccgccccaagaccatcacttacaccccggggacctgcgagctgctcagagtgatgatgaaggaatccaaactgacgaacatccagcagcgccacatcatggacatcatgaaaagaggagatgctttgcccctacagtgcagcccaacatccagccagagagtcttaccttccaagcaaatagcctcgcccatctacctgcctcccatcctcgcagcccgtccccacctccggcctgccaacatgtgtcaagccaatggggcctacagccgggagcagttcaagcctcaagccaccagggatttggagaaggagaaacaaagactccaaaatatctttgccacggggaaggacatggaggaacggaaaagaaaggcccctcctgcacgacagaaggctccagcccctgagctagaccgatttgaagagctggtgaaggaaatccaggagaggaaagaattcctggctgacatggaggccctgggacagggcaaacagtaccgaggaatcatccttgctgaaatctcccagaaactccgggaaatggaagacattgaccacagaaggagtgaggaacttaggaagggtcttgccaccacttaatctgtctccagagacgggcagggtagcccaagctcgaccactggagtccactcctctgccaggcagggccatcctcaggccagcccatcctaccagccttctgccacgtcaggtggtggcatagcactgccctgcagtaccccaaggcatactcagcagcctagcccctgccccggaatgcagatggagcctctgagactcacagccccgtccgcagagaagcaaagcccgagcatccctactaggacatgtgtctaaaggtatccactgggcctgcttcccaccacttctgacctgtggcctgttcatttagttttctgaattcaggaatgaatatgattcctttcttcctgttttaggatttacttatttgatttcttaccgccttaggcaagtattcaaccacaatgattaactggccaataaaacatatttaacgtgggtcattacaagcaccattttgttttcagagggataagcttatttgttcaaggcattagactttgtcaagcccagatggtttctagctacctgtttgcatatttcaagtggcaacgggaaccaacctcttgggcaccccatggctggctgctgtggcgggtgctgaattccactctgttaatgatctcaataaacctctgcaacggtt

SEQ ID NO: 421140 - DNA, 1327 bp, Homo sapiens
aatcacttccgggaggcaggacagagcggggaaagtgcgcatgcgctgactggtgtgtgcgcgtttctatagtagcgagaggcgctagctgccagctccagcagcccagatcgcgcagtatttctgcgtggcaccggtgcggatgcggctgtaaagcagtggtcaccgcctccgggagcccacttctatgtggagaggggagcacccagagagggtcttaggagtcctcccatggcttcacagaagcagatggaggtagtgaccaaaggaactgggttccggcgccgccccaagaccatcacttacaccccggggacctgcgagctgctcagagtgatgatgaaggaatccaaactgacgaacatccagcagcgccacatcatggacatcatgaaaagaggagatgctttgcccctacagtgcagcccaacatccagccagagagtcttaccttccaagcaaatagcctcgcccatctacctgcctcccatcctcgcagcccgtccccacctccggcctgccaacatgtgtcaagccaatggggcctacagccgggagcagttcaagcctcaagccaccagggatttggagaaggagaaacaaagactccaaaatatctttgccacggggaaggacatggaggaacggaaaagaaaggcccctcctgcacgacagaaggctccagcccctgagctagaccgatttgaagagctggtgaaggaaatccaggagaggaaagaattcctggctgacatggaggccctgggacagggcaaacagtaccgaggaatcatccttgctgaaatctcccagaaactccgggaaatggaagacattgaccacagaaggagtgaggaacttaggaagggtcttgccaccacttaatctgtctccagagacgggcagggtagcccaagctcgaccactggagtccactcctctgccaggcagggccatcctcaggccagcccatcctaccagccttctgccacgtcaggtggtggcatagcactgccctgcagtaccccaaggcatactcagcagcctagcccctgccccggaatgcagatggagcctctgagactcacagccccgtccgcagagaagcaaagcccgagcatccctactaggacatgtgtctaaaggtatccactgggcctgcttcccaccacttctgacctgtggcctgttcatttagttttctgaattcaggaatgaatatgattcctttcttcctgttttaggatttacttatttgatttcttaccgccttaggcaagtattcaaccacaatgattaactggccaataaaacatatttaacgtgg

SEQ ID NO: 421141 - DNA, 1704 bp, Homo sapiens
aatcacttccgggaggcaggacagagcggggaaagtgcgcatgcgctgactggtgtgtgcgcgtttctatagtagcgagaggcgctagctgccagctccagcagcccagatcgcgcagtatttctgcgtggcaccggtgcggatgcggctgtaaagcagtggtcaccgcctccgggagcccacttctatgtggagaggggagcacccagagagggtcttaggagtcctcccatggcttcacagaagcagatggaggtagtgaccaaaggaactgggttccggcgccgccccaagaccatcacttacaccccggggacctgcgagctgctcagagtgatgatgaaggaatccaaactgacgaacatccagcagcgccacatcatggacatcatgaaaagaggagatgctttgcccctacagtgcagcccaacatccagccagagagtcttaccttccaagcaaatagcctcgcccatctacctgcctcccatcctcgcagcccgtccccacctccggcctgccaacatgtgtcaagccaatggggcctacagccgggagcagttcaagcctcaagccaccagggatttggagaaggagaaacaaagactccaaaatatctttgccacggggaaggacatggaggaacggaaaagaaaggcccctcctgcacgacagaaggctccagcccctgagctagaccgatttgaagagctggtgaaggaaatccaggagaggaaagaattcctggctgacatggaggccctgggacagggcaaacagtaccgaggaatcatccttgctgaaatctcccaggtaggagaaacaaccaggaaagtggggaggggaagggcccagcgccaagtgcgaatggaaatacagggtctgctgtggcagggttcaggggtcaggctctagctcactgctgtgacagctcctcaggttcctagccctgatacacctgctttccctgatgccctttgcagaaactccgggaaatggaagacattgaccacagaaggagtgaggaacttaggaagggtcttgccaccacttaatctgtctccagagacgggcagggtagcccaagctcgaccactggagtccactcctctgccaggcagggccatcctcaggccagcccatcctaccagccttctgccacgtcaggtggtggcatagcactgccctgcagtaccccaaggcatactcagcagcctagcccctgccccggaatgcagatggagcctctgagactcacagccccgtccgcagagaagcaaagcccgagcatccctactaggacatgtgtctaaaggtatccactgggcctgcttcccaccacttctgacctgtggcctgttcatttagttttctgaattcaggaatgaatatgattcctttcttcctgttttaggatttacttatttgatttcttaccgccttaggcaagtattcaaccacaatgattaactggccaataaaacatatttaacgtgggtcattacaagcaccattttgttttcagagggataagcttatttgttcaaggcattagactttgtcaagcccagatggtttctagctacctgtttgcatatttcaagtggcaacgggaaccaacctcttgggcaccccatggctggctgctgtggcgggtgctgaattccactctgttaatgatctcaataaacctctgcaacggtt

SEQ ID NO: 421142 - DNA, 1641 bp, Homo sapiens
aatcacttccgggaggcaggacagagcggggaaagtgcgcatgcgctgactggtgtgtgcgcgtttctatagtagcgagaggcgctagctgccagctccagcagcccagatcgcgcagtatttctgcgtggcaccggtgcggatgcggctgtaaagcagtggtcaccgcctccgggagcccacttctatgtggagaggggagcacccagagagggtcttaggagtcctcccatggcttcacagaagcagatggaggtagtgaccaaaggaactgggttccggcgccgccccaagaccatcacttacaccccggggacctgcgagctgctcagaggaggagatgctttgcccctacagtgcagcccaacatccagccagagagtcttaccttccaagcaaatagcctcgcccatctacctgcctcccatcctcgcagcccgtccccacctccggcctgccaacatgtgtcaagccaatggggcctacagccgggagcagttcaagcctcaagccaccagggatttggagaaggagaaacaaagactccaaaatatctttgccacggggaaggacatggaggaacggaaaagaaaggcccctcctgcacgacagaaggctccagcccctgagctagaccgatttgaagagctggtgaaggaaatccaggagaggaaagaattcctggctgacatggaggccctgggacagggcaaacagtaccgaggaatcatccttgctgaaatctcccaggtaggagaaacaaccaggaaagtggggaggggaagggcccagcgccaagtgcgaatggaaatacagggtctgctgtggcagggttcaggggtcaggctctagctcactgctgtgacagctcctcaggttcctagccctgatacacctgctttccctgatgccctttgcagaaactccgggaaatggaagacattgaccacagaaggagtgaggaacttaggaagggtcttgccaccacttaatctgtctccagagacgggcagggtagcccaagctcgaccactggagtccactcctctgccaggcagggccatcctcaggccagcccatcctaccagccttctgccacgtcaggtggtggcatagcactgccctgcagtaccccaaggcatactcagcagcctagcccctgccccggaatgcagatggagcctctgagactcacagccccgtccgcagagaagcaaagcccgagcatccctactaggacatgtgtctaaaggtatccactgggcctgcttcccaccacttctgacctgtggcctgttcatttagttttctgaattcaggaatgaatatgattcctttcttcctgttttaggatttacttatttgatttcttaccgccttaggcaagtattcaaccacaatgattaactggccaataaaacatatttaacgtgggtcattacaagcaccattttgttttcagagggataagcttatttgttcaaggcattagactttgtcaagcccagatggtttctagctacctgtttgcatatttcaagtggcaacgggaaccaacctcttgggcaccccatggctggctgctgtggcgggtgctgaattccactctgttaatgatctcaataaacctctgcaacggtt

SEQ ID NO: 421143 - DNA, 1301 bp, Homo sapiens
aatcacttccgggaggcaggacagagcggggaaagtgcgcatgcgctgactgagtcctcccatggcttcacagaagcagatggaggtagtgaccaaaggaactgggttccggcgccgccccaagaccatcacttacaccccggggacctgcgagctgctcagaggaggagatgctttgcccctacagtgcagcccaacatccagccagagagtcttaccttccaagcaaatagcctcgcccatctacctgcctcccatcctcgcagcccgtccccacctccggcctgccaacatgtgtcaagccaatggggcctacagccgggagcagttcaagcctcaagccaccagggatttggagaaggagaaacaaagactccaaaatatctttgccacggggaaggacatggaggaacggaaaagaaaggcccctcctgcacgacagaaggctccagcccctgagctagaccgatttgaagagctggtgaaggaaatccaggagaggaaagaattcctggctgacatggaggccctgggacagggcaaacagtaccgaggaatcatccttgctgaaatctcccagaaactccgggaaatggaagacattgaccacagaaggagtgaggaacttaggaagggtcttgccaccacttaatctgtctccagagacgggcagggtagcccaagctcgaccactggagtccactcctctgccaggcagggccatcctcaggccagcccatcctaccagccttctgccacgtcaggtggtggcatagcactgccctgcagtaccccaaggcatactcagcagcctagcccctgccccggaatgcagatggagcctctgagactcacagccccgtccgcagagaagcaaagcccgagcatccctactaggacatgtgtctaaaggtatccactgggcctgcttcccaccacttctgacctgtggcctgttcatttagttttctgaattcaggaatgaatatgattcctttcttcctgttttaggatttacttatttgatttcttaccgccttaggcaagtattcaaccacaatgattaactggccaataaaacatatttaacgtgggtcattacaagcaccattttgttttcagagggataagcttatttgttcaaggcattagactttgtcaagcccagatggtttctagctacctgtttgcatatttcaagtggcaacgggaaccaacctcttgggcaccccatggctggctgctgtggcgggtgctgaattccactctgttaatgatctcaataaacctctgcaacggtt

SEQ ID NO: 421144 - DNA, 470 bp, Homo sapiens
catgggaacctgacagccctctcctctgtccagtggtgaaggaaatccaggagaggaaagaattcctggctgacatggaggccctgggacagggcaaacagtaccgaggaatcatccttgctgaaatctcccaggtaggagaaacaaccaggaaagtggggaggggaagggcccagcgccaagtgcgaatggaaatacagggtctgctgtggcagggttcaggggtcaggctctagctcactgctgtgacagctcctcaggttcctagccctgatacacctgctttccctgatgccctttgcagaaactccgggaaatggaagacattgaccacagaaggagtgaggaacttaggaagggtcttgccaccacttaatctgtctccagagacgggcagggtagcccaagctcgaccactggagtccactcctctgccaggcagggccatcctcaggccagcccatcctacc

SEQ ID NO: 421145 - DNA, 2034 bp, Homo sapiens
tccgccttcggaggctgacgcgcccgggcgccgttccaggcctgtgcagggcggatcggcagccgcctggcggcgatccagggcggtgcggggcctgggcgggagccgggaggcgcggccggcatggaggcgctgctgctgggcgcggggttgctgctgggcgcttacgtgcttgtctactacaacctggtgaaggccccgccgtgcggcggcatgggcaacctgcggggccgcacggccgtggtcacgggtgagtgcggaggcgggtgagtgcgagctggcggggcgcgcggagaggaggccgggccggcggtagcagcggcccgccgggctcagctcagctcggctcccgcccgcggtccgcaggcgccaacagcggcatcggaaagatgacggcgctggagctggcgcgccggggagcgcgcgtggtgctggcctgccgcagccaggagcgcggggaggcggctgccttcgacctccgccaggagagtgggaacaatgaggtcatcttcatggccttggacttggccagtctggcctcggtgcgggcctttgccactgcctttctgagctctgagccacggttggacatcctcatccacaatgccggtatcagttcctgtggccggacccgtgaggcgtttaacctgctgcttcgggtgaaccatatcggtccctttctgctgacacatctgctgctgccttgcctgaaggcatgtgcccctagccgcgtggtggtggtagcctcagctgcccactgtcggggacgtcttgacttcaaacgcctggaccgcccagtggtgggctggcggcaggagctgcgggcatatgctgacactaagctggctaatgtactgtttgcccgggagctcgccaaccagcttgaggccactggcgtcacctgctatgcagcccacccagggcctgtgaactcggagctgttcctgcgccatgttcctggatggctgcgcccacttttgcgcccattggcttggctggtgctccgggcaccaagagggggtgcccagacacccctgtattgtgctctacaagagggcatcgagcccctcagtgggagatattttgccaactgccatgtggaagaggtgcctccagctgcccgagacgaccgggcagcccatcggctatgggaggccagcaagaggctggcagggcttgggcctggggaggatgctgaacccgatgaagacccccagtctgaggactcagaggccccatcttctctaagcaccccccaccctgaggagcccacagtttctcaaccttaccccagccctcagagctcaccagatttgtctaagatgacgcaccgaattcaggctaaagttgagcctgagatccagctctcctaaccctcaggccaggatgcttgccatggcacttcatggtccttgaaaacctcggatgtgtgcgaggccatgccctggacactgacgggtttgtgatcttgacctccgtggttactttctggggccccaagctgtgccctggacatctcttttcctggttgaaggaataatgggtgattatttcttcctgagagtgacagtaaccccagatggagagataggggtatgctagacactgtgcttctcggaaatttggatgtagtattttcaggccccacccttattgattctgatcagctctggagcagaggcagggagtttgcaatgtgatgcactgccaacattgagaattagtgaactgatccctttgcaaccgtctagctaggtagttaaattacccccatgttaatgaagcggaattaggctcccgagctaagggactcgcctagggtctcacagtgagtaggaggagggcctgggatctgaacccaagggtctgaggccagggccgactgccgtaagatgggtgctgagaagtgagtcagggcagggcagctggtatcgaggtgccccatgggagtaaggggacgccttccgggcggatgcagggctggggtcatctgtatctgaagcccctcggaataaagcgcgttgaccgccgtcg

SEQ ID NO: 421146 - DNA, 1918 bp, Homo sapiens
tccgccttcggaggctgacgcgcccgggcgccgttccaggcctgtgcagggcggatcggcagccgcctggcggcgatccagggcggtgcggggcctgggcgggagccgggaggcgcggccggcatggaggcgctgctgctgggcgcggggttgctgctgggcgcttacgtgcttgtctactacaacctggtgaaggccccgccgtgcggcggcatgggcaacctgcggggccgcacggccgtggtcacgggcgccaacagcggcatcggaaagatgacggcgctggagctggcgcgccggggagcgcgcgtggtgctggcctgccgcagccaggagcgcggggaggcggctgccttcgacctccgccaggagagtgggaacaatgaggtcatcttcatggccttggacttggccagtctggcctcggtgcgggcctttgccactgcctttctgagctctgagccacggttggacatcctcatccacaatgccggtatcagttcctgtggccggacccgtgaggcgtttaacctgctgcttcgggtgaaccatatcggtccctttctgctgacacatctgctgctgccttgcctgaaggcatgtgcccctagccgcgtggtggtggtagcctcagctgcccactgtcggggacgtcttgacttcaaacgcctggaccgcccagtggtgggctggcggcaggagctgcgggcatatgctgacactaagctggctaatgtactgtttgcccgggagctcgccaaccagcttgaggccactggcgtcacctgctatgcagcccacccagggcctgtgaactcggagctgttcctgcgccatgttcctggatggctgcgcccacttttgcgcccattggcttggctggtgctccgggcaccaagagggggtgcccagacacccctgtattgtgctctacaagagggcatcgagcccctcagtgggagatattttgccaactgccatgtggaagaggtgcctccagctgcccgagacgaccgggcagcccatcggctatgggaggccagcaagaggctggcagggcttgggcctggggaggatgctgaacccgatgaagacccccagtctgaggactcagaggccccatcttctctaagcaccccccaccctgaggagcccacagtttctcaaccttaccccagccctcagagctcaccagatttgtctaagatgacgcaccgaattcaggctaaagttgagcctgagatccagctctcctaaccctcaggccaggatgcttgccatggcacttcatggtccttgaaaacctcggatgtgtgcgaggccatgccctggacactgacgggtttgtgatcttgacctccgtggttactttctggggccccaagctgtgccctggacatctcttttcctggttgaaggaataatgggtgattatttcttcctgagagtgacagtaaccccagatggagagataggggtatgctagacactgtgcttctcggaaatttggatgtagtattttcaggccccacccttattgattctgatcagctctggagcagaggcagggagtttgcaatgtgatgcactgccaacattgagaattagtgaactgatccctttgcaaccgtctagctaggtagttaaattacccccatgttaatgaagcggaattaggctcccgagctaagggactcgcctagggtctcacagtgagtaggaggagggcctgggatctgaacccaagggtctgaggccagggccgactgccgtaagatgggtgctgagaagtgagtcagggcagggcagctggtatcgaggtgccccatgggagtaaggggacgccttccgggcggatgcagggctggggtcatctgtatctgaagcccctcggaataaagcgcgttgaccgccgtcg

SEQ ID NO: 421147 - DNA, 1813 bp, Homo sapiens
ttggtactgccccgggttattttattgctgctgctgggcgcggggttgctgctgggcgcttacgtgcttgtctactacaacctggtgaaggccccgccgtgcggcggcatgggcaacctgcggggccgcacggccgtggtcacgggcgccaacagcggcatcggaaagatgacggcgctggagctggcgcgccggggagcgcgcgtggtgctggcctgccgcagccaggagcgcggggaggcggctgccttcgacctccgccaggagagtgggaacaatgaggtcatcttcatggccttggacttggccagtctggcctcggtgcgggcctttgccactgcctttctgagctctgagccacggttggacatcctcatccacaatgccggtatcagttcctgtggccggacccgtgaggcgtttaacctgctgcttcgggtgaaccatatcggtccctttctgctgacacatctgctgctgccttgcctgaaggcatgtgcccctagccgcgtggtggtggtagcctcagctgcccactgtcggggacgtcttgacttcaaacgcctggaccgcccagtggtgggctggcggcaggagctgcgggcatatgctgacactaagctggctaatgtactgtttgcccgggagctcgccaaccagcttgaggccactggcgtcacctgctatgcagcccacccagggcctgtgaactcggagctgttcctgcgccatgttcctggatggctgcgcccacttttgcgcccattggcttggctggtgctccgggcaccaagagggggtgcccagacacccctgtattgtgctctacaagagggcatcgagcccctcagtgggagatattttgccaactgccatgtggaagaggtgcctccagctgcccgagacgaccgggcagcccatcggctatgggaggccagcaagaggctggcagggcttgggcctggggaggatgctgaacccgatgaagacccccagtctgaggactcagaggccccatcttctctaagcaccccccaccctgaggagcccacagtttctcaaccttaccccagccctcagagctcaccagatttgtctaagatgacgcaccgaattcaggctaaagttgagcctgagatccagctctcctaaccctcaggccaggatgcttgccatggcacttcatggtccttgaaaacctcggatgtgtgcgaggccatgccctggacactgacgggtttgtgatcttgacctccgtggttactttctggggccccaagctgtgccctggacatctcttttcctggttgaaggaataatgggtgattatttcttcctgagagtgacagtaaccccagatggagagataggggtatgctagacactgtgcttctcggaaatttggatgtagtattttcaggccccacccttattgattctgatcagctctggagcagaggcagggagtttgcaatgtgatgcactgccaacattgagaattagtgaactgatccctttgcaaccgtctagctaggtagttaaattacccccatgttaatgaagcggaattaggctcccgagctaagggactcgcctagggtctcacagtgagtaggaggagggcctgggatctgaacccaagggtctgaggccagggccgactgccgtaagatgggtgctgagaagtgagtcagggcagggcagctggtatcgaggtgccccatgggagtaaggggacgccttccgggcggatgcagggctggggtcatctgtatctgaagcccctcggaataaagcgcgttgaccgccgtcg

SEQ ID NO: 421148 - DNA, 2059 bp, Homo sapiens
gtggagaccatgaacagccctcagtaggctccggactgtcagaatagcctttggaaggaactcctttgtggctgcgtggtgcctggagtgggggggcaagagcgggagagaggagaccagtgagaagttacagattttagggtaaatggtaatggggaaaggaggtgataataataatagcaagtacctacccagtgctgctagagtgtattttacacgttaactcctttcatcctcacaaaagctcagtgagattgggactgttgttattattattccctttacgcagtgagagaactgagacccagagagattaagtatcttgcccaaggtcacactttagtaaaaggcaaagtcaggatttgaatccacacacttatctagtacactctaagacacaggggcagattttagtaaacagtaggagatggactctcagaatttggtgcctggggagagggaagaggagagagatgcctggtgacaagcccagcccttgcctctccacaggagagtgggaacaatgaggtcatcttcatggccttggacttggccagtctggcctcggtgcgggcctttgccactgcctttctgagctctgagccacggttggacatcctcatccacaatgccggtatcagttcctgtggccggacccgtgaggcgtttaacctgctgcttcgggtgaaccatatcggtccctttctgctgacacatctgctgctgccttgcctgaaggcatgtgcccctagccgcgtggtggtggtagcctcagctgcccactgtcggggacgtcttgacttcaaacgcctggaccgcccagtggtgggctggcggcaggagctgcgggcatatgctgacactaagctggctaatgtactgtttgcccgggagctcgccaaccagcttgaggccactggcgtcacctgctatgcagcccacccagggcctgtgaactcggagctgttcctgcgccatgttcctggatggctgcgcccacttttgcgcccattggcttggctggtgctccgggcaccaagagggggtgcccagacacccctgtattgtgctctacaagagggcatcgagcccctcagtgggagatattttgccaactgccatgtggaagaggtgcctccagctgcccgagacgaccgggcagcccatcggctatgggaggccagcaagaggctggcagggcttgggcctggggaggatgctgaacccgatgaagacccccagtctgaggactcagaggccccatcttctctaagcaccccccaccctgaggagcccacagtttctcaaccttaccccagccctcagagctcaccagatttgtctaagatgacgcaccgaattcaggctaaagttgagcctgagatccagctctcctaaccctcaggccaggatgcttgccatggcacttcatggtccttgaaaacctcggatgtgtgcgaggccatgccctggacactgacgggtttgtgatcttgacctccgtggttactttctggggccccaagctgtgccctggacatctcttttcctggttgaaggaataatgggtgattatttcttcctgagagtgacagtaaccccagatggagagataggggtatgctagacactgtgcttctcggaaatttggatgtagtattttcaggccccacccttattgattctgatcagctctggagcagaggcagggagtttgcaatgtgatgcactgccaacattgagaattagtgaactgatccctttgcaaccgtctagctaggtagttaaattacccccatgttaatgaagcggaattaggctcccgagctaagggactcgcctagggtctcacagtgagtaggaggagggcctgggatctgaacccaagggtctgaggccagggccgactgccgtaagatgggtgctgagaagtgagtcagggcagggcagctggtatcgaggtgccccatgggagtaaggggacgccttccgggcggatgcagggctggggtcatctgtatctgaagcccctcggaataaagcgcgttgaccgccgtcg

SEQ ID NO: 421149 - DNA, 2553 bp, Homo sapiens
acgccgacgcagcgagggcgctatggctggcggcctcgcctcctggaaaggccatggtcgctgaggcgacgagcgagggcggggcagcgccgacggggacactcatcccgggagccagagccagcaccgagaggggacggtctacgcgggtgccggcggttccaggactgcgaaaccacgagccgagtttcggtcgcccatgggaaagcacccggcagggcgtggcttcggggcggggcgggcagagggcggagcaggatggagaggcgaggtgggcggagcagagggcgtggcttcggggcagagtgggccgggtaccgcgcttggtcttagcgcatgcgcactcccggcagctacgcgacctgtgaccatggtggctgtgctgggcggccggggcgtgttgcgcctgcggctgcttctctcagcgctgaagcccgggatccacgtcccacgggccggacccgcggccgcgttcggaaatcagcctgagcctgagtaccgctaaggctttaatcacgggtcccgagagccctaagtcttctctttgcttgctgatctcgtaccttaatgtgcaaaagaatcacgttgggaactgaaaattcagaatcctgggcctcactcccagaggatctgatctacatgtgtggagatgcccaggaatctgctttattctcttttgtcctcccacctgtccccccatttcggcacctcggtaacctctgccaaagtggctgtgaatggcgttcagctgcattaccagcagactggagagggagatcacgcagtcctgctacttcctgggatgttaggaagtggagagactgattttggacctcagctcaagaacctcaataagaagctcttcacggtggtcgcctgggatcctcgaggctatggacattccaggcccccagatcgcgatttcccagcagacttttttgaaagggatgcaaaagatgctgttgatttgatgaaggcgctgaagtttaagaaggtttctctgctggggtggagtgatgggggcataaccgcactcattgctgctgcaaaatatccatcttacatccacaagatggtgatctggggcgccaacgcctacgtcactgacgaagacagcatgatatatgagggcatccgagatgtttccaaatggagtgagagaacaagaaagcctctagaagccctctatgggtatgactactttgccagaacctgtgaaaagtgggtggatggcataagacagtttaaacatctcccagatggtaacatctgccggcacctgctgccccgggtccagtgccccgccttgattgtgcacggtgagaaggatcctctggtcccacggtttcatgccgacttcattcataagcacgtgaaaggctcacggctgcatttgatgccagaaggcaaacacaacctgcatttgcgttttgcagatgaattcaacaagttagcagaagacttcctacaatgagaatgcacactccagtcttggtggttccttcgtgtggggcttgatcgtgttgctgcctgttaacatgatgcctttgaaactctccgcctttgaaactttctacccctcccttcaatcttatcctaaccaaatgagaataatgacatattgaaaacagcctctagcttcaggctgggcacggtggctcacagctataatctcagcactttgggaggctgaggtgggagaattgcctgagcccaggagttcaagaccagcttgtgcaatatagggagactccggctctacaaaaaagagtttttcaaaattagccaggcgaagtggcacacatctgtggtcccaggtgctcaggaagctgaggtgggaggatcacttgagcccaattcaaagctgcagtgagctgtaattgcatcactgcactccaacctgggcaacagagtaagaccttgtcttaaaaaaaaataaaaacataaaaaaaaataaaaaaggaataaagcctctaacttcaatagctatgaaaattaaatccgattttctaagatgaagttgtgacaagttataccattgtcttaacaggtgaattcctgccataatttattttcaaataaattttaggtggagaatgtgtagtgttaatgttggagattttaagacatcttgaatttgtactgtaccttttatctgagaggttcaagcttcacttgtgtttttatttgtgtttatctatcatattcaaagagaagtagggagagtccgtgcccgaggtcctcaattctaagatcagaggatgtccagaacagcagcagataggggcaggtttgctttaccccatatccctctcctggttcacttttgagagatgaatactttgggccagtaaaggtgaacaaaatatgtattttcatcactctgtactaaaaggacaggaatgttattaattaaaacactaaagcagaaatcctacattgctattaaaattaaactttgattaccacaataaaaacagtagcaagttaaaccttgacactttatacttaagcatttagagaaagaataaaaattatttgaagtgagaacac

SEQ ID NO: 421150 - DNA, 1370 bp, Homo sapiens
gggctcgccgagtttcgcctcctctgaccgcgtagaatggttgcactaaagcagattcctcgtgctgtgtatccgtcaggtaacatctgccggcacctgctgccccgggtccagtgccccgccttgattgtgcacggtgagaaggatcctctggtcccacggtttcatgccgacttcattcataagcacgtgaaaggctcacggctgcatttgatgccagaaggcaaacacaacctgcatttgcgttttgcagatgaattcaacaagttagcagaagacttcctacaatgagaatgcacactccagtcttggtggttccttcgtgtggggcttgatcgtgttgctgcctgttaacatgatgcctttgaaactctccgcctttgaaactttctacccctcccttcaatcttatcctaaccaaatgagaataatgacatattgaaaacagcctctagcttcaggctgggcacggtggctcacagctataatctcagcactttgggaggctgaggtgggagaattgcctgagcccaggagttcaagaccagcttgtgcaatatagggagactccggctctacaaaaaagagtttttcaaaattagccaggcgaagtggcacacatctgtggtcccaggtgctcaggaagctgaggtgggaggatcacttgagcccaattcaaagctgcagtgagctgtaattgcatcactgcactccaacctgggcaacagagtaagaccttgtcttaaaaaaaaataaaaacataaaaaaaaataaaaaaggaataaagcctctaacttcaatagctatgaaaattaaatccgattttctaagatgaagttgtgacaagttataccattgtcttaacaggtgaattcctgccataatttattttcaaataaattttaggtggagaatgtgtagtgttaatgttggagattttaagacatcttgaatttgtactgtaccttttatctgagaggttcaagcttcacttgtgtttttatttgtgtttatctatcatattcaaagagaagtagggagagtccgtgcccgaggtcctcaattctaagatcagaggatgtccagaacagcagcagataggggcaggtttgctttaccccatatccctctcctggttcacttttgagagatgaatactttgggccagtaaaggtgaacaaaatatgtattttcatcactctgtactaaaaggacaggaatgttattaattaaaacactaaagcagaaatcctacattgctattaaaattaaactttgattaccacaataaaaacagtagcaagttaaaccttgacactttatacttaagcatttagagaaagaataaaaattatttgaagtgagaacac

SEQ ID NO: 421151 - DNA, 1543 bp, Homo sapiens
gcctcgtggggcctgtctcacttttccaggagacatgacccactaacgtggcaactttaacccaaaggcccctcagacatgttacagcaaatctggagccacagacaggttccctccattggcagcccattgtgtttgaaattccatgtcgggtttacttggaatgaaagatacttgaattattgtgcgcctgtgagcgcccagcttctgtttcatagtcttaacaggtggccattgtcgtgaaacgagtgatgcctgaagatctcagtgatgtttgaaccttctgtgtaactttttattaagtctttgtatctctcgacctcgtgccgaattcggcacgagccgacttcattcataagcacgtgaaaggctcacggctgcatttgatgccagaaggcaaacacaacctgcatttgcgttttgcagatgaattcaacaagttagcagaagacttcctacaatgagaatgcacactccagtcttggtggttccttcgtgtggggcttgatcgtgttgctgcctgttaacatgatgcctttgaaactctccgcctttgaaactttctacccctcccttcaatcttatcctaaccaaatgagaataatgacatattgaaaacagcctctagcttcaggctgggcacggtggctcacagctataatctcagcactttgggaggctgaggtgggagaattgcctgagcccaggagttcaagaccagcttgtgcaatatagggagactccggctctacaaaaaagagtttttcaaaattagccaggcgaagtggcacacatctgtggtcccaggtgctcaggaagctgaggtgggaggatcacttgagcccaattcaaagctgcagtgagctgtaattgcatcactgcactccaacctgggcaacagagtaagaccttgtcttaaaaaaaaataaaaacataaaaaaaaataaaaaaggaataaagcctctaacttcaatagctatgaaaattaaatccgattttctaagatgaagttgtgacaagttataccattgtcttaacaggtgaattcctgccataatttattttcaaataaattttaggtggagaatgtgtagtgttaatgttggagattttaagacatcttgaatttgtactgtaccttttatctgagaggttcaagcttcacttgtgtttttatttgtgtttatctatcatattcaaagagaagtagggagagtccgtgcccgaggtcctcaattctaagatcagaggatgtccagaacagcagcagataggggcaggtttgctttaccccatatccctctcctggttcacttttgagagatgaatactttgggccagtaaaggtgaacaaaatatgtattttcatcactctgtactaaaaggacaggaatgttattaattaaaacactaaagcagaaatcctacattgctattaaaattaaactttgattaccacaataaaaacagtagcaagttaaaccttgacactttatacttaagcatttagagaaagaataaaaattatttgaagtgagaacac

SEQ ID NO: 421152 - DNA, 2325 bp, Homo sapiens
acgccgacgcagcgagggcgctatggctggcggcctcgcctcctggaaaggccatggtcgctgaggcgacgagcgagggcggggcagcgccgacggggacactcatcccgggagccagagccagcaccgagaggggacggtctacgcgggtgccggcggttccaggactgcgaaaccacgagccgagtttcggtcgcccatgggaaagcacccggcagggcgtggcttcggggcggggcgggcagagggcggagcaggatggagaggcgaggtgggcggagcagagggcgtggcttcggggcagagtgggccgggtaccgcgcttggtcttagcgcatgcgcactcccggcagctacgcgacctgtgaccatggtggctgtgctgggcggccggggcgtgttgcgcctgcggctgcttctctcagcgctgaagcccgggatccacgtcccacgggccggacccgcggccgcgttcggcacctcggtaacctctgccaaagtggctgtgaatggcgttcagctgcattaccagcagactggagagggagatcacgcagtcctgctacttcctgggatgttaggaagtggagagactgattttggacctcagctcaagaacctcaataagaagctcttcacggtggtcgcctgggatcctcgaggctatggacattccaggcccccagatcgcgatttcccagcagacttttttgaaagggatgcaaaagatgctgttgatttgatgaaggcgctgaagtttaagaaggtttctctgctggggtggagtgatgggggcataaccgcactcattgctgctgcaaaatatccatcttacatccacaagatggtgatctggggcgccaacgcctacgtcactgacgaagacagcatgatatatgagggcatccgagatgtttccaaatggagtgagagaacaagaaagcctctagaagccctctatgggtatgactactttgccagaacctgtgaaaagtgggtggatggcataagacagtttaaacatctcccagatggtaacatctgccggcacctgctgccccgggtccagtgccccgccttgattgtgcacggtgagaaggatcctctggtcccacggtttcatgccgacttcattcataagcacgtgaaaggctcacggctgcatttgatgccagaaggcaaacacaacctgcatttgcgttttgcagatgaattcaacaagttagcagaagacttcctacaatgagaatgcacactccagtcttggtggttccttcgtgtggggcttgatcgtgttgctgcctgttaacatgatgcctttgaaactctccgcctttgaaactttctacccctcccttcaatcttatcctaaccaaatgagaataatgacatattgaaaacagcctctagcttcaggctgggcacggtggctcacagctataatctcagcactttgggaggctgaggtgggagaattgcctgagcccaggagttcaagaccagcttgtgcaatatagggagactccggctctacaaaaaagagtttttcaaaattagccaggcgaagtggcacacatctgtggtcccaggtgctcaggaagctgaggtgggaggatcacttgagcccaattcaaagctgcagtgagctgtaattgcatcactgcactccaacctgggcaacagagtaagaccttgtcttaaaaaaaaataaaaacataaaaaaaaataaaaaaggaataaagcctctaacttcaatagctatgaaaattaaatccgattttctaagatgaagttgtgacaagttataccattgtcttaacaggtgaattcctgccataatttattttcaaataaattttaggtggagaatgtgtagtgttaatgttggagattttaagacatcttgaatttgtactgtaccttttatctgagaggttcaagcttcacttgtgtttttatttgtgtttatctatcatattcaaagagaagtagggagagtccgtgcccgaggtcctcaattctaagatcagaggatgtccagaacagcagcagataggggcaggtttgctttaccccatatccctctcctggttcacttttgagagatgaatactttgggccagtaaaggtgaacaaaatatgtattttcatcactctgtactaaaaggacaggaatgttattaattaaaacactaaagcagaaatcctacattgctattaaaattaaactttgattaccacaataaaaacagtagcaagttaaaccttgacactttatacttaagcatttagagaaagaataaaaattatttgaagtgagaacac

SEQ ID NO: 421153 - DNA, 1909 bp, Homo sapiens
  misc_feature (10)..(10): n is a, c, g, or t
  misc_feature (22)..(22): n is a, c, g, or t
  misc_feature (35)..(35): n is a, c, g, or t
cacatcgacnactctaggatanacctggtggcggncgctctagacccgcggccgcgttcggcacctcggtaacctctgccaaagtggctgtgaatggcgttcagctgcattaccagcagactggagagggagatcacgcagtcctgctacttcctgggatgttaggaagtggagagactgattttggacctcagctcaagaacctcaataagaagctcttcacggtggtcgcctgggatcctcgaggctatggacattccaggcccccagatcgcgatttcccagcagacttttttgaaagggatgcaaaagatgctgttgatttgatgaaggcgctgaagtttaagaaggtttctctgctggggtggagtgatgggggcataaccgcactcattgctgctgcaaaatatccatcttacatccacaagatggtgatctggggcgccaacgcctacgtcactgacgaagacagcatgatatatgagggcatccgagatgtttccaaatggagtgagagaacaagaaagcctctagaagccctctatgggtatgactactttgccagaacctgtgaaaagtgggtggatggcataagacagtttaaacatctcccagatggtaacatctgccggcacctgctgccccgggtccagtgccccgccttgattgtgcacggtgagaaggatcctctggtcccacggtttcatgccgacttcattcataagcacgtgaaaggctcacggctgcatttgatgccagaaggcaaacacaacctgcatttgcgttttgcagatgaattcaacaagttagcagaagacttcctacaatgagaatgcacactccagtcttggtggttccttcgtgtggggcttgatcgtgttgctgcctgttaacatgatgcctttgaaactctccgcctttgaaactttctacccctcccttcaatcttatcctaaccaaatgagaataatgacatattgaaaacagcctctagcttcaggctgggcacggtggctcacagctataatctcagcactttgggaggctgaggtgggagaattgcctgagcccaggagttcaagaccagcttgtgcaatatagggagactccggctctacaaaaaagagtttttcaaaattagccaggcgaagtggcacacatctgtggtcccaggtgctcaggaagctgaggtgggaggatcacttgagcccaattcaaagctgcagtgagctgtaattgcatcactgcactccaacctgggcaacagagtaagaccttgtcttaaaaaaaaataaaaacataaaaaaaaataaaaaaggaataaagcctctaacttcaatagctatgaaaattaaatccgattttctaagatgaagttgtgacaagttataccattgtcttaacaggtgaattcctgccataatttattttcaaataaattttaggtggagaatgtgtagtgttaatgttggagattttaagacatcttgaatttgtactgtaccttttatctgagaggttcaagcttcacttgtgtttttatttgtgtttatctatcatattcaaagagaagtagggagagtccgtgcccgaggtcctcaattctaagatcagaggatgtccagaacagcagcagataggggcaggtttgctttaccccatatccctctcctggttcacttttgagagatgaatactttgggccagtaaaggtgaacaaaatatgtattttcatcactctgtactaaaaggacaggaatgttattaattaaaacactaaagcagaaatcctacattgctattaaaattaaactttgattaccacaataaaaacagtagcaagttaaaccttgacactttatacttaagcatttagagaaagaataaaaattatttgaagtgagaacac

SEQ ID NO: 421154 - DNA, 1753 bp, Homo sapiens
tgcggccgcgggtccggcccgtgggacgtggatcccgggcttcagcgctgagagaagcagccgcaggcgcaacacgccccggccgcccagcacagccaccatggtcacagccagatcgcgatttcccagcagacttttttgaaagggatgcaaaagatgctgttgatttgatgaaggcgctgaagtttaagaaggtttctctgctggggtggagtgatgggggcataaccgcactcattgctgctgcaaaatatccatcttacatccacaagatggtgatctggggcgccaacgcctacgtcactgacgaagacagcatgatatatgagggcatccgagatgtttccaaatggagtgagagaacaagaaagcctctagaagccctctatgggtatgactactttgccagaacctgtgaaaagtgggtggatggcataagacagtttaaacatctcccagatggtaacatctgccggcacctgctgccccgggtccagtgccccgccttgattgtgcacggtgagaaggatcctctggtcccacggtttcatgccgacttcattcataagcacgtgaaaggctcacggctgcatttgatgccagaaggcaaacacaacctgcatttgcgttttgcagatgaattcaacaagttagcagaagacttcctacaatgagaatgcacactccagtcttggtggttccttcgtgtggggcttgatcgtgttgctgcctgttaacatgatgcctttgaaactctccgcctttgaaactttctacccctcccttcaatcttatcctaaccaaatgagaataatgacatattgaaaacagcctctagcttcaggctgggcacggtggctcacagctataatctcagcactttgggaggctgaggtgggagaattgcctgagcccaggagttcaagaccagcttgtgcaatatagggagactccggctctacaaaaaagagtttttcaaaattagccaggcgaagtggcacacatctgtggtcccaggtgctcaggaagctgaggtgggaggatcacttgagcccaattcaaagctgcagtgagctgtaattgcatcactgcactccaacctgggcaacagagtaagaccttgtcttaaaaaaaaataaaaacataaaaaaaaataaaaaaggaataaagcctctaacttcaatagctatgaaaattaaatccgattttctaagatgaagttgtgacaagttataccattgtcttaacaggtgaattcctgccataatttattttcaaataaattttaggtggagaatgtgtagtgttaatgttggagattttaagacatcttgaatttgtactgtaccttttatctgagaggttcaagcttcacttgtgtttttatttgtgtttatctatcatattcaaagagaagtagggagagtccgtgcccgaggtcctcaattctaagatcagaggatgtccagaacagcagcagataggggcaggtttgctttaccccatatccctctcctggttcacttttgagagatgaatactttgggccagtaaaggtgaacaaaatatgtattttcatcactctgtactaaaaggacaggaatgttattaattaaaacactaaagcagaaatcctacattgctattaaaattaaactttgattaccacaataaaaacagtagcaagttaaaccttgacactttatacttaagcatttagagaaagaataaaaattatttgaagtgagaacac

SEQ ID NO: 421155 - DNA, 1704 bp, Homo sapiens
ttgatgctctggtcgttcttgagtatcccctgagcgtttctcgcatgcttcgtactttcctccagatcgcgatttcccagcagacttttttgaaagggatgcaaaagatgctgttgatttgatgaaggcgctgaagtttaagaaggtttctctgctggggtggagtgatgggggcataaccgcactcattgctgctgcaaaatatccatcttacatccacaagatggtgatctggggcgccaacgcctacgtcactgacgaagacagcatgatatatgagggcatccgagatgtttccaaatggagtgagagaacaagaaagcctctagaagccctctatgggtatgactactttgccagaacctgtgaaaagtgggtggatggcataagacagtttaaacatctcccagatggtaacatctgccggcacctgctgccccgggtccagtgccccgccttgattgtgcacggtgagaaggatcctctggtcccacggtttcatgccgacttcattcataagcacgtgaaaggctcacggctgcatttgatgccagaaggcaaacacaacctgcatttgcgttttgcagatgaattcaacaagttagcagaagacttcctacaatgagaatgcacactccagtcttggtggttccttcgtgtggggcttgatcgtgttgctgcctgttaacatgatgcctttgaaactctccgcctttgaaactttctacccctcccttcaatcttatcctaaccaaatgagaataatgacatattgaaaacagcctctagcttcaggctgggcacggtggctcacagctataatctcagcactttgggaggctgaggtgggagaattgcctgagcccaggagttcaagaccagcttgtgcaatatagggagactccggctctacaaaaaagagtttttcaaaattagccaggcgaagtggcacacatctgtggtcccaggtgctcaggaagctgaggtgggaggatcacttgagcccaattcaaagctgcagtgagctgtaattgcatcactgcactccaacctgggcaacagagtaagaccttgtcttaaaaaaaaataaaaacataaaaaaaaataaaaaaggaataaagcctctaacttcaatagctatgaaaattaaatccgattttctaagatgaagttgtgacaagttataccattgtcttaacaggtgaattcctgccataatttattttcaaataaattttaggtggagaatgtgtagtgttaatgttggagattttaagacatcttgaatttgtactgtaccttttatctgagaggttcaagcttcacttgtgtttttatttgtgtttatctatcatattcaaagagaagtagggagagtccgtgcccgaggtcctcaattctaagatcagaggatgtccagaacagcagcagataggggcaggtttgctttaccccatatccctctcctggttcacttttgagagatgaatactttgggccagtaaaggtgaacaaaatatgtattttcatcactctgtactaaaaggacaggaatgttattaattaaaacactaaagcagaaatcctacattgctattaaaattaaactttgattaccacaataaaaacagtagcaagttaaaccttgacactttatacttaagcatttagagaaagaataaaaattatttgaagtgagaacac

SEQ ID NO: 421156 - DNA, 2499 bp, Homo sapiens
acgccgacgcagcgagggcgctatggctggcggcctcgcctcctggaaaggccatggtcgctgaggcgacgagcgagggcggggcagcgccgacggggacactcatcccgggagccagagccagcaccgagaggggacggtctacgcgggtgccggcggttccaggactgcgaaaccacgagccgagtttcggtcgcccatgggaaagcacccggcagggcgtggcttcggggcggggcgggcagagggcggagcaggatggagaggcgaggtgggcggagcagagggcgtggcttcggggcagagtgggccgggtaccgcgcttggtcttagcgcatgcgcactcccggcagctacgcgacctgtgaccatggtggctgtgctgggcggccggggcgtgttgcgcctgcggctgcttctctcagcgctgaagcccgggatccacgtcccacgggccggacccgcggccgcgttcggaaatcagcctgagcctgagtaccgctaaggctttaatcacgggtcccgagagccctaagtcttctctttgcttgctgatctcgtaccttaatgtgcaaaagaatcacgttgggaactgaaaattcagaatcctgggcctcactcccagaggatctgatctacatgtgtggagatgcccaggaatctgctttattctcttttgtcctcccacctgtccccccatttcggcacctcggtaacctctgccaaagtggctgtgaatggcgttcagctgcattaccagcagactggagagggagatcacgcagtcctgctacttcctgggatgttaggaagtggagagactgattttggacctcagctcaagaacctcaataagaagctcttcacggtggtcgcctgggatcctcgaggctatggacattccaggcccccagatcgcgatttcccagcagacttttttgaaagggatgcaaaagatgctgttgatttgatgaaggcgctgaagtttaagaaggtttctctgctggggtggagtgatgggggcataaccgcactcattgctgctgtcactgacgaagacagcatgatatatgagggcatccgagatgtttccaaatggagtgagagaacaagaaagcctctagaagccctctatgggtatgactactttgccagaacctgtgaaaagtgggtggatggcataagacagtttaaacatctcccagatggtaacatctgccggcacctgctgccccgggtccagtgccccgccttgattgtgcacggtgagaaggatcctctggtcccacggtttcatgccgacttcattcataagcacgtgaaaggctcacggctgcatttgatgccagaaggcaaacacaacctgcatttgcgttttgcagatgaattcaacaagttagcagaagacttcctacaatgagaatgcacactccagtcttggtggttccttcgtgtggggcttgatcgtgttgctgcctgttaacatgatgcctttgaaactctccgcctttgaaactttctacccctcccttcaatcttatcctaaccaaatgagaataatgacatattgaaaacagcctctagcttcaggctgggcacggtggctcacagctataatctcagcactttgggaggctgaggtgggagaattgcctgagcccaggagttcaagaccagcttgtgcaatatagggagactccggctctacaaaaaagagtttttcaaaattagccaggcgaagtggcacacatctgtggtcccaggtgctcaggaagctgaggtgggaggatcacttgagcccaattcaaagctgcagtgagctgtaattgcatcactgcactccaacctgggcaacagagtaagaccttgtcttaaaaaaaaataaaaacataaaaaaaaataaaaaaggaataaagcctctaacttcaatagctatgaaaattaaatccgattttctaagatgaagttgtgacaagttataccattgtcttaacaggtgaattcctgccataatttattttcaaataaattttaggtggagaatgtgtagtgttaatgttggagattttaagacatcttgaatttgtactgtaccttttatctgagaggttcaagcttcacttgtgtttttatttgtgtttatctatcatattcaaagagaagtagggagagtccgtgcccgaggtcctcaattctaagatcagaggatgtccagaacagcagcagataggggcaggtttgctttaccccatatccctctcctggttcacttttgagagatgaatactttgggccagtaaaggtgaacaaaatatgtattttcatcactctgtactaaaaggacaggaatgttattaattaaaacactaaagcagaaatcctacattgctattaaaattaaactttgattaccacaataaaaacagtagcaagttaaaccttgacactttatacttaagcatttagagaaagaataaaaattatttgaagtgagaacac

SEQ ID NO: 421157 - DNA, 1896 bp, Homo sapiens
acacacgtatgctgtatttgtcatatttaagtacttggtctccattgattctagttccttgagctttttatccaaccagaagatgtagttccctcctaattcaaacccataccgtatgctcaggtttttgtgacaatttccactaaaagtaattaagagaaaacatgatgtcatcaaatggtggactctagggtttttcttttctgactaattgatactccagcctcacacctgtattgattctgataattagtgattcagtttcttttaacagagaggagcaataacccgtgccgtgcattttgtcgtatgatcataggcgctgaagtttaagaaggtttctctgctggggtggagtgatgggggcataaccgcactcattgctgctgcaaaatatccatcttacatccacaagatggtgatctggggcgccaacgcctacgtcactgacgaagacagcatgatatatgagggcatccgagatgtttccaaatggagtgagagaacaagaaagcctctagaagccctctatgggtatgactactttgccagaacctgtgaaaagtgggtggatggcataagacagtttaaacatctcccagatggtaacatctgccggcacctgctgccccgggtccagtgccccgccttgattgtgcacggtgagaaggatcctctggtcccacggtttcatgccgacttcattcataagcacgtgaaaggctcacggctgcatttgatgccagaaggcaaacacaacctgcatttgcgttttgcagatgaattcaacaagttagcagaagacttcctacaatgagaatgcacactccagtcttggtggttccttcgtgtggggcttgatcgtgttgctgcctgttaacatgatgcctttgaaactctccgcctttgaaactttctacccctcccttcaatcttatcctaaccaaatgagaataatgacatattgaaaacagcctctagcttcaggctgggcacggtggctcacagctataatctcagcactttgggaggctgaggtgggagaattgcctgagcccaggagttcaagaccagcttgtgcaatatagggagactccggctctacaaaaaagagtttttcaaaattagccaggcgaagtggcacacatctgtggtcccaggtgctcaggaagctgaggtgggaggatcacttgagcccaattcaaagctgcagtgagctgtaattgcatcactgcactccaacctgggcaacagagtaagaccttgtcttaaaaaaaaataaaaacataaaaaaaaataaaaaaggaataaagcctctaacttcaatagctatgaaaattaaatccgattttctaagatgaagttgtgacaagttataccattgtcttaacaggtgaattcctgccataatttattttcaaataaattttaggtggagaatgtgtagtgttaatgttggagattttaagacatcttgaatttgtactgtaccttttatctgagaggttcaagcttcacttgtgtttttatttgtgtttatctatcatattcaaagagaagtagggagagtccgtgcccgaggtcctcaattctaagatcagaggatgtccagaacagcagcagataggggcaggtttgctttaccccatatccctctcctggttcacttttgagagatgaatactttgggccagtaaaggtgaacaaaatatgtattttcatcactctgtactaaaaggacaggaatgttattaattaaaacactaaagcagaaatcctacattgctattaaaattaaactttgattaccacaataaaaacagtagcaagttaaaccttgacactttatacttaagcatttagagaaagaataaaaattatttgaagtgagaacac

SEQ ID NO: 421158 - DNA, 566 bp, Homo sapiens
gctttaccttctaggtcttaaaatcacacattggaaaatgacaatatcaacaaaactgtattcttatgaaaagaactatttgttacaatgagaaaggttttgtgagtaaaccctactggacagtgacataaaaggcaatggaattttctataaacattttctcatgtaaacatgctgccaccttttcttctttctcagagaactcaaatttgctatagtttgtcatttttgcttacaaataatataacttttcaaccttctagttatatttatccaataaagtcataatcgggattccatttgtgtaaaaactagggtggtaaccggaaaaaaatattgtcagtatttcaagctgtgttcctttcttagtttgatatggttacttctatgttgaaataaaatttaaaatcacatgcaaaaaaaaaatcagcaaaataataaaatgaacgaaaaaaaatgacacccagggagttcccaaccccagtgtaaatgatatttaccagtgatctagcatatgtaatcttttttaaaggtattgttaataaatattctgtcatttgtaaaga

SEQ ID NO: 421159 - DNA, 2685 bp, Homo sapiens
gctactcgggaggctgaggcaggataaactcttgaacccgggatgtggaggttgcaggttgcacgtgacatagccgagatcgcgccattgcactccagcctgggcaacaaaagcgaaactccatctcaaaaaaaaaaaaaaaaaacaaaaaaaacaaaaaaacccagaaaaacaaaaaaacaacaaacaaaaagggaggatggtagataactgtccagatactttccagctttgccgctatatgaactattccttttgtttagttttcagcatgggagcttctggcacttttacgtactttccagcttctggggaccggctgcctagaataacaggcatttgccccagaggccgtggagtggcctcactttggggtcgtgggcagatcgctggctcccacgcctggacttcgggatcgcaggcaggatcccttccagcccaagcactccgcccaggcgcgccaggcagagccccaccccatcccgccgttcccttcagccccggggcgcggatcttgcatctgaaactgagcagagcagggcgccgggcagggccggcgggccacgtgataagcccggaaacagctccgccccctcgcttcctgagccgccacatcccggcagccctcctacctgcgcacgtggtgccgccgctgctgcctcccgctcgccctgaacccagtgcctgcagccatggctcccggccagctcgccttatttagtgtctctgacaaaaccggccttgtggaatttgcaagaaacctgaccgctcttggtttgaatctggtcgcttccggagggactgcaaaagctctcagggatgctggtctggcagtcagagatgtctctgagttgacgggatttcctgaaatgttggggggacgtgtgaaaactttgcatcctgcagtccatgctggaatcctagctcgtaatattccagaagataatgctgacatggccagacttgatttcaatcttataagagttgttgcctgcaatctctatccctttgtaaagacagtggcttctccaggtgtaactgttgaggaggctgtggagcaaattgacattggtggagtaaccttactgagagctgcagccaaaaaccacgctcgagtgacagtggtgtgtgaaccagaggactatgtggtggtgtccacggagatgcagagctccgagagtaaggacacctccttggagactagacgccagttagccttgaaggcattcactcatacggcacaatatgatgaagcaatttcagattatttcaggaaacagtacagcaaaggcgtatctcagatgcccttgagatatggaatgaacccacatcagacccctgcccagctgtacacactgcagcccaagcttcccatcacagttctaaatggagcccctggatttataaacttgtgcgatgctttgaacgcctggcagctggtgaaggaactcaaggaggctttaggtattccagccgctgcctctttcaaacatgtcagcccagcaggtgctgctgttggaattccactcagtgaagatgaggccaaagtctgcatggtttatgatctctataaaaccctcacacccatctcagcggcatatgcaagagcaagaggggctgataggatgtcttcatttggtgattttgttgcattgtccgatgtttgtgatgtaccaactgcaaaaattatttccagagaagtatctgatggtataattgccccaggatatgaagaagaagccttgacaatactttccaaaaagaaaaatggaaactattgtgtccttcagatggaccaatcttacaaaccagatgaaaatgaagttcgaactctctttggtcttcatttaagccagaagagaaataatggtgtcgtcgacaagtcattatttagcaatgttgttaccaaaaataaagatttgccagagtctgccctccgagacctcatcgtagccaccattgctgtcaagtacactcagtctaactctgtgtgctacgccaagaacgggcaggttatcggcattggagcaggacagcagtctcgtatacactgcactcgccttgcaggagataaggcaaactattggtggcttagacaccatccacaagtgctttcgatgaagtttaaaacaggagtgaagagagcagaaatctccaatgccatcgatcaatatgtgactggaaccattggcgaggatgaagatttgataaagtggaaggcactgtttgaggaagtccctgagttactcactgaggcagagaagaaggaatgggttgagaaactgactgaagtttctatcagctctgatgccttcttccctttccgagataacgtagacagagctaaaaggagtggtgtggcgtacattgcggctccctccggttctgctgctgacaaagttgtgattgaggcctgcgacgaactgggaatcatcctcgctcatacgaaccttcggctcttccaccactgattttaccacacactgttttttggcttgcttatgtgtaggtgaacagtcacgcctgaaactttgaggataactttttaaaaaaataaaacagtatctcttaaaacaatgttttgatctacataaacattgtaaaaattttcaatcacgctttttaactttcttaccacaaaaaaatgataagtgggtgaagtgatggttatgttaattagcgtgc

SEQ ID NO: 421160 - DNA, 486 bp, Homo sapiens
aacaagtcctaagaaaaatgcccaggtgctttctggcatggtgatttgcaccacatagaactaaagacgatgtcagaccaagcttcttcctttctctctccccgcataggatgaagatttgataaagtggaaggcactgtttgaggaagtccctgagttactcactgaggcagagaagaaggaatgggttgagaaactgactgaagtttctatcagctctgatgccttcttccctttccgagataacgtagacagagctaaaaggagtggtgtggcgtacattgcggctccctccggttctgctgctgacaaagttgtgattgaggcctgcgacgaactgggaatcatcctcgctcatacgaaccttcggctcttccaccactgattttaccacacactgttttttggcttgcttatgtgtaggtgaacagtcacgcctgaaactttgaggataactttttaaaaaaataaaacagtatctcttaa

SEQ ID NO: 421161 - DNA, 531 bp, Homo sapiens
cactttttttccttaatgaaaatatttctaaaagcatcaaagagattctagatatgtgaacttccatgtaaataatggtcattatttacaattaagaaatcctggccgggcgcggtggctcatgcctataatcccagcactttgggaggccgaggatgaagatttgataaagtggaaggcactgtttgaggaagtccctgagttactcactgaggcagagaagaaggaatgggttgagaaactgactgaagtttctatcagctctgatgccttcttccctttccgagataacgtagacagagctaaaaggagtggtgtggcgtacattgcggctccctccggttctgctgctgacaaagttgtgattgaggcctgcgacgaactgggaatcatcctcgctcatacgaaccttcggctcttccaccactgattttaccacacactgttttttggcttgcttatgtgtaggtgaacagtcacgcctgaaactttgaggataactttttaaaaaaataaaacagtatctcttaa

SEQ ID NO: 421162 - DNA, 1432 bp, Homo sapiens
accgtgcgttgggctatcaagaagacgccttgaatattcctttccactataatgagagaaatgtatactatatgggtccttcagattgtcccatcgcacagaccagatgatcctcaagtatcgcagactcctgctttgcgtcttcatcttaaggccagaaccagtaaataataggtctctctggctctggacacacccctctgggcagatgttgttaccaaaaataaagatttgccagagtctgccctccgagacctcatcgtagccaccattgctgtcaagtacactcagtctaactctgtgtgctacgccaagaacgggcaggttatcggcattggagcaggacagcagtctcgtatacactgcactcgccttgcaggagataaggcaaactattggtggcttagacaccatccacaagtgctttcgatgaagtttaaaacaggagtgaagagagcagaaatctccaatgccatcgatcaatatgtgactggaaccattggcgaggagcaggaatcaacataagtgtcattgaagagtgaggctgcagaatgtaactgaagtccttaagatatcttttttttttcaactttgatacttggatttttctgtttgatattaccagtcaacccctgctactagtcctgaaagagtcctggaagtgaacaagaataaaagtatgtcaaagctaaaacatgacccaagatagaagcaccttgtaaaatatgattaactgtctgtgccactatgacacaatactgcaggctgggtaacttataaaccatagacatttatttttcatagttctggaggctgtgaagtcccagatcaaggtactggtgggctgagagtctggggaggcctaccctctgcttcccagatggcacagccctctctggaaaggacaaacactgtgtccttacttcacagaaggggcatacttcccctgaagcccttttataagtctgtaatccattcatgagggccccaccctcattgcccaataactttctaaaggccttatacttcttaatactgttgcattggggattaagtttcaacatgaattttggagtggatacacacactcaaaccatagcaaatattatgaattgtgttttgtctacaactgcctttacatttagaataatttttgtataaatgtagttaaagaactactcatctctttcctagattggatatagagggtttttttgaaaacccttggaacacaatttttatttgctttctttgctacagtagtaccaaagcagtagatttaaattagacggtagtctaatagacataaagtagtagatacgaagtagatttaaattagagattttaaaacagtgtatttttatgtaagtagcttagccaaaaataaaaaaaattacatatgtacttggaataaactgatttggaaagtaaa

SEQ ID NO: 421163 - DNA, 331 bp, Homo sapiens
tgatagaaacttcagtcagtttctatcagagctgatagaaacttcagtcagtttctatcagctctgatgccttcttccctttccgagataacgtagacagagctaaaaggagtggtgtggcgtacattgcggctccctccggttctgctgctgacaaagttgtgattgaggcctgcgacgaactgggaatcatcctcgctcatacgaaccttcggctcttccaccactgattttaccacacactgttttttggcttgcttatgtgtaggtgaacagtcacgcctgaaactttgaggataactttttaaaaaaataaaacagtatctcttaa

SEQ ID NO: 421164 - DNA, 378 bp, Homo sapiens
cactttttttccttaatgaaaatatttctaaaagcatcaaagagattctagatatgtgaacttccatgtaaataatggtcattatttacaattaagaaatcctggccgggcgcggtggctcatgcctataatcccagcactttgggaggccgaggtgagtggatcatgaggtcaagagattgagaccctcctggccaacatggtgaaactctgtctccaaaaatacaaaaattagctgggtgtggtggtgtgcacttgtggtcccaggtacttgggaggctgaggcaggagaattgcttgaacctgggaggtggaggttgcggtgagccgagatcgcaccactgcactccagcctggtgatagtgcaaaactccgtct

SEQ ID NO: 421165 - DNA, 2572 bp, Homo sapiens
gctactcgggaggctgaggcaggataaactcttgaacccgggatgtggaggttgcaggttgcacgtgacatagccgagatcgcgccattgcactccagcctgggcaacaaaagcgaaactccatctcaaaaaaaaaaaaaaaaaacaaaaaaaacaaaaaaacccagaaaaacaaaaaaacaacaaacaaaaagggaggatggtagataactgtccagatactttccagctttgccgctatatgaactattccttttgtttagttttcagcatgggagcttctggcacttttacgtactttccagcttctggggaccggctgcctagaataacaggcatttgccccagaggccgtggagtggcctcactttggggtcgtgggcagatcgctggctcccacgcctggacttcgggatcgcaggcaggatcccttccagcccaagcactccgcccaggcgcgccaggcagagccccaccccatcccgccgttcccttcagccccggggcgcggatcttgcatctgaaactgagcagagcagggcgccgggcagggccggcgggccacgtgataagcccggaaacagctccgccccctcgcttcctgagccgccacatcccggcagccctcctacctgcgcacgtggtgccgccgctgctgcctcccgctcgccctgaacccagtgcctgcagccatggctcccggccagctcgccttatttagtgtctctgacaaaaccggccttgtggaatttgcaagaaacctgaccgctcttggtttgaatctggtcgcttccggagggactgcaaaagctctcagggatgctggtctggcagtcagagatgtctctgagttgacgggatttcctgaaatgttggggggacgtgtgaaaactttgcatcctgcagtccatgctggaatcctagctcgtaatattccagaagataatgctgacatggccagacttgatttcaatcttataagagttgttgcctgcaatctctatccctttgtaaagacagtggcttctccaggtgtaactgttgaggaggctgtggagcaaattgacattggtggagtaaccttactgagagctgcagccaaaaaccacgctcgagtgacagtggtgtgtgaaccagaggactatgtggtggtgtccacggagatgcagagctccgagagtaaggacacctccttggagactagacgccagttagccttgaaggcattcactcatacggcacaatatgatgaagcaatttcagattatttcaggaaacagtacagcaaaggcgtatctcagatgcccttgagatatggaatgaacccacatcagacccctgcccagctgtacacactgcagcccaagcttcccatcacagttctaaatggagcccctggatttataaacttgtgcgatgctttgaacgcctggcagctggtgaaggaactcaaggaggctttaggtattccagccgctgcctctttcaaacatgtcagcccagcaggtgctgctgttggaattccactcagtgaagatgaggccaaagtctgcatggtttatgatctctataaaaccctcacacccatctcagcggcatatgcaagagcaagaggggctgataggatgtcttcatttggtgattttgttgcattgtccgatgtttgtgatgtaccaactgcaaaaattatttccagagaagtatctgatggtataattgccccaggatatgaagaagaagccttgacaatactttccaaaaagaaaaatggaaactattgtgtccttcagatggaccaatcttacaaaccagatgaaaatgaagttcgaactctctttggtcttcatttaagccagaagagaaataatggtgtcgtcgacaagtcattatttagcaatgttgttaccaaaaataaagatttgccagagtctgccctccgagacctcatcgtagccaccattgctgtcaagtacactcagtctaactctgtgtgctacgccaagaacgggcaggttatcggcattggagcaggacagcagtctcgtatacactgcactcgccttgcaggagataaggcaaactattggtggcttagacaccatccacaagtgctttcgatgaagtttaaaacaggagtgaagagagcagaaatctccaatgccatcgatcaatatgtgactggaaccattggcgaggatgaagatttgataaagtggaaggcactgtttgaggaagtccctgagttactcactgaggcagagaagaaggaatgggttgagaaactgactgaagtttctatcagctctgatgccttcttccctttccgagataacgtagacagagctaaaaggagtggtgtggcgtacattgcggctccctccggttctgctgctgacaaagttgtgattgaggcctgcgacgaactgggaatcatcctcgctcatacgaaccttcggctcttccaccactgattttaccacacactgttttttggcttgcttatgtgtaggtgaacagtcacgcctgaaactttgaggataactttttaaaaaaataaaacagtatctcttaa

SEQ ID NO: 421166 - DNA, 2018 bp, Homo sapiens
  misc_feature (5)..(5): n is a, c, g, or t
ggggngcaggggaggggagaaaaccataggtgctaaggtcgaaggctggtttaaattcggcagagggcaccctcctacctgcgcacgtggtgccgccgctgctgcctcccgctcgccctgaacccagtgcctgcagccatggctcccggccagctcgccttatttagtgtctctgacaaaaccggccttgtggaatttgcaagaaacctgaccgctcttggtttgaatctggtcgcttccggagggactgcaaaagctctcagggatgctggtctggcagtcagagatgtctctgagttgacgggatttcctgaaatgttggggggacgtgtgaaaactttgcatcctgcagtccatgctggaatcctagctcgtaatattccagaagataatgctgacatggccagacttgatttcaatcttataagagttgttgcctgcaatctctatccctttgtaaagacagtggcttctccaggtgtaactgttgaggaggctgtggagcaaattgacattggtggagtaaccttactgagagctgcagccaaaaaccacgctcgagtgacagtggtgtgtgaaccagaggactatgtggtggtgtccacggagatgcagagctccgagagtaaggacacctccttggagactagacgccagttagccttgaaggcattcactcatacggcacaatatgatgaagcaatttcagattatttcaggaaacagtacagcaaaggcgtatctcagatgcccttgagatatggaatgaacccacatcagacccctgcccagctgtacacactgcagcccaagcttcccatcacagttctaaatggagcccctggatttataaacttgtgcgatgctttgaacgcctggcagctggtgaaggaactcaaggaggctttaggtattccagccgctgcctctttcaaacatgtcagcccagcaggtgctgctgttggaattccactcagtgaagatgaggccaaagtctgcatggtttatgatctctataaaaccctcacacccatctcagcggcatatgcaagagcaagaggggctgataggatgtcttcatttggtgattttgttgcattgtccgatgtttgtgatgtaccaactgcaaaaattatttccagagaagtatctgatggtataattgccccaggatatgaagaagaagccttgacaatactttccaaaaagaaaaatggaaactattgtgtccttcagatggaccaatcttacaaaccagatgaaaatgaagttcgaactctctttggtcttcatttaagccagaagagaaataatggtgtcgtcgacaagtcattatttagcaatgttgttaccaaaaataaagatttgccagagtctgccctccgagacctcatcgtagccaccattgctgtcaagtacactcagtctaactctgtgtgctacgccaagaacgggcaggttatcggcattggagcaggacagcagtctcgtatacactgcactcgccttgcaggagataaggcaaactattggtggcttagacaccatccacaagtgctttcgatgaagtttaaaacaggagtgaagagagcagaaatctccaatgccatcgatcaatatgtgactggaaccattggcgaggatgaagatttgataaagtggaaggcactgtttgaggaagtccctgagttactcactgaggcagagaagaaggaatgggttgagaaactgactgaagtttctatcagctctgatgccttcttccctttccgagataacgtagacagagctaaaaggagtggtgtggcgtacattgcggctccctccggttctgctgctgacaaagttgtgattgaggcctgcgacgaactgggaatcatcctcgctcatacgaaccttcggctcttccaccactgattttaccacacactgttttttggcttgcttatgtgtaggtgaacagtcacgcctgaaactttgaggataactttttaaaaaaataaaacagtatctcttaa

SEQ ID NO: 421167 - DNA, 2678 bp, Homo sapiens
gctactcgggaggctgaggcaggataaactcttgaacccgggatgtggaggttgcaggttgcacgtgacatagccgagatcgcgccattgcactccagcctgggcaacaaaagcgaaactccatctcaaaaaaaaaaaaaaaaaacaaaaaaaacaaaaaaacccagaaaaacaaaaaaacaacaaacaaaaagggaggatggtagataactgtccagatactttccagctttgccgctatatgaactattccttttgtttagttttcagcatgggagcttctggcacttttacgtactttccagcttctggggaccggctgcctagaataacaggcatttgccccagaggccgtggagtggcctcactttggggtcgtgggcagatcgctggctcccacgcctggacttcgggatcgcaggcaggatcccttccagcccaagcactccgcccaggcgcgccaggcagagccccaccccatcccgccgttcccttcagccccggggcgcggatcttgcatctgaaactgagcagagcagggcgccgggcagggccggcgggccacgtgataagcccggaaacagctccgccccctcgcttcctgagccgccacatcccggcagccctcctacctgcgcacgtggtgccgccgctgctgcctcccgctcgccctgaacccagtgcctgcagccatggctcccggccagctcgccttatttagtgtctctgacaaaaccggccttgtggaatttgcaagaaacctgaccgctcttggtttgaatctggtcgcttccggagggactgcaaaagctctcagggatgctggtctggcagtcagagatgtctctgagttgacgggatttcctgaaatgttggggggacgtgtgaaaactttgcatcctgcagtccatgctggaatcctagctcgtaatattccagaagataatgctgacatggccagacttgatttcaatcttataagagttgttgcctgcaatctctatccctttgtaaagacagtggcttctccaggtgtaactgttgaggaggctgtggagcaaattgacattggtggagtaaccttactgagagctgcagccaaaaaccacgctcgagtgacagtggtgtgtgaaccagaggactatgtggtggtgtccacggagatgcagagctccgagagtaaggacacctccttggagactagacgccagttagccttgaaggcattcactcatacggcacaatatgatgaagcaatttcagattatttcaggaaacagtacagcaaaggcgtatctcagatgcccttgagatatggaatgaacccacatcagacccctgcccagctgtacacactgcagcccaagcttcccatcacagttctaaatggagcccctggatttataaacttgtgcgatgctttgaacgcctggcagctggtgaaggaactcaaggaggctttaggtattccagccgctgcctctttcaaacatgtcagcccagcaggtgctgctgttggaattccactcagtgaagatgaggccaaagtctgcatggtttatgatctctataaaaccctcacacccatctcagcggcatatgcaagagcaagaggggctgataggatgtcttcatttggtgattttgttgcattgtccgatgtttgtgatgtaccaactgcaaaaattatttccagagaagtatctgatggtataattgccccaggatatgaagaagaagccttgacaatactttccaaaaagaaaaatggaaactattgtgtccttcagatggaccaatcttacaaaccagatgaaaatgaagttcgaactctctttggtcttcatttaagccagaagagaaataatggtgtcgtcgacaagtcattatttagcaatgttgttaccaaaaataaagatttgccagagtctgccctccgagacctcatcgtagccaccattgctgtcaagtacactcagtctaactctgtgtgctacgccaagaacgggcaggttatcggcattggagcaggacagcagtctcgtatacactgcactcgccttgcaggagataaggcaaactattggtggcttagacaccatccacaagtgctttcgatgaagtttaaaacaggagtgaagagagcagaaatctccaatgccatcgatcaatatgtgactggaaccattggcgaggatgaagatttgataaagtggaaggcactgtttgaggaagtccctgagttactcactgaggcagagaagaaggaatgggttgagaaactgactgaagtttctatcagctctgatgccttcttccctttccgagataacgtagacagagctaaaaggagtggtgtggcgtacattgcggctccctccggttctgctgctgacaaagttgtgattgaggcctgcgacgaactgggaatcatcctcgctcatacgaaccttcggctcttccaccactgattttaccacacactgttttttggcttgcttatgtgtaggtgaacagtcacgcctgaaactttgaggataactttttaaaaaaataaaacagtatctcttaaaaaaaacatcaatgcaaaaactcccgggactatgatgtggggcggaacacaaaggtctagacgcccatggccaaactgttccggaaccaatcttgcccacggggaa

SEQ ID NO: 421168 - DNA, 2676 bp, Homo sapiens
gctactcgggaggctgaggcaggataaactcttgaacccgggatgtggaggttgcaggttgcacgtgacatagccgagatcgcgccattgcactccagcctgggcaacaaaagcgaaactccatctcaaaaaaaaaaaaaaaaaacaaaaaaaacaaaaaaacccagaaaaacaaaaaaacaacaaacaaaaagggaggatggtagataactgtccagatactttccagctttgccgctatatgaactattccttttgtttagttttcagcatgggagcttctggcacttttacgtactttccagcttctggggaccggctgcctagaataacaggcatttgccccagaggccgtggagtggcctcactttggggtcgtgggcagatcgctggctcccacgcctggacttcgggatcgcaggcaggatcccttccagcccaagcactccgcccaggcgcgccaggcagagccccaccccatcccgccgttcccttcagccccggggcgcggatcttgcatctgaaactgagcagagcagggcgccgggcagggccggcgggccacgtgataagcccggaaacagctccgccccctcgcttcctgagccgccacatcccggcagccctcctacctgcgcacgtggtgccgccgctgctgcctcccgctcgccctgaacccagtgcctgcagccatggctcccggccagctcgccttatttagtgtctctgacaaaaccggccttgtggaatttgcaagaaacctgaccgctcttggtttgaatctggtcgcttccggagggactgcaaaagctctcagggatgctggtctggcagtcagagatgtctctgagttgacgggatttcctgaaatgttggggggacgtgtgaaaactttgcatcctgcagtccatgctggaatcctagctcgtaatattccagaagataatgctgacatggccagacttgatttcaatcttataagagttgttgcctgcaatctctatccctttgtaaagacagtggcttctccaggtgtaactgttgaggaggctgtggagcaaattgacattggtggagtaaccttactgagagctgcagccaaaaaccacgctcgagtgacagtggtgtgtgaaccagaggactatgtggtggtgtccacggagatgcagagctccgagagtaaggacacctccttggagactagacgccagttagccttgaaggcattcactcatacggcacaatatgatgaagcaatttcagattatttcaggaaacagtacagcaaaggcgtatctcagatgcccttgagatatggaatgaacccacatcagacccctgcccagctgtacacactgcagcccaagcttcccatcacagttctaaatggagcccctggatttataaacttgtgcgatgctttgaacgcctggcagctggtgaaggaactcaaggaggctttaggtattccagccgctgcctctttcaaacatgtcagcccagcaggtgctgctgttggaattccactcagtgaagatgaggccaaagtctgcatggtttatgatctctataaaaccctcacacccatctcagcggcatatgcaagagcaagaggggctgataggatgtcttcatttggtgattttgttgcattgtccgatgtttgtgatgtaccaactgcaaaaattatttccagagaagtatctgatggtataattgccccaggatatgaagaagaagccttgacaatactttccaaaaagaaaaatggaaactattgtgtccttcagatggaccaatcttacaaaccagatgaaaatgaagttcgaactctctttggtcttcatttaagccagaagagaaataatggtgtcgtcgacaagtcattatttagcaatgttgttaccaaaaataaagatttgccagagtctgccctccgagacctcatcgtagccaccattgctgtcaagtacactcagtctaactctgtgtgctacgccaagaacgggcaggttatcggcattggagcaggacagcagtctcgtatacactgcactcgccttgcaggagataaggcaaactattggtggcttagacaccatccacaagtgctttcgatgaagtttaaaacaggagtgaagagagcagaaatctccaatgccatcgatcaatatgtgactggaaccattggcgaggatgaagatttgataaagtggaaggcactgtttgaggaagtccctgagttactcactgaggcagagaagaaggaatgggttgagaaactgactgaagtttctatcagctctgatgccttcttccctttccgagataacgtagacagagctaaaaggagtggtgtggcgtacattgcggctccctccggttctgctgctgacaaagttgtgattgaggcctgcgacgaactgggaatcatcctcgctcatacgaaccttcggctcttccaccactgattttaccacacactgtttgggtgctagtgttgtgaacggccgcctgaacttgggtacctttaaaataacggcttttaaaaaaaggggggccaaattcccgaggccagactaccctttaaaggccaaggataaaaaggggctaaaggaaaagtttggagatcgtggtgccccaacgaaaatttctgttgttaaaataacataaaag

SEQ ID NO: 421169 - DNA, 3799 bp, Homo sapiens
gctactcgggaggctgaggcaggataaactcttgaacccgggatgtggaggttgcaggttgcacgtgacatagccgagatcgcgccattgcactccagcctgggcaacaaaagcgaaactccatctcaaaaaaaaaaaaaaaaaacaaaaaaaacaaaaaaacccagaaaaacaaaaaaacaacaaacaaaaagggaggatggtagataactgtccagatactttccagctttgccgctatatgaactattccttttgtttagttttcagcatgggagcttctggcacttttacgtactttccagcttctggggaccggctgcctagaataacaggcatttgccccagaggccgtggagtggcctcactttggggtcgtgggcagatcgctggctcccacgcctggacttcgggatcgcaggcaggatcccttccagcccaagcactccgcccaggcgcgccaggcagagccccaccccatcccgccgttcccttcagccccggggcgcggatcttgcatctgaaactgagcagagcagggcgccgggcagggccggcgggccacgtgataagcccggaaacagctccgccccctcgcttcctgagccgccacatcccggcagccctcctacctgcgcacgtggtgccgccgctgctgcctcccgctcgccctgaacccagtgcctgcagccatggctcccggccagctcgccttatttagtgtctctgacaaaaccggccttgtggaatttgcaagaaacctgaccgctcttggtttgaatctggtcgcttccggagggactgcaaaagctctcagggatgctggtctggcagtcagagatgtctctgagttgacgggatttcctgaaatgttggggggacgtgtgaaaactttgcatcctgcagtccatgctggaatcctagctcgtaatattccagaagataatgctgacatggccagacttgatttcaatcttataagagttgttgcctgcaatctctatccctttgtaaagacagtggcttctccaggtgtaactgttgaggaggctgtggagcaaattgacattggtggagtaaccttactgagagctgcagccaaaaaccacgctcgagtgacagtggtgtgtgaaccagaggactatgtggtggtgtccacggagatgcagagctccgagagtaaggacacctccttggagactagacgccagttagccttgaaggcattcactcatacggcacaatatgatgaagcaatttcagattatttcaggaaacagtacagcaaaggcgtatctcagatgcccttgagatatggaatgaacccacatcagacccctgcccagctgtacacactgcagcccaagcttcccatcacagttctaaatggagcccctggatttataaacttgtgcgatgctttgaacgcctggcagctggtgaaggaactcaaggaggctttaggtattccagccgctgcctctttcaaacatgtcagcccagcaggtgctgctgttggaattccactcagtgaagatgaggccaaagtctgcatggtttatgatctctataaaaccctcacacccatctcagcggcatatgcaagagcaagaggggctgataggatgtcttcatttggtgattttgttgcattgtccgatgtttgtgatgtaccaactgcaaaaattatttccagagaagtatctgatggtataattgccccaggatatgaagaagaagccttgacaatactttccaaaaagaaaaatggaaactattgtgtccttcagatggaccaatcttacaaaccagatgaaaatgaagttcgaactctctttggtcttcatttaagccagaagagaaataatggtgtcgtcgacaagtcattatttagcaatgttgttaccaaaaataaagatttgccagagtctgccctccgagacctcatcgtagccaccattgctgtcaagtacactcagtctaactctgtgtgctacgccaagaacgggcaggttatcggcattggagcaggacagcagtctcgtatacactgcactcgccttgcaggagataaggcaaactattggtggcttagacaccatccacaagtgctttcgatgaagtttaaaacaggagtgaagagagcagaaatctccaatgccatcgatcaatatgtgactggaaccattggcgaggtgaaagacttggcattgggttctcggctgtgttaatattcagttcatccctttatgtgtaacagattttaacttcatcaccacacagagaaaaagatactttcattgaaattctatgttgtctaaaattgatcattgaaacttcttacacatttctcatgttcttctgtctcatgtaactttcttcattgtttttgacccctttctgaaaccacagtcctctgtctttttaaattgcagccttggtgtaggtttgtatatttgtacttcccctgttgattataagcttttgatgacaaggactgcttttcacctacgtcgaggtgcctgccaccacgtcatgcatggtgcttgctgtccgatgggtctgtattcaacattaaatacaaattgcctgacggcaggtaaccctggggtcttctcccaccacattttctacatgtgccattaataacttgatacattttgttacatttcatgttcttctgtttgaagaaggtatgtgggaacattacaatcgcaaacgttaggtaggtagcccgccagaagaaaagatctagcccagtttctggacatattgcgtgcctaacaaaatgctggatggaaaacagaagcctgctaatcaaatactagatggtcttctgaagagccaattgactaccctcagttttttattcaggagcaggaatcaacataagtgtcattgaagagtgaggctgcagaatgtaactgaagtccttaagatatcttttttttttcaactttgatacttggatttttctgtttgatattaccagtcaacccctgctactagtcctgaaagagtcctggaagtgaacaagaataaaagtatgtcaaagctaaaacatgacccaagatagaagcaccttgtaaaatatgattaactgtctgtgccactatgacacaatactgcaggctgggtaacttataaaccatagacatttatttttcatagttctggaggctgtgaagtcccagatcaaggtactggtgggctgagagtctggggaggcctaccctctgcttcccagatggcacagccctctctggaaaggacaaacactgtgtccttacttcacagaaggggcatacttcccctgaagcccttttataagtctgtaatccattcatgagggccccaccctcattgcccaataactttctaaaggccttatacttcttaatactgttgcattggggattaagtttcaacatgaattttggagtggatacacacactcaaaccatagcaaatattatgaattgtgttttgtctacaactgcctttacatttagaataatttttgtataaatgtagttaaagaactactcatctctttcctagattggatatagagggtttttttgaaaacccttggaacacaatttttatttgctttctttgctacagtagtaccaaagcagtagatttaaattagacggtagtctaatagacataaagtagtagatacgaagtagatttaaattagagattttaaaacagtgtatttttatgtaagtagcttagccaaaaataaaaaaaattacatatgtacttggaataaactgatttggaaagtaaa

SEQ ID NO: 421170 - DNA, 2908 bp, Homo sapiens
gctactcgggaggctgaggcaggataaactcttgaacccgggatgtggaggttgcaggttgcacgtgacatagccgagatcgcgccattgcactccagcctgggcaacaaaagcgaaactccatctcaaaaaaaaaaaaaaaaaacaaaaaaaacaaaaaaacccagaaaaacaaaaaaacaacaaacaaaaagggaggatggtagataactgtccagatactttccagctttgccgctatatgaactattccttttgtttagttttcagcatgggagcttctggcacttttacgtactttccagcttctggggaccggctgcctagaataacaggcatttgccccagaggccgtggagtggcctcactttggggtcgtgggcagatcgctggctcccacgcctggacttcgggatcgcaggcaggatcccttccagcccaagcactccgcccaggcgcgccaggcagagccccaccccatcccgccgttcccttcagccccggggcgcggatcttgcatctgaaactgagcagagcagggcgccgggcagggccggcgggccacgtgataagcccggaaacagctccgccccctcgcttcctgagccgccacatcccggcagccctcctacctgcgcacgtggtgccgccgctgctgcctcccgctcgccctgaacccagtgcctgcagccatggctcccggccagctcggtgaggccctagcggagcggcgcggtctgcgtcctcgcctgcggccccccacgctcccgccttggcggcggccggcgggacccggcactgcaggggcggcgctgcgggattgaaagccagcgtccccgctccccggccgggccgcagcctgcgtggggcccgccttagagcagctcgcgggtgtaagacctggggaggcccggaccaggcctgcgaacgcagggtccaggtgctggccttgcgattcgagaatctcctcccccagaccctcccaaggccttgcagaacacagtgcaatgtgctgcgaatcatgagaaaaaatgtcttctctttcagccttatttagtgtctctgacaaaaccggccttgtggaatttgcaagaaacctgaccgctcttggtttgaatctggtcgcttccggagggactgcaaaagctctcagggatgctggtctggcagtcagagatgtctctgagttgacgggatttcctgaaatgttggggggacgtgtgaaaactttgcatcctgcagtccatgctggaatcctagctcgtaatattccagaagataatgctgacatggccagacttgatttcaatcttataagagttgttgcctgcaatctctatccctttgtaaagacagtggcttctccaggtgtaactgttgaggaggctgtggagcaaattgacattggtggagtaaccttactgagagctgcagccaaaaaccacgctcgagtgacagtggtgtgtgaaccagaggactatgtggtggtgtccacggagatgcagagctccgagagtaaggacacctccttggagactagacgccagttagccttgaaggcattcactcatacggcacaatatgatgaagcaatttcagattatttcaggaaacagtacagcaaaggcgtatctcagatgcccttgagatatggaatgaacccacatcagacccctgcccagctgtacacactgcagcccaagcttcccatcacagttctaaatggagcccctggatttataaacttgtgcgatgctttgaacgcctggcagctggtgaaggaactcaaggaggctttaggtattccagccgctgcctctttcaaacatgtcagcccagcaggtgctgctgttggaattccactcagtgaagatgaggccaaagtctgcatggtttatgatctctataaaaccctcacacccatctcagcggcatatgcaagagcaagaggggctgataggatgtcttcatttggtgattttgttgcattgtccgatgtttgtgatgtaccaactgcaaaaattatttccagagaagtatctgatggtataattgccccaggatatgaagaagaagccttgacaatactttccaaaaagaaaaatggaaactattgtgtccttcagatggaccaatcttacaaaccagatgaaaatgaagttcgaactctctttggtcttcatttaagccagaagagaaataatggtgtcgtcgacaagtcattatttagcaatgttgttaccaaaaataaagatttgccagagtctgccctccgagacctcatcgtagccaccattgctgtcaagtacactcagtctaactctgtgtgctacgccaagaacgggcaggttatcggcattggagcaggacagcagtctcgtatacactgcactcgccttgcaggagataaggcaaactattggtggcttagacaccatccacaagtgctttcgatgaagtttaaaacaggagtgaagagagcagaaatctccaatgccatcgatcaatatgtgactggaaccattggcgaggatgaagatttgataaagtggaaggcactgtttgaggaagtccctgagttactcactgaggcagagaagaaggaatgggttgagaaactgactgaagtttctatcagctctgatgccttcttccctttccgagataacgtagacagagctaaaaggagtggtgtggcgtacattgcggctccctccggttctgctgctgacaaagttgtgattgaggcctgcgacgaactgggaatcatcctcgctcatacgaaccttcggctcttccaccactgattttaccacacactgttttttggcttgcttatgtgtaggtgaacagtcacgcctgaaactttgaggataactttttaaaaaaataaaacagtatctcttaa

SEQ ID NO: 421171 - DNA, 2801 bp, Homo sapiens
gctactcgggaggctgaggcaggataaactcttgaacccgggatgtggaggttgcaggttgcacgtgacatagccgagatcgcgccattgcactccagcctgggcaacaaaagcgaaactccatctcaaaaaaaaaaaaaaaaaacaaaaaaaacaaaaaaacccagaaaaacaaaaaaacaacaaacaaaaagggaggatggtagataactgtccagatactttccagctttgccgctatatgaactattccttttgtttagttttcagcatgggagcttctggcacttttacgtactttccagcttctggggaccggctgcctagaataacaggcatttgccccagaggccgtggagtggcctcactttggggtcgtgggcagatcgctggctcccacgcctggacttcgggatcgcaggcaggatcccttccagcccaagcactccgcccaggcgcgccaggcagagccccaccccatcccgccgttcccttcagccccggggcgcggatcttgcatctgaaactgagcagagcagggcgccgggcagggccggcgggccacgtgataagcccggaaacagctccgccccctcgcttcctgagccgccacatcccggcagccctcctacctgcgcacgtggtgccgccgctgctgcctcccgctcgccctgaacccagtgcctgcagccatggctcccggccagctcggtgaggccctagcggagcggcgcggtctgcgtcctcgcctgcggccccccacgctcccgccttggcggcggccggcgggacccggcactgcaggggcggcgctgcgggattgaaagccagcgtccccgctccccggccgggccgcagcctgcgtggggcccgccttagagcagctcgcgggtgtaagacctggggaggcccggaccaggcctgcgaacgcagggtccagccttatttagtgtctctgacaaaaccggccttgtggaatttgcaagaaacctgaccgctcttggtttgaatctggtcgcttccggagggactgcaaaagctctcagggatgctggtctggcagtcagagatgtctctgagttgacgggatttcctgaaatgttggggggacgtgtgaaaactttgcatcctgcagtccatgctggaatcctagctcgtaatattccagaagataatgctgacatggccagacttgatttcaatcttataagagttgttgcctgcaatctctatccctttgtaaagacagtggcttctccaggtgtaactgttgaggaggctgtggagcaaattgacattggtggagtaaccttactgagagctgcagccaaaaaccacgctcgagtgacagtggtgtgtgaaccagaggactatgtggtggtgtccacggagatgcagagctccgagagtaaggacacctccttggagactagacgccagttagccttgaaggcattcactcatacggcacaatatgatgaagcaatttcagattatttcaggaaacagtacagcaaaggcgtatctcagatgcccttgagatatggaatgaacccacatcagacccctgcccagctgtacacactgcagcccaagcttcccatcacagttctaaatggagcccctggatttataaacttgtgcgatgctttgaacgcctggcagctggtgaaggaactcaaggaggctttaggtattccagccgctgcctctttcaaacatgtcagcccagcaggtgctgctgttggaattccactcagtgaagatgaggccaaagtctgcatggtttatgatctctataaaaccctcacacccatctcagcggcatatgcaagagcaagaggggctgataggatgtcttcatttggtgattttgttgcattgtccgatgtttgtgatgtaccaactgcaaaaattatttccagagaagtatctgatggtataattgccccaggatatgaagaagaagccttgacaatactttccaaaaagaaaaatggaaactattgtgtccttcagatggaccaatcttacaaaccagatgaaaatgaagttcgaactctctttggtcttcatttaagccagaagagaaataatggtgtcgtcgacaagtcattatttagcaatgttgttaccaaaaataaagatttgccagagtctgccctccgagacctcatcgtagccaccattgctgtcaagtacactcagtctaactctgtgtgctacgccaagaacgggcaggttatcggcattggagcaggacagcagtctcgtatacactgcactcgccttgcaggagataaggcaaactattggtggcttagacaccatccacaagtgctttcgatgaagtttaaaacaggagtgaagagagcagaaatctccaatgccatcgatcaatatgtgactggaaccattggcgaggatgaagatttgataaagtggaaggcactgtttgaggaagtccctgagttactcactgaggcagagaagaaggaatgggttgagaaactgactgaagtttctatcagctctgatgccttcttccctttccgagataacgtagacagagctaaaaggagtggtgtggcgtacattgcggctccctccggttctgctgctgacaaagttgtgattgaggcctgcgacgaactgggaatcatcctcgctcatacgaaccttcggctcttccaccactgattttaccacacactgttttttggcttgcttatgtgtaggtgaacagtcacgcctgaaactttgaggataactttttaaaaaaataaaacagtatctcttaa

SEQ ID NO: 421172 - DNA, 1923 bp, Homo sapiens
gttattgactagtacgaggctgggtttacagtgcctgcagccatggctcccggccttactcgccttatttagtgtctctgacaaaaccggccttgtggaatttgcaagaaacctgaccgctcttggtttgaatctggtcgcttccggagggactgcaaaagctctcagggatgctggtctggcagtcagagatgtctctgagttgacgggatttcctgaaatgttggggggacgtgtgaaaactttgcatcctgcagtccatgctggaatcctagctcgtaatattccagaagataatgctgacatggccagacttgatttcaatcttataagagttgttgcctgcaatctctatccctttgtaaagacagtggcttctccaggtgtaactgttgaggaggctgtggagcaaattgacattggtggagtaaccttactgagagctgcagccaaaaaccacgctcgagtgacagtggtgtgtgaaccagaggactatgtggtggtgtccacggagatgcagagctccgagagtaaggacacctccttggagactagacgccagttagccttgaaggcattcactcatacggcacaatatgatgaagcaatttcagattatttcaggaaacagtacagcaaaggcgtatctcagatgcccttgagatatggaatgaacccacatcagacccctgcccagctgtacacactgcagcccaagcttcccatcacagttctaaatggagcccctggatttataaacttgtgcgatgctttgaacgcctggcagctggtgaaggaactcaaggaggctttaggtattccagccgctgcctctttcaaacatgtcagcccagcaggtgctgctgttggaattccactcagtgaagatgaggccaaagtctgcatggtttatgatctctataaaaccctcacacccatctcagcggcatatgcaagagcaagaggggctgataggatgtcttcatttggtgattttgttgcattgtccgatgtttgtgatgtaccaactgcaaaaattatttccagagaagtatctgatggtataattgccccaggatatgaagaagaagccttgacaatactttccaaaaagaaaaatggaaactattgtgtccttcagatggaccaatcttacaaaccagatgaaaatgaagttcgaactctctttggtcttcatttaagccagaagagaaataatggtgtcgtcgacaagtcattatttagcaatgttgttaccaaaaataaagatttgccagagtctgccctccgagacctcatcgtagccaccattgctgtcaagtacactcagtctaactctgtgtgctacgccaagaacgggcaggttatcggcattggagcaggacagcagtctcgtatacactgcactcgccttgcaggagataaggcaaactattggtggcttagacaccatccacaagtgctttcgatgaagtttaaaacaggagtgaagagagcagaaatctccaatgccatcgatcaatatgtgactggaaccattggcgaggatgaagatttgataaagtggaaggcactgtttgaggaagtccctgagttactcactgaggcagagaagaaggaatgggttgagaaactgactgaagtttctatcagctctgatgccttcttccctttccgagataacgtagacagagctaaaaggagtggtgtggcgtacattgcggctccctccggttctgctgctgacaaagttgtgattgaggcctgcgacgaactgggaatcatcctcgctcatacgaaccttcggctcttccaccactgattttaccacacactgttttttggcttgcttatgtgtaggtgaacagtcacgcctgaaactttgaggataactttttaaaaaaataaaacagtatctcttaa

SEQ ID NO: 421173 - DNA, 2585 bp, Homo sapiens
gctactcgggaggctgaggcaggataaactcttgaacccgggatgtggaggttgcaggttgcacgtgacatagccgagatcgcgccattgcactccagcctgggcaacaaaagcgaaactccatctcaaaaaaaaaaaaaaaaaacaaaaaaaacaaaaaaacccagaaaaacaaaaaaacaacaaacaaaaagggaggatggtagataactgtccagatactttccagctttgccgctatatgaactattccttttgtttagttttcagcatgggagcttctggcacttttacgtactttccagcttctggggaccggctgcctagaataacaggcatttgccccagaggccgtggagtggcctcactttggggtcgtgggcagatcgctggctcccacgcctggacttcgggatcgcaggcaggatcccttccagcccaagcactccgcccaggcgcgccaggcagagccccaccccatcccgccgttcccttcagccccggggcgcggatcttgcatctgaaactgagcagagcagggcgccgggcagggccggcgggccacgtgataagcccggaaacagctccgccccctcgcttcctgagccgccacatcccggcagccctcctacctgcgcacgtggtgccgccgctgctgcctcccgctcgccctgaacccagtgcctgcagccatggctcccggccagctcgccttatttagtgtctctgacaaaaccggccttgtggaatttgcaagaaacctgaccgctcttggtttgaatctggtcgcttccggagggactgcaaaagctctcagggatgctggtctggcagtcagagatgtctctgagttgacgggatttcctgaaatgttggggggacgtgtgaaaactttgcatcctgcagtccatgctggaatcctagctcgtaatattccagaagataatgctgacatggccagacttgatttcaatcttataagagttgttgcctgcaatctctatccctttgtaaagacagtggcttctccaggtgtaactgttgaggaggctgtggagcaaattgacattggtggagtaaccttactgagagctgcagccaaaaaccacgctcgagtgacagtggtgtgtgaaccagaggactatgtggtggtgtccacggagatgcagagctccgagagtaaggacacctccttggagactagacgccagttagccttgaaggcattcactcatacggcacaatatgatgaagcaatttcagattatttcaggaaacagtacagcaaaggcgtatctcagatgcccttgagatatggaatgaacccacatcagacccctgcccagctgtacacactgcagcccaagcttcccatcacagttctaaatggagcccctggatttataaacttgtgcgatgctttgaacgcctggcagctggtgaaggaactcaaggaggctttaggtattccagccgctgcctctttcaaacatgtcagcccagcaggtgctgctgttggaattccactcagtgaagatgaggccaaagtctgcatggtttatgatctctataaaaccctcacacccatctcagcggcatatgcaagagcaagaggggctgataggatgtcttcatttggtgattttgttgcattgtccgatgtttgtgatgtaccaactgcaaaaattatttccagagaagtatctgatggtataattgccccaggatatgaagaagaagccttgacaatactttccaaaaagaaaaatggaaactattgtgtccttcagatggaccaatcttacaaaccagatgaaaatgaagttcgaactctctttggtcttcatttaagccagaagagaaataatggtgtcgtcgacaagtcattatttagcaatgttgttaccaaaaataaagatttgccagagtctgccctccgagacctcatcgtagccaccattgctgtcaagtacactcagtctaactctgtgtgctacgccaagaacgggcaggttatcggcattggagcaggacagcagtctcgtatacactgcactcgccttgcaggagataaggcaaactattggtggcttagacaccatccacaagtgctttcgatgaagtttaaaacaggagtgaagagagcagaaatctccaatgccatcgatcaatatgtgactggaaccattggcgaggatgaagatttgataaagtggaaggcactgtttgaggaagtccctgagttactcactgaggcagagaagaaggaatgggttgagaaactgactgaagtttctatcagctctgatgccttcttccctttccgagataacgtagacagagctaaaaggattggtgtggcgtacattgcggctcctccgtttttcctactaacctcttttttttttggccccttccccctttgtgcttttctcccttattctctcttcccgtctttttcctcccccctttttttttcccccctcttttttttttggtggtccttccttttttgtgctagtgtgaacagtcacgcctgaaactttgaggataactttttaaaaaaataaaacagtatctcttaa

SEQ ID NO: 421174 - DNA, 2389 bp, Homo sapiens
gctactcgggaggctgaggcaggataaactcttgaacccgggatgtggaggttgcaggttgcacgtgacatagccgagatcgcgccattgcactccagcctgggcaacaaaagcgaaactccatctcaaaaaaaaaaaaaaaaaacaaaaaaaacaaaaaaacccagaaaaacaaaaaaacaacaaacaaaaagggaggatggtagataactgtccagatactttccagctttgccgctatatgaactattccttttgtttagttttcagcatgggagcttctggcacttttacgtactttccagcttctggggaccggctgcctagaataacaggcatttgccccagaggccgtggagtggcctcactttggggtcgtgggcagatcgctggctcccacgcctggacttcgggatcgcaggcaggatcccttccagcccaagcactccgcccaggcgcgccaggcagagccccaccccatcccgccgttcccttcagccccggggcgcggatcttgcatctgaaactgagcagagcagggcgccgggcagggccggcgggccacgtgataagcccggaaacagctccgccccctcgcttcctgagccgccacatcccggcagccctcctacctgcgcacgtggtgccgccgctgctgcctcccgctcgccctgaacccagtgcctgcagccatggctcccggccagctcgccttatttagtgtctctgacaaaaccggccttgtggaatttgcaagaaacctgaccgctcttggtttgaatctggtcgcttccggagggactgcaaaagctctcagggatgctggtctggcagtcagagatgtctctgagttgacgggatttcctgaaatgttggggggacgtgtgaaaactttgcatcctgcagtccatgctggaatcctagctcgtaatattccagaagataatgctgacatggccagacttgatttcaatcttataagagttgttgcctgcaatctctatccctttgtaaagacagtggcttctccaggtgtaactgttgaggaggctgtggagcaaattgacattggtggagtaaccttactgagagctgcagccaaaaaccacgctcgagtgacagtggtgtgtgaaccagaggactatgtggtggtgtccacggagatgcagagctccgagagtaaggacacctccttggagactagacgccagttagccttgaaggcattcactcatacggcacaatatgatgaagcaatttcagattatttcaggaaacagtacagcaaaggcgtatctcagatgcccttgagatatggaatgaacccacatcagacccctgcccagctgtacacactgcagcccaagcttcccatcacagttctaaatggagcccctggatttataaacttgtgcgatgctttgaacgcctggcagctggtgaaggaactcaaggaggctttaggtattccagccgctgcctctttcaaacatgtcagcccagcaggtgctgctgttggaattccactcagtgaagatgaggccaaagtctgcatggtttatgatctctataaaaccctcacacccatctcagcggcatatgcaagagcaagaggggctgataggatgtcttcatttggtgattttgttgcattgtccgatgtttgtgatgtaccaactgcaaaaattatttccagagaagtatctgatggtataattgccccaggatatgaagaagaagccttgacaatactttccaaaaagaaaaatggaaactattgtgtccttcagatggaccaatcttacaaaccagatgaaaatgaagttcgaactctctttggtcttcatttaagccagaagagaaataatggtgtcgtcgacaagtcattatttagcaatgttgttaccaaaaataaagatttgccagagtctgccctccgagacctcatcgtagccaccattgctgtcaagtacactcagtctaactctgtgtgctacgccaagaacgggcaggatgaagatttgataaagtggaaggcactgtttgaggaagtccctgagttactcactgaggcagagaagaaggaatgggttgagaaactgactgaagtttctatcagctctgatgccttcttccctttccgagataacgtagacagagctaaaaggagtggtgtggcgtacattgcggctccctccggttctgctgctgacaaagttgtgattgaggcctgcgacgaactgggaatcatcctcgctcatacgaaccttcggctcttccaccactgattttaccacacactgttttttggcttgcttatgtgtaggtgaacagtcacgcctgaaactttgaggataactttttaaaaaaataaaacagtatctcttaa

SEQ ID NO: 421175 - DNA, 1540 bp, Homo sapiens
  misc_feature (18)..(18): n is a, c, g, or t
  misc_feature (21)..(21): n is a, c, g, or t
  misc_feature (27)..(28): n is a, c, g, or t
  misc_feature (43)..(43): n is a, c, g, or t
  misc_feature (47)..(47): n is a, c, g, or t
  misc_feature (52)..(53): n is a, c, g, or t
  misc_feature (63)..(63): n is a, c, g, or t
aagaccaaagacttgaancantttggnntggaagttaaacccnttancgtgnnaggaaagccnttggcagcataacagctcgagtgacagtggtgtgtgaaccagaggactatgtggtggtgtccacggagatgcagagctccgagagtaaggacacctccttggagactagacgccagttagccttgaaggcattcactcatacggcacaatatgatgaagcaatttcagattatttcaggaaacagtacagcaaaggcgtatctcagatgcccttgagatatggaatgaacccacatcagacccctgcccagctgtacacactgcagcccaagcttcccatcacagttctaaatggagcccctggatttataaacttgtgcgatgctttgaacgcctggcagctggtgaaggaactcaaggaggctttaggtattccagccgctgcctctttcaaacatgtcagcccagcaggtgctgctgttggaattccactcagtgaagatgaggccaaagtctgcatggtttatgatctctataaaaccctcacacccatctcagcggcatatgcaagagcaagaggggctgataggatgtcttcatttggtgattttgttgcattgtccgatgtttgtgatgtaccaactgcaaaaattatttccagagaagtatctgatggtataattgccccaggatatgaagaagaagccttgacaatactttccaaaaagaaaaatggaaactattgtgtccttcagatggaccaatcttacaaaccagatgaaaatgaagttcgaactctctttggtcttcatttaagccagaagagaaataatggtgtcgtcgacaagtcattatttagcaatgttgttaccaaaaataaagatttgccagagtctgccctccgagacctcatcgtagccaccattgctgtcaagtacactcagtctaactctgtgtgctacgccaagaacgggcaggttatcggcattggagcaggacagcagtctcgtatacactgcactcgccttgcaggagataaggcaaactattggtggcttagacaccatccacaagtgctttcgatgaagtttaaaacaggagtgaagagagcagaaatctccaatgccatcgatcaatatgtgactggaaccattggcgaggatgaagatttgataaagtggaaggcactgtttgaggaagtccctgagttactcactgaggcagagaagaaggaatgggttgagaaactgactgaagtttctatcagctctgatgccttcttccctttccgagataacgtagacagagctaaaaggagtggtgtggcgtacattgcggctccctccggttctgctgctgacaaagttgtgattgaggcctgcgacgaactgggaatcatcctcgctcatacgaaccttcggctcttccaccactgattttaccacacactgttttttggcttgcttatgtgtaggtgaacagtcacgcctgaaactttgaggataactttttaaaaaaataaaacagtatctcttaa

SEQ ID NO: 421176 - DNA, 1078 bp, Homo sapiens
gcggccgcctactactactactactgctcgaattcaagcttctaacgatgtacggggacatggtttatgatctctataaaaccctcacacccatctcagcggcatatgcaagagcaagaggggctgataggatgtcttcatttggtgattttgttgcattgtccgatgtttgtgatgtaccaactgcaaaaattatttccagagaagtatctgatggtataattgccccaggatatgaagaagaagccttgacaatactttccaaaaagaaaaatggaaactattgtgtccttcagatggaccaatcttacaaaccagatgaaaatgaagttcgaactctctttggtcttcatttaagccagaagagaaataatggtgtcgtcgacaagtcattatttagcaatgttgttaccaaaaataaagatttgccagagtctgccctccgagacctcatcgtagccaccattgctgtcaagtacactcagtctaactctgtgtgctacgccaagaacgggcaggttatcggcattggagcaggacagcagtctcgtatacactgcactcgccttgcaggagataaggcaaactattggtggcttagacaccatccacaagtgctttcgatgaagtttaaaacaggagtgaagagagcagaaatctccaatgccatcgatcaatatgtgactggaaccattggcgaggatgaagatttgataaagtggaaggcactgtttgaggaagtccctgagttactcactgaggcagagaagaaggaatgggttgagaaactgactgaagtttctatcagctctgatgccttcttccctttccgagataacgtagacagagctaaaaggagtggtgtggcgtacattgcggctccctccggttctgctgctgacaaagttgtgattgaggcctgcgacgaactgggaatcatcctcgctcatacgaaccttcggctcttccaccactgattttaccacacactgttttttggcttgcttatgtgtaggtgaacagtcacgcctgaaactttgaggataactttttaaaaaaataaaacagtatctcttaa

SEQ ID NO: 421177 - DNA, 773 bp, Homo sapiens
aacaagtcctaagaaaaatgcccaggtgctttctggcatggtgatttgcaccacatagaactaaagacgatgtcagaccaagcttcttcctttctctctccccgcataggatgaagatttgataaagtggaaggcactgtttgaggaagtccctgagttactcactgaggcagagaagaaggaatgggttgagaaactgactgaagtttctatcagctctgatgccttcttccctttccgagataacgtagacagagctaaaaggggtaagtatggaattgggtgcatttgcttagagttgagcattatgtagaaactgtttcagaaatcctgcttttgatttttaaaaggtgtggcaaagtgatacagatcagtaatattcagagaaccatttgacttctccattgggtggatggagaacccaaatcctgttgttattttgcctttttgactgagtgtatctttgttagcatatgctttttagagggggattttgagttttgcaggtttttacataaaatcgcgttttgaaaatcaatatacttcccccagagtggtgtggcgtacattgcggctccctccggttctgctgctgacaaagttgtgattgaggcctgcgacgaactgggaatcatcctcgctcatacgaaccttcggctcttccaccactgattttaccacacactgttttttggcttgcttatgtgtaggtgaacagtcacgcctgaaactttgaggataactttttaaaaaaataaaacagtatctcttaa

SEQ ID NO: 421178 - DNA, 1392 bp, Homo sapiens
gctactcgggaggctgaggcaggataaactcttgaacccgggatgtggaggttgcaggttgcacgtgacatagccgagatcgcgccattgcactccagcctgggcaacaaaagcgaaactccatctcaaaaaaaaaaaaaaaaaacaaaaaaaacaaaaaaacccagaaaaacaaaaaaacaacaaacaaaaagggaggatggtagataactgtccagatactttccagctttgccgctatatgaactattccttttgtttagttttcagcatgggagcttctggcacttttacgtactttccagcttctggggaccggctgcctagaataacaggcatttgccccagaggccgtggagtggcctcactttggggtcgtgggcagatcgctggctcccacgcctggacttcgggatcgcaggcaggatcccttccagcccaagcactccgcccaggcgcgccaggcagagccccaccccatcccgccgttcccttcagccccggggcgcggatcttgcatctgaaactgagcagagcagggcgccgggcagggccggcgggccacgtgataagcccggaaacagctccgccccctcgcttcctgagccgccacatcccggcagccctcctacctgcgcacgtggtgccgccgctgctgcctcccgctcgccctgaacccagtgcctgcagccatggctcccggccagctcgccttatttagtgtctctgacaaaaccggccttgtggaatttgcaagaaacctgaccgctcttggtttgaatctggtcgcttccggagggactgcaaaagctctcagggatgctggtctggcagtcagaggatgtctcctgagctttgacgggattctccttgaaacttgtcggggggggaccgtggtggaaaacctttgcccatccctgccagtccactgcttgggaaactccctaaggctcggtaaattaaatttccacgaaaagccatacaatgcgtgacatttgggcccaacgaaccttttgggccgtttttcccacaactcccctttagtataacgaaagggttcggttttcggcgccatggcgataatttcctccagtaaattcccccgtttttttggctgaaacacagaaccaaccggtggcggcttttccttccccagggagtggttaacccgtggttctggaaacggggaaggggcctgggctggggacgggcccaaaaagttttgaacccaatgtggcggctcgggcacacggtaacaccccgttttaacctttgggagctaaggccctttgcacagctcccactacacaaatgccaacggcatacccggaaggttgaaacaaggtgccggttggttatgcttggaaaaccccaacgcaggcgcaccttaaa

SEQ ID NO: 421179 - DNA, 425 bp, Homo sapiens
ttctaaatgctctgaaaattataaaaccagtgctgtagtagttaccaattatccctgaacatacacaacagttaggaaataaattaaataaactttttttcggaagtaaatagaattttacttaagaaataaaatatagtgaaatactttaaaaaatcagaattttcacgttgaattcaggctcaaaatctcttgaaatgaaaacagtagatgctttgaatagtgaaaattacaattcagccacaccagtagtaccattctgtttatctgtttttcagagatgtctctgagttgacgggatttcctgaaatgttggggggacgtgtgaaaactttgcatcctgcagtccatgctggtaagtggttggtatctttaatgtaaaaacagtcagtggtttccaggaatattttagttgatagcgtcct

SEQ ID NO: 421180 - DNA, 436 bp, Homo sapiens
tgacctcaaaccatcaattttattgaattgtagattattaatagtcatatgtcacatatcactgaagaggtataaatagtagttataaacaaacctcttactccaccccttttaatgacttaaaaattatttatatttctcttattttggcctgatatgttcttccacaaaactaataaataggttttggagaatgtgcacaaaagatccttttgagaagaaagtgtctttggaagaggtgttcactttaatgtctgtgttcctcaggttatcggcattggagcaggacagcagtctcgtatacactgcactcgccttgcaggagataaggcaaactattggtggcttagacaccatccacaagtgctttcgatgaagtttaaaacaggagtgaagagagcagaaatctccaatgccatcgatcaatatgtgactg

SEQ ID NO: 421181 - DNA, 3037 bp, Homo sapiens
gctactcgggaggctgaggcaggataaactcttgaacccgggatgtggaggttgcaggttgcacgtgacatagccgagatcgcgccattgcactccagcctgggcaacaaaagcgaaactccatctcaaaaaaaaaaaaaaaaaacaaaaaaaacaaaaaaacccagaaaaacaaaaaaacaacaaacaaaaagggaggatggtagataactgtccagatactttccagctttgccgctatatgaactattccttttgtttagttttcagcatgggagcttctggcacttttacgtactttccagcttctggggaccggctgcctagaataacaggcatttgccccagaggccgtggagtggcctcactttggggtcgtgggcagatcgctggctcccacgcctggacttcgggatcgcaggcaggatcccttccagcccaagcactccgcccaggcgcgccaggcagagccccaccccatcccgccgttcccttcagccccggggcgcggatcttgcatctgaaactgagcagagcagggcgccgggcagggccggcgggccacgtgataagcccggaaacagctccgccccctcgcttcctgagccgccacatcccggcagccctcctacctgcgcacgtggtgccgccgctgctgcctcccgctcgccctgaacccagtgcctgcagccatggctcccggccagctcgccttatttagtgtctctgacaaaaccggccttgtggaatttgcaagaaacctgaccgctcttggtttgaatctggtcgcttccggagggactgcaaaagctctcagggatgctggtctggcagtcagagatgtctctgagttgacgggatttcctgaaatgttggggggacgtgtgaaaactttgcatcctgcagtccatgctggaatcctagctcgtaatattccagaagataatgctgacatggccagacttgatttcaatcttataagagttgttgcctgcaatctctatccctttgtaaagacagtggcttctccaggtgtaactgttgaggaggctgtggagcaaattgacattggtggagtaaccttactgagagctgcagccaaaaaccacgctcgagtgacagtggtgtgtgaaccagaggactatgtggtggtgtccacggagatgcagagctccgagagtaaggacacctccttggagactagacgccagttagccttgaaggcattcactcatacggcacaatatgatgaagcaatttcagattatttcaggaaacagtacagcaaaggcgtatctcagatgcccttgagatatggaatgaacccacatcagacccctgcccagctgtacacactgcagcccaagcttcccatcacagttctaaatggagcccctggatttataaacttgtgcgatgctttgaacgcctggcagctggtgaaggaactcaaggaggctttaggtattccagccgctgcctctttcaaacatgtcagcccagcaggtgctgctgttggaattccactcagtgaagatgaggccaaagtctgcatggtttatgatctctataaaaccctcacacccatctcagcggcatatgcaagagcaagaggggctgataggatgtcttcatttggtgattttgttgcattgtccgatgtttgtgatgtaccaactgcaaaaattatttccagagaagtatctgatggtataattgccccaggatatgaagaagaagccttgacaatactttccaaaaagaaaaatggaaactattgtgtccttcagatggaccaatcttacaaaccagatgaaaatgaagttcgaactctctttggtcttcatttaagccagaagagaaataatggtgtcgtcgacaagtcattatttagcaatgttgttaccaaaaataaagatttgccagagtctgccctccgagacctcatcgtagccaccattgctgtcaagtacactcagtctaactctgtgtgctacgccaagaacgggcaggttatcggcattggagcaggacagcagtctcgtatacactgcactcgccttgcaggagataaggcaaactattggtggcttagacaccatccacaagtgctttcgatgaagtttaaaacaggagtgaagagagcagaaatctccaatgccatcgatcaatatgtgactggaaccattggcgaggatgaagatttgataaagtggaaggcactgtttgaggaagtccctgagttactcactgaggcagagaagaaggaatgggttgagaaactgactgaagtttctatcagctctgatgccttcttccctttccgagataacgtagacagagctaaaaggagtggtgtggcgtacattgcggctccctccggttctgctgctgacaaagttgtgattgaggcctgcgacgaactgggaatcatcctcgctcatacgaaccttcggctcttccaccactgattttaccacacactgttttttggcttgcttatgtgtaggtgaacagtcacgcctgaaactttgaggataactttttaaaaaaataaaacagtatctcttaagaaaaaaaaacaaacgtacacaacgcaacacaacaaaaaaactgtgttggggcgggcccttggcccctctgctgaaaaggttttccagagaccacatggtgtttggggcgcccgcgcggcccccgttgtgttctgtcgtgaccaccgtgggccactacacgtcgtgttcccaacggcagacaccccggggccatagcactcaaggcggctgcggtattccacaccagattaaaaaaaccgcccggggggagacaacaccaaggcgtgtcgcggaaacaaactccccagtagtgacgttaccagcgggcaacataagcgggagcacataaacacacgggggcccacaaggcggacgccgcaatattcaaattacgccccccgctgcgggagaacacgaccagacgatcacccgcgacgaccagctcacaacagcagaacacccaacacagcagacagacagcacgc

SEQ ID NO: 421182 - DNA, 2529 bp, Homo sapiens
gctactcgggaggctgaggcaggataaactcttgaacccgggatgtggaggttgcaggttgcacgtgacatagccgagatcgcgccattgcactccagcctgggcaacaaaagcgaaactccatctcaaaaaaaaaaaaaaaaaacaaaaaaaacaaaaaaacccagaaaaacaaaaaaacaacaaacaaaaagggaggatggtagataactgtccagatactttccagctttgccgctatatgaactattccttttgtttagttttcagcatgggagcttctggcacttttacgtactttccagcttctggggaccggctgcctagaataacaggcatttgccccagaggccgtggagtggcctcactttggggtcgtgggcagatcgctggctcccacgcctggacttcgggatcgcaggcaggatcccttccagcccaagcactccgcccaggcgcgccaggcagagccccaccccatcccgccgttcccttcagccccggggcgcggatcttgcatctgaaactgagcagagcagggcgccgggcagggccggcgggccacgtgataagcccggaaacagctccgccccctcgcttcctgagccgccacatcccggcagccctcctacctgcgcacgtggtgccgccgctgctgcctcccgctcgccctgaacccagtgcctgcagccatggctcccggccagctcgccttatttagtgtctctgacaaaaccggccttgtggaatttgcaagaaacctgaccgctcttggtttgaatctggtcgcttccggagggactgcaaaagctctcagggatgctggtctggcagtcagagatgtctctgagttgacgggatttcctgaaatgttggggggacgtgtgaaaactttgcatcctgcagtccatgctggaatcctagctcgtaatattccagaagataatgctgacatggccagacttgatttcaatcttataagagttgttgcctgcaatctctatccctttgtaaagacagtggcttctccaggtgtaactgttgaggaggctgtggagcaaattgacattggtggagtaaccttactgagagctgcagccaaaaaccacgctcgagtgacagtggtgtgtgaaccagaggactatgtggtggtgtccacggagatgcagagctccgagagtaaggacacctccttggagactagacgccagttagccttgaaggcattcactcatacggcacaatatgatgaagcaatttcagattatttcaggaaacagtacagcaaaggcgtatctcagatgcccttgagatatggaatgaacccacatcagacccctgcccagctgtacacactgcagcccaagcttcccatcacagttctaaatggagcccctggatttataaacttgtgcgatgctttgaacgcctggcagctggtgaaggaactcaaggaggctttaggtattccagccgctgcctctttcaaacatgtcagcccagcaggtgctgctgttggaattccactcagtgaagatgaggccaaagtctgcatggtttatgatctctataaaaccctcacacccatctcagcggcatatgcaagagcaagaggggctgataggatgtcttcatttggtgattttgttgcattgtccgatgtttgtgatgtaccaactgcaaaaattatttccagagaagtatctgatggtataattgccccaggatatgaagaagaagccttgacaatactttccaaaaagaaaaatggaaactattgtgtccttcagatggaccaatcttacaaaccagatgaaaatgaagttcgaactctctttggtcttcatttaagccagaagagaaataatggtgtcgtcgacaagtcattatttagcaatgttgttaccaaaaataaagatctgtcaagtacactcagtctaactctgtgtgctacgccaagaacgggcaggttatcggcattggagcaggacagcagtctcgtatacactgcactcgccttgcaggagataaggcaaactattggtggcttagacaccatccacaagtgctttcgatgaagtttaaaacaggagtgaagagagcagaaatctccaatgccatcgatcaatatgtgactggaaccattggcgaggatgaagatttgataaagtggaaggcactgtttgaggaagtccctgagttactcactgaggcagagaagaaggaatgggttgagaaactgactgaagtttctatcagctctgatgccttcttccctttccgagataacgtagacagagctaaaaggagtggtgtggcgtacattgcggctccctccggttctgctgctgacaaagttgtgattgaggcctgcgacgaactgggaatcatcctcgctcatacgaaccttcggctcttccaccactgattttaccacacactgttttttggcttgcttatgtgtaggtgaacagtcacgcctgaaactttgaggataactttttaaaaaaataaaacagtatctcttaa

SEQ ID NO: 421183 - DNA, 2859 bp, Homo sapiens
gctactcgggaggctgaggcaggataaactcttgaacccgggatgtggaggttgcaggttgcacgtgacatagccgagatcgcgccattgcactccagcctgggcaacaaaagcgaaactccatctcaaaaaaaaaaaaaaaaaacaaaaaaaacaaaaaaacccagaaaaacaaaaaaacaacaaacaaaaagggaggatggtagataactgtccagatactttccagctttgccgctatatgaactattccttttgtttagttttcagcatgggagcttctggcacttttacgtactttccagcttctggggaccggctgcctagaataacaggcatttgccccagaggccgtggagtggcctcactttggggtcgtgggcagatcgctggctcccacgcctggacttcgggatcgcaggcaggatcccttccagcccaagcactccgcccaggcgcgccaggcagagccccaccccatcccgccgttcccttcagccccggggcgcggatcttgcatctgaaactgagcagagcagggcgccgggcagggccggcgggccacgtgataagcccggaaacagctccgccccctcgcttcctgagccgccacatcccggcagccctcctacctgcgcacgtggtgccgccgctgctgcctcccgctcgccctgaacccagtgcctgcagccatggctcccggccagctcgccttatttagtgtctctgacaaaaccggccttgtggaatttgcaagaaacctgaccgctcttggtttgaatctggtcgcttccggagggactgcaaaagctctcagggatgctggtctggcagtcagagatgtctctgagttgacgggatttcctgaaatgttggggggacgtgtgaaaactttgcatcctgcagtccatgctggaatcctagctcgtaatattccagaagataatgctgacatggccagacttgatttcaatcttataagagttgttgcctgcaatctctatccctttgtaaagacagtggcttctccaggtgtaactgttgaggaggctgtggagcaaattgacattggtggagtaaccttactgagagctgcagccaaaaaccacgctcgagtgacagtggtgtgtgaaccagaggactatgtggtggtgtccacggagatgcagagctccgagagtaaggacacctccttggagactagacgccagttagccttgaaggcattcactcatacggcacaatatgatgaagcaatttcagattatttcaggaaacagtacagcaaaggcgtatctcagatgcccttgagatatggaatgaacccacatcagacccctgcccagctgtacacactgcagcccaagcttcccatcacagttctaaatggagcccctggatttataaacttgtgcgatgctttgaacgcctggcagctggtgaaggaactcaaggaggctttaggtattccagccgctgcctctttcaaacatgtcagcccagcaggtgctgctgttggaattccactcagtgaagatgaggccaaagtctgcatggtttatgatctctataaaaccctcacacccatctcagcggcatatgcaagagcaagaggggctgataggatgtcttcatttggtgattttgttgcattgtccgatgtttgtgatgtaccaactgcaaaaattatttccagagaagtatctgatggtataattgccccaggatatgaagaagaagccttgacaatactttccaaaaagaaaaatggaaactattgtgtccttcagatggaccaatcttacaaaccagatgaaaatgaagttcgaactctctttggtcttcatttaagccagaagagaaataatggtgtcgtcgacaagtcattatttagcaatgttgttaccaaaaataaagatttgccagagtctgccctccgagacctcatcgtagccaccattgctgtcaagtacactcagtctaactctgtgtgctacgccaagaacgggcaggttatcggcattggagcaggacagcagtctcgtatacactgcactcgccttgcaggagataaggcaaactattggtggcttagacaccatccacaagtgctttcgatgaagtttaaaacaggagtgaagagagcagaaatctccaatgccatcgatcaatatgtgactggaaccattggcgaggatgaagatttgataaagtggaaggcactgtttgaggaagtccctgagttactcactgaggcagagaagaaggaatgggttgagaaactgactgaagtttctatcagctctgatgccttcttccctttccgagataacgtagacagagctaaaaggggtaagtatggaattgggtgcatttgcttagagttgagcattatgtagaaactgtttcagaaatcctgcttttgatttttaaaaggtgtggcaaagtgatacagatcagtaatattcagagaaccatttgacttctccattgggtggatggagaacccaaatcctgttgttattttgcctttttgactgagtgtatctttgttagcatatgctttttagagggggattttgagttttgcaggtttttacataaaatcgcgttttgaaaatcaatatacttcccccagagtggtgtggcgtacattgcggctccctccggttctgctgctgacaaagttgtgattgaggcctgcgacgaactgggaatcatcctcgctcatacgaaccttcggctcttccaccactgattttaccacacactgttttttggcttgcttatgtgtaggtgaacagtcacgcctgaaactttgaggataactttttaaaaaaataaaacagtatctcttaa

SEQ ID NO: 421184 - DNA, 2754 bp, Homo sapiens
gctactcgggaggctgaggcaggataaactcttgaacccgggatgtggaggttgcaggttgcacgtgacatagccgagatcgcgccattgcactccagcctgggcaacaaaagcgaaactccatctcaaaaaaaaaaaaaaaaaacaaaaaaaacaaaaaaacccagaaaaacaaaaaaacaacaaacaaaaagggaggatggtagataactgtccagatactttccagctttgccgctatatgaactattccttttgtttagttttcagcatgggagcttctggcacttttacgtactttccagcttctggggaccggctgcctagaataacaggcatttgccccagaggccgtggagtggcctcactttggggtcgtgggcagatcgctggctcccacgcctggacttcgggatcgcaggcaggatcccttccagcccaagcactccgcccaggcgcgccaggcagagccccaccccatcccgccgttcccttcagccccggggcgcggatcttgcatctgaaactgagcagagcagggcgccgggcagggccggcgggccacgtgataagcccggaaacagctccgccccctcgcttcctgagccgccacatcccggcagccctcctacctgcgcacgtggtgccgccgctgctgcctcccgctcgccctgaacccagtgcctgcagccatggctcccggccagctcggtgaggccctagcggagcggcgcggtctgcgtcctcgcctgcggccccccacgctcccgccttggcggcggccggcgggacccggcactgcaggggcggcgctgcgggattgaaagccagcgtccccgctccccggccgggccgcagcctgcgtggggcccgccttagagcagctcgcgggtccttatttagtgtctctgacaaaaccggccttgtggaatttgcaagaaacctgaccgctcttggtttgaatctggtcgcttccggagggactgcaaaagctctcagggatgctggtctggcagtcagagatgtctctgagttgacgggatttcctgaaatgttggggggacgtgtgaaaactttgcatcctgcagtccatgctggaatcctagctcgtaatattccagaagataatgctgacatggccagacttgatttcaatcttataagagttgttgcctgcaatctctatccctttgtaaagacagtggcttctccaggtgtaactgttgaggaggctgtggagcaaattgacattggtggagtaaccttactgagagctgcagccaaaaaccacgctcgagtgacagtggtgtgtgaaccagaggactatgtggtggtgtccacggagatgcagagctccgagagtaaggacacctccttggagactagacgccagttagccttgaaggcattcactcatacggcacaatatgatgaagcaatttcagattatttcaggaaacagtacagcaaaggcgtatctcagatgcccttgagatatggaatgaacccacatcagacccctgcccagctgtacacactgcagcccaagcttcccatcacagttctaaatggagcccctggatttataaacttgtgcgatgctttgaacgcctggcagctggtgaaggaactcaaggaggctttaggtattccagccgctgcctctttcaaacatgtcagcccagcaggtgctgctgttggaattccactcagtgaagatgaggccaaagtctgcatggtttatgatctctataaaaccctcacacccatctcagcggcatatgcaagagcaagaggggctgataggatgtcttcatttggtgattttgttgcattgtccgatgtttgtgatgtaccaactgcaaaaattatttccagagaagtatctgatggtataattgccccaggatatgaagaagaagccttgacaatactttccaaaaagaaaaatggaaactattgtgtccttcagatggaccaatcttacaaaccagatgaaaatgaagttcgaactctctttggtcttcatttaagccagaagagaaataatggtgtcgtcgacaagtcattatttagcaatgttgttaccaaaaataaagatttgccagagtctgccctccgagacctcatcgtagccaccattgctgtcaagtacactcagtctaactctgtgtgctacgccaagaacgggcaggttatcggcattggagcaggacagcagtctcgtatacactgcactcgccttgcaggagataaggcaaactattggtggcttagacaccatccacaagtgctttcgatgaagtttaaaacaggagtgaagagagcagaaatctccaatgccatcgatcaatatgtgactggaaccattggcgaggatgaagatttgataaagtggaaggcactgtttgaggaagtccctgagttactcactgaggcagagaagaaggaatgggttgagaaactgactgaagtttctatcagctctgatgccttcttccctttccgagataacgtagacagagctaaaaggagtggtgtggcgtacattgcggctccctccggttctgctgctgacaaagttgtgattgaggcctgcgacgaactgggaatcatcctcgctcatacgaaccttcggctcttccaccactgattttaccacacactgttttttggcttgcttatgtgtaggtgaacagtcacgcctgaaactttgaggataactttttaaaaaaataaaacagtatctcttaa

SEQ ID NO: 421185 - DNA, 2461 bp, Homo sapiens
gctactcgggaggctgaggcaggataaactcttgaacccgggatgtggaggttgcaggttgcacgtgacatagccgagatcgcgccattgcactccagcctgggcaacaaaagcgaaactccatctcaaaaaaaaaaaaaaaaaacaaaaaaaacaaaaaaacccagaaaaacaaaaaaacaacaaacaaaaagggaggatggtagataactgtccagatactttccagctttgccgctatatgaactattccttttgtttagttttcagcatgggagcttctggcacttttacgtactttccagcttctggggaccggctgcctagaataacaggcatttgccccagaggccgtggagtggcctcactttggggtcgtgggcagatcgctggctcccacgcctggacttcgggatcgcaggcaggatcccttccagcccaagcactccgcccaggcgcgccaggcagagccccaccccatcccgccgttcccttcagccccggggcgcggatcttgcatctgaaactgagcagagcagggcgccgggcagggccggcgggccacgtgataagcccggaaacagctccgccccctcgcttcctgagccgccacatcccggcagccctcctacctgcgcacgtggtgccgccgctgctgcctcccgctcgccctgaacccagtgcctgcagccatggctcccggccagctcgccttatttagtgtctctgacaaaaccggccttgtggaatttgcaagaaacctgaccgctcttggtttgaatctggtcgcttccggagggactgcaaaagctctcagggatgctggtctggcagtcagagatgtctctgagttgacgggatttcctgaaatgttggggggacgtgtgaaaactttgcatcctgcagtccatgctggaatcctagctcgtaatattccagaagataatgctgacatggccagacttgatttcaatcttataagagttgttgcctgcaatctctatccctttgtaaagacagtggcttctccaggtgtaactgttgaggaggctgtggagcaaattgacattggtggagtaaccttactgagagctgcagccaaaaaccacgctcgagtgacagtggtgtgtgaaccagaggactatgtggtggtgtccacggagatgcagagctccgagagtaaggacacctccttggagactagacgccagttagccttgaaggcattcactcatacggcacaatatgatgaagcaatttcagattatttcaggaaacagtacagcaaaggcgtatctcagatgcccttgagatatggaatgaacccacatcagacccctgcccagctgtacacactgcagcccaagcttcccatcacagttctaaatggagcccctggatttataaacttgtgcgatgctttgaacgcctggcagctggtgaaggaactcaaggaggctttaggtattccagccgctgcctctttcaaacatgtcagcccagcaggtgctgctgttggaattccactcagtgaagatgaggccaaagtctgcatggtttatgatctctataaaaccctcacacccatctcagcggcatatgcaagagcaagaggggctgataggatgtcttcatttggtgattttgttgcattgtccgatgtttgtgatgtaccaactgcaaaaattatttccagagaagtatctgatggtataattgccccaggatatgaagaagaagccttgacaatactttccaaaaagaaaaatggaaactattgtgtccttcagatggaccaatcttacaaaccagatgaaaatgaagttcgaactctctttggtcttcatttaagccagaagagaaataatggtgtcgtcgacaagtcattatttagcaatgttgttaccaaaaataaagatttgccagagtctgccctccgagacctcatcgtagccaccattgctgtcaagtacactcagtctaactctgtgtgctacgccaagaacgggcaggttatcggcattggagcaggacagcagtctcgtatacactgcactcgccttgcaggagataaggcaaactattggtggcttagacaccatccacaagtgctttcgatgaagtttaaaacaggagtgaagagagcagaaatctccaatgccatcgatcaatatgtgactggaaccattggcgaggatgaagatttgataaagtggaaggcactgtttgaggaagtccctgagttactcactgaggcagagaagaaggaatgggttgagaaactgactgaagtttctatcagctctgatgccttcttccctttccgagataacgtagacagagctaaaagggggaggggggggggggacattgcgggttcctccggtcttttgtgacaaaattgtgattagggctgccacctggattctcgttataccctcgggtttttaccacgatttac

SEQ ID NO: 421186 - DNA, 2633 bp, Homo sapiens
gctactcgggaggctgaggcaggataaactcttgaacccgggatgtggaggttgcaggttgcacgtgacatagccgagatcgcgccattgcactccagcctgggcaacaaaagcgaaactccatctcaaaaaaaaaaaaaaaaaacaaaaaaaacaaaaaaacccagaaaaacaaaaaaacaacaaacaaaaagggaggatggtagataactgtccagatactttccagctttgccgctatatgaactattccttttgtttagttttcagcatgggagcttctggcacttttacgtactttccagcttctggggaccggctgcctagaataacaggcatttgccccagaggccgtggagtggcctcactttggggtcgtgggcagatcgctggctcccacgcctggacttcgggatcgcaggcaggatcccttccagcccaagcactccgcccaggcgcgccaggcagagccccaccccatcccgccgttcccttcagccccggggcgcggatcttgcatctgaaactgagcagagcagggcgccgggcagggccggcgggccacgtgataagcccggaaacagctccgccccctcgcttcctgagccgccacatcccggcagccctcctacctgcgcacgtggtgccgccgctgctgcctcccgctcgccctgaacccagtgcctgcagccatggctcccggccagctcgccttatttagtgtctctgacaaaaccggccttgtggaatttgcaagaaacctgaccgctcttggtttgaatctggtcgcttccggagggactgcaaaagctctcagggatgctggtctggcagtcagagatgtctctgagttgacgggatttcctgaaatgttggggggacgtgtgaaaactttgcatcctgcagtccatgctggaatcctagctcgtaatattccagaagataatgctgacatggccagacttgatttcaatcttataagatagctgtaaaccacatgagtggactttttaatgacagccagattcgtctttgttttatagagttgttgcctgcaatctctatccctttgtaaagacagtggcttctccaggtgtaactgttgaggaggctgtggagcaaattgacattggtggagtaaccttactgagagctgcagccaaaaaccacgctcgagtgacagtggtgtgtgaaccagaggactatgtggtggtgtccacggagatgcagagctccgagagtaaggacacctccttggagactagacgccagttagccttgaaggcattcactcatacggcacaatatgatgaagcaatttcagattatttcaggaaacagtacagcaaaggcgtatctcagatgcccttgagatatggaatgaacccacatcagacccctgcccagctgtacacactgcagcccaagcttcccatcacagttctaaatggagcccctggatttataaacttgtgcgatgctttgaacgcctggcagctggtgaaggaactcaaggaggctttaggtattccagccgctgcctctttcaaacatgtcagcccagcaggtgctgctgttggaattccactcagtgaagatgaggccaaagtctgcatggtttatgatctctataaaaccctcacacccatctcagcggcatatgcaagagcaagaggggctgataggatgtcttcatttggtgattttgttgcattgtccgatgtttgtgatgtaccaactgcaaaaattatttccagagaagtatctgatggtataattgccccaggatatgaagaagaagccttgacaatactttccaaaaagaaaaatggaaactattgtgtccttcagatggaccaatcttacaaaccagatgaaaatgaagttcgaactctctttggtcttcatttaagccagaagagaaataatggtgtcgtcgacaagtcattatttagcaatgttgttaccaaaaataaagatttgccagagtctgccctccgagacctcatcgtagccaccattgctgtcaagtacactcagtctaactctgtgtgctacgccaagaacgggcaggttatcggcattggagcaggacagcagtctcgtatacactgcactcgccttgcaggagataaggcaaactattggtggcttagacaccatccacaagtgctttcgatgaagtttaaaacaggagtgaagagagcagaaatctccaatgccatcgatcaatatgtgactggaaccattggcgaggatgaagatttgataaagtggaaggcactgtttgaggaagtccctgagttactcactgaggcagagaagaaggaatgggttgagaaactgactgaagtttctatcagctctgatgccttcttccctttccgagataacgtagacagagctaaaaggagtggtgtggcgtacattgcggctccctccggttctgctgctgacaaagttgtgattgaggcctgcgacgaactgggaatcatcctcgctcatacgaaccttcggctcttccaccactgattttaccacacactgttttttggcttgcttatgtgtaggtgaacagtcacgcctgaaactttgaggataactttttaaaaaaataaaacagtatctcttaa

SEQ ID NO: 421187 - DNA, 1868 bp, Homo sapiens
gctactcgggaggctgaggcaggataaactcttgaacccgggatgtggaggttgcaggttgcacgtgacatagccgagatcgcgccattgcactccagcctgggcaacaaaagcgaaactccatctcaaaaaaaaaaaaaaaaaacaaaaaaaacaaaaaaacccagaaaaacaaaaaaacaacaaacaaaaagggaggatggtagataactgtccagatactttccagctttgccgctatatgaactattccttttgtttagttttcagcatgggagcttctggcacttttacgtactttccagcttctggggaccggctgcctagaataacaggcatttgccccagaggccgtggagtggcctcactttggggtcgtgggcagatcgctggctcccacgcctggacttcgggatcgcaggcaggatcccttccagcccaagcactccgcccaggcgcgccaggcagagccccaccccatcccgccgttcccttcagccccggggcgcggatcttgcatctgaaactgagcagagcagggcgccgggcagggccggcgggccacgtgataagcccggaaacagctccgccccctcgcttcctgagccgccacatcccggcagccctcctacctgcgcacgtggtgccgccgctgctgcctcccgctcgccctgaacccagtgcctgcagccatggctcccggccagctcgccttatttagtgtctctgacaaaaccggccttgtggaatttgcaagaaacctgaccgctcttggtttgaatctggtcgcttccggagggactgcaaaagctctcagggatgctggtctggcagtcagagatgtctctgagttgacgggatttcctgaaatgttggggggacgtgtgaaaactttgcatcctgcagtccatgctggaatcctagctcgtaatattccagaagataatgctgacatggccagacttgatttcaatcttataagagttgttgcctgcaatctctatccctttgtaaagacagtggcttctccaggtgtaactgttgaggaggctgtggagcaaattgacattggtggagtaaccttactgagagctgcagccaaaaaccacgctcgagtgacagtggtgtgtgaaccagaggactatgtggtggtgtccacggagatgcagagctccgagagtaaggacacctccttggagactagacgccagttagccttgaaggcattcactcatacggcacaatatgatgaagcaatttcagattatttcaggaaacagtacagcaaaggcgtatctcagatgcccttgagatatggaatgaacccacatcagacccctgcccagctgtacacactgcagcccaagcttcccatcacagttctaaatggagcccctggatttataaacttgtgcgatgctttgaacgcctggcagctggtgaaggaactcaaggaggctttaggtattccagccgctgcctctttcaaacatgtcagcccagcaggtgctgctgttggaattccactcagtgaagatgaggccaaagtctgcatggtttatgatctctataaaaccctcacacccatctcagcggcatatgcaagagcaagaggggctgataggatgtcttcatttggtgattttgttgcattgtccgatgtttgtgatgtaccaactgcaaaaattatttccagagaagtatctgatggtataattgccccaggatatgaagaagaagccttgacaatactttccaaaaagaaaaatggaaactattgtgtccttcagatggacaatcttacaaccagatgaaatgagttcgaattcccttgggctcattaagcgaaagaaaccgggtcccccagc

SEQ ID NO: 421188 - DNA, 441 bp, Homo sapiens
gcgagctcggccgctgttcgcttagcagagccatcgagtcagtatgtgacggaaccatggcgaggatgaagatttgataaagtggaaggcactgtttgaggaagtccctgagttactcactgaggcagagaagaaggaatgggttgagaaactgactgaagtttctatcagctctgatgccttcttccctttccgagataacgtagacagagctaaaaggagtggtgtggcgtacattgcggctccctccggttctgctgctgacaaagttgtgattgaggcctgcgacgaactgggaatcatcctcgctcatacgaaccttcggctcttccaccactgattttaccacacactgttttttggcttgcttatgtgtaggtgaacagtcacgcctgaaactttgaggataactttttaaaaaaataaaacagtatctcttaa

SEQ ID NO: 421189 - DNA, 687 bp, Homo sapiens
atgaggaaactgtggcttagaggaaaaggtcattagttcattttgggatttgttgattttcagatgtttgagatgttgaggatggattgtccagcaggctattaagatgtggtgaaggctagaaatgttgatttaggaggtattgccttcgagaagataaaggaggagaagaggagagcatcatgcaagctagagaagagaaagaagaaaagtattctggggaatgtctcctttgggagcagaaagaagactctgacggagcagccatccaggaagtggaatgagatccaggagaggaaggagtttcagaaggcaggagctggtcctctatgtcatgaaatgtagagggtgaggccaaggaggacctgagagaaggtaattagatttggtgtttacaggctggtccctgggccagccaccccacccactttaaaatatttactctacaaatgttaatgtgtgaagagttgcatgccagaatatttatggcatcagtgttggtggatacagaacattgggaaacaacccattaatagcagaatggtaaatctggccagtgaatagtatagctttttaaaaggaggctgatgtctgaattcactttcaaagttgttcacaatgtattgctaaaatacaaaaatgttgcagaaccatatgtatgagagaaacccctttttctaaaaaaaa

SEQ ID NO: 421190 - DNA, 751 bp, Homo sapiens
aaacaggaaaagctattgtaattttttttgttttgtttttcgttctggctcgtggtgaaagatgtatttatcagacacatttcactagatttctaggaaatgaacatcagccataaagctgttcatgtgaatctatgttattctaattattgagagtctctgagggaaagtaaaaacagctctagaatttccatgactatcccgtgataaatggactatttgaacccagtgatgagtgacttgacttaaaattgcacatgttaatagaaaataaaagcaagctctatattattgtttttctataataaaagcatccataacacatatgcagaatatagagagatcctatccagaaaaaagtaagttaagcttagtaaataatgattgagcattaactgtataccatgcactgaattaggcaatctagataccaaattggaatgccagccagatagacaataaactaacaaaagaaaataaagtggccgggcgtggtggctcacgcctgtaatcccagcactttgggaggccgaggtaggcagatcacaaggtcagaagttcgagaccagcctgagcaacatggagaaaccctgtctctactaaaaatacgaaaattagccgggcatggtgacacgtgcctgtaatcccagctactcaggaggctgaggcaggagaatctctcaaacccaggaggcggaggttgcagtaagccgagatcgcgccactgcactccagcctgggtgacagagca

SEQ ID NO: 421191 - DNA, 845 bp, Homo sapiens
aaacaggaaaagctattgtaattttttttgttttgtttttcgttctggctcgtggtgaaagatgtatttatcagacacatttcactagatttctaggaaatgaacatcagccataaagctgttcatgtgaatctatgttattctaattattgagagaaaaattactgtttcaatttccatatagtagtatattttgtagattatgaatcatattattattattaagcattaatttagaaaacaaatattttcttgaaggaaactccagttatttctaaataatacaatgtaacatttctcttcaaaagattactttaaaatatgatatatttatatgtaaggagtctacagtcaattcaaaatgatacatattagcgagtaaataggaacaccttgggaaatattacatctacaattggataatttaataatcaaattttttgccaaatttttgccccaactctttctcatagagtatcgacactggctcttttgatttcacctcttgctatttctatcctcttcctggtacagtcactaaagagtaactgaatgacttaatgccaaaagaggtagccatgagaaggatgaaaagcattatcatgctctctcagagacaccacatcaaaggcagtgagaactctgtggtagccagcacattcacgaccagccatgttcaagcggaaaatagggcatcattgctcccttccgttattgaatgaggctacctttgctctattgctgtacgtttccaactacattttcagggcttattcattcatgccataagtaaatatagtgaaacttaaagcattgattatgtaccatggagaaaagaaataagg

SEQ ID NO: 421192 - DNA, 4300 bp, Homo sapiens
  misc_feature (2410)..(2410): n is a, c, g, or t
cgagcaagtggaatgtgtacaagagggagttaccatggaaacagcatattctcctggtaaccagaatggagttttggacttttttttccagaagccatctggatttctcaccttattggatgaagaaagtcaaatgatttggtcagtggaatcaaattttccaaaaaaactacaaagtctcctagaatcctcaaacacaaatgcggtgtactcccccatgaaggatgggaatgggaatgttgccctcaaagaccacggtacagccttcaccatcatgcactacgcaggaagggtaatgtatgatgttgttggggcgattgaaaaaaataaagactccctttcacagaatcttctatttgtaatgaaaactagtgaaaatgtcgtgatcaatcatttgttccagtcgaaattgtcacaaacaggatccctcgtatctgcctatccttcctttaaattccgaggacataagtctgccctgctcagtaagaaaatgacagcttcttcaattattggagaaaacaagaattatctagaacttagtaagttattaaaaaagaaaggaacttctacatttcttcaaagattggaacgaggagatccagtcaccatagcatcacaactcaggaaatcactaatggatattattggaaaacttcagaagtgcactccacacttcattcattgcatcaggcccaataactcaaagctgccagatacttttgataatttttacgtgtctgctcagctacaatatattggggtcctggagatggtgaagatcttccgatatggataccctgttcgcctttccttctcggatttcctgtcaaggtataagccactggctgatacattcctgcgtgagaagaaggaacagtcagctgccgagcgatgtcgacttgttctccagcagtgtaaattacaaggctggcagatgggagtccgaaaagtgtttctaaaatactggcatgctgaccaactcaatgatttgtgcctacagttgcagagaaaaattataacctgccaaaaagttatcagaggatttttagcacgccagcacctgcttcagagaataagcatcagacaacaagaggtgacttctatcaatagctttctgcagaacacagaggacatggggctgaaaacctacgatgccctggtcattcagaatgcttcagacattgcccgggaaaatgaccggctccgtagtgaaatgaacgctccctaccataaagagaagttagaggtcaggaacatgcaagaggaaggaagcaaaagaaccgatgacaagagtggacccaggcatttccaccccagctccatgtcagtctgcgcggccgtggatggcctgggccagtgcctcgttggcccgtccatctggtctccttcgctgcactcggtgttcagcatggatgacagcagcagcctcccgtctccacggaaacagcccccgcccaagccaaagagggaccccaacacccggctgagtgcttcctatgaggctgtgagcgcctgcctctccgcggccagggaagcggccaacgaagctctggcccggcccagaccgcacagcgacgactacagcaccatgaagaagattcctcctcgaaagcccaagcgcagccccaacaccaagctcagcggctcctacgaggagatatcggggtcccggcccggggacgcgaggcccgcgggcgccccgggggcagcagcgcgcgttctgacccccgggactccgcagtgcgcgctgcccccggcggcgcctccgggtgacgaggacgacagcgagcctgtgtacatcgagatgctggggcacgcggccaggcccgatagcccggaccccggggagtccgtgtacgaggagatgaagtgttgcctgcccgacgacggcggcccgggcgcgggctccttcctgctccacggcgcatcgccgcccctgctccaccgcgcgccggaggacgaggcggcggggcccccaggggacgcgtgcgacatcccgccgcccttccccaacctgctgccgcaccggccgcccctgctggtgttccccccgacccccgtcacctgctcccccgcctccgacgagtcgcccctgacacccctggaggtgaagaagctgccagtcctggagaccaacctcaagtaccccgtgcagccggaggggtcgagcccgctgtccccgcagtactccaagagccagaagggcgacggcgacaggcccgcgtcccccggcctggcgctgttcaacgggtccggccgagcctccccgccgtccacgccgcccccgcccccgcccccgcccgggccgccccccgcgccctacaggccctgcgcgcacttggccttcccgccggagcccgccccggtgaacgcggggaaagcggggccgagcgcagaggcgcccaaggtncacccaaagccaaactctgcccccgtggccgggccctgcagctccttccccaagatcccatattcccccgtgaaggccaccagggcggacgccaggaaggccggctccagtgcctcgccccccgcgccctacagccctcccagctccaggcctctcagcagccccctggacgagctcgccagcctcttcaactcggggaggagtgtgcttcggaaatccgcggcgggaagaaaaatcagggaagccgaaggttttgaaactaacatgaacataagtagccgagatgaccctagtacgtcagaaattacttccgagactcaagacagaaatgcaaataaccatggaattcagttatctaattcactatctagtgctataactgctgaaaatggaaattccatctcaaatggtttacctgaagaagatggatactcacggttgtctataagtggcacagggacttcgacatttcaaagacacagggacagtcacaccactcaggtaatccatcagctgaggctctcagagaatgaaagtgtggccctgcaggaactcttggactggaggagaaagctctgtgaggaaggacaagactggcagcagatcctgcaccacgctgagcccagggtgcctcccccaccaccttgcaagaagcccagccttctgaagaagccggaaggggcctcctgcaacaggctgccgtctgagctctgggacaccaccatttgatgtggcctgaactgcagacttacaaaatagaactgcctactgattccgggctgcaacaacagaaggctgccttctgacatgcgctggggcttctctccacgcatttagacaaaaaaagcacaggacacagacactaaatatatgagatcccgtgtgtgtgtgtgtgtgtttgtgtgtgtgtgtgtgggttctttcttatccatctcgtggtgatacactctgattttcaagctcctcatttacggctctgtgctacccctaggtagcaagagagaggctgggaaaagtgtggacgtggccagagcgagagagtagcggaggaaaggagcaatccatgcacactctgtacagttgtttttctacggttcaacagtctgtttattgtacttccaatggttttattataatacagtatacgggacatatattttatttctttgtagctacttgtgttttattggtattataaacctgataattatttacatgtttattactgtaattttataaatttatgcaattggtggtgcttcctttcttcaaaatacagattttaaaaaatcatttctagattatttttttcctccacagtccttttttttcacctaacgcacctaaatcttgaaactacattgttgttttagcttcgccagtgtcaccccttgcaaaactatgaattgagccccatgttttaggtgttactcatggatgaggaggctgttctttcctatgccctgtatttctggataagtggattgtgtaccctttagttaaatttcacctcccgacttcagcatagatcacaggaaatcacatggcacacggttaaacacgtatggcttcaaatccatagccggtggtgtaaaatgatcatattcattcaaaggcctacacagtacaaatgagcacgctgccatgtactggtttgagcagtaggggctgcatcgcacagcgctcgtcccccgggacttacactgcatgattccctcgctgtatatcctcaaccctcccataatgcaaggccttgttcattgatgtgctttcgtcggctgtcggaaagttctgagcagtggctccagaccaccttgtcttgctacttggaactttttattcataccagcctttgaaaagttactgtgccaataaagaggtacaactgtg

SEQ ID NO: 421193 - DNA, 1660 bp, Homo sapiens
cgagcaagtggaatgtgtacaagagggagttaccatggaaacagcatattctcctggtaaccagaatggagttttggacttttttttccagaagccatctggatttctcaccttattggatgaagaaagtcaaatgatttggtcagtggaatcaaattttccaaaaaaactacaaagtctcctagaatcctcaaacacaaatgcggtgtactcccccatgaaggatgggaatgggaatgttgccctcaaagaccacggtacagccttcaccatcatgcactacgcaggaagggtaatgtatgatgttgttggggcgattgaaaaaaataaagactccctttcacagaatcttctatttgtaatgaaaactagtgaaaatgtcgtgatcaatcatttgttccagtcgaaattgtcacaaacaggatccctcgtatctgcctatccttcctttaaattccgaggacataagtctgccctgctcagtaagaaaatgacagcttcttcaattattggagaaaacaagaattatctagaacttagtaagttattaaaaaagaaaggaacttctacatttcttcaaagattggaacgaggagatccagtcaccatagcatcacaactcaggaaatcactaatggatattattggaaaacttcagaagtgcactccacacttcattcattgcatcaggcccaataactcaaagctgccagatacttttgataatttttacgtgtctgctcagctacaatatattggggtcctggagatggtgaagatcttccgatatggataccctgttcgcctttccttctcggatttcctgtcaaggtataagccactggctgatacattcctgcgtgagaagaaggaacagtcagctgccgagcgatgtcgacttgttctccagcagtgtaaattacaaggctggcagatgggagtccgaaaagtgtttctaaaatactggcatgctgaccaactcaatgatttgtgcctacagttgcagagaaaaattataacctgccaaaaagttatcagaggatttttagcacgccagcacctgcttcagagaataagcatcagacaacaagaggtgacttctatcaatagctttctgcagaacacagaggacatggggctgaaaacctacgatgccctggtcattcagaatgcttcagacattgcccgggaaaatgaccggctccgtagtgaaatgaacgctccctaccataaagagaagttagaggtcaggaacatgcaagaggaaggaagcaaaagaaccgatgacaagagtggacccaggcatttccaccccagctccatgtcagtctgcgcggccgtggatggcctgggccagtgcctcgttggcccgtccatctggtctccttcgctgcactcggtgttcagcatggatgacagcagcagcctcccgtctccacggaaacagcccccgcccaagccaaagagggaccccaacacccggctgagtgcttcctatgaggctgtgagcgcctgcctctccgcggccagggaagcggccaacgaaggtcagccctggggagggacccagcctcgtgttccgggctcgcgcatgctctgacttcgccttggggcgcccatggcagtactgtcgccctaatgtattcttaatagaaataaa

SEQ ID NO: 421194 - DNA, 287 bp, Homo sapiens
catgcctgcctaatttttgtatttttagtagagatggggtttcaccatggtggccaggctggtttcaaactcctgacctcaggtgatccgccagcctcagcctcccaaagtgtcgggattacagctgtgagccaccgtgccctgcctcttcctcacttttgaaagacactgttgccagatattgacttcttggttgactgtttttgtttttgttttgagaccgtttctggctctgttgcactccagcctgggtgacagagcgagactccatctcaaaaaaaaaaaaa

SEQ ID NO: 421195 - DNA, 2113 bp, Homo sapiens
tcccagcgcccgcccctctagcggatcacatggccggagagtcacaaaaacaacagctttggccaagaccgtgacttcagtaaagggaacccggggctctcgcagccagccctcctgcccatggaggacagtttccttcaatcttttgggaggctgagcctccagccccagcagcagcagcagcggcagcggccgccccggccgcccccgcgggggacacctcctcgccgccacagctttaggaaacacctctacctcctgcgaggcctcccgggctccgggaaaactacactggccagacaattgcagcatgactttcccagggccctgattttcagcacggatgattttttcttcagggaagatggtgcctatgagttcaatcctgacttcctggaggaagctcatgaatggaaccaaaaaagagcaagaaaagcaatgaggaatggcatatcccccattattattgataataccaacctccacgcctgggaaatgaagccctatgcagtcatggtatttcagaccgaacaaaagaatcttttcaggctggaaatggacatggtagttttcaggccagaaatgaagaaacattcatggtgtctcaagagaaaaaatccaccgaatgaaagaacggtatgaacacgatgttacttttcacagtgtgcttcatgcagaaaagccaagcagaatgaacagaaaccaggacaggaataatgcattgccttccaacaatgccagatactggaattcctacacagagtttccaaaccggagggcccacggtggatttacaaatgagagctcctatcacagaaggggcggttgtcaccatggatattagaggcctatcttacagccaggcagaattttcctaagtcagtttctacttcagtttttgttattttttgttgcattttagtcagagctccaattccagtgtaaatagctgaactcaaaagtttctgagcaaagtcattatattcactttcttcaccaaaatttgttaaagtgcttctatatgcatggtctgatgctgggaattctgcagatttgagtaaacagtctctttctctagggtaagaatttgaaaccaaaacttgagaacacacccaagaatatatttacataggttcatagatgaaataaagtgtttatattatatataagcttcagtaccatttgctctgaagtgatctatttattttttcaggaaattcatctccatcggtaaagttgggaaggtggagagaagtggtgggggggcattgctacttatcaaagtgccattgctactttgataatctatgtatctaaaaatgtgagatgtgcgactcttatgatactgattttcctttaatgttaatatgccagaaagcatacatctaagggaacattgtccttcaaagtagacactttgggaagttatttctttattttaatgatgtatcattgttaaaaatgctgtcaaatccttaatagctacaggagctactgagggaaatcagtgtcattatttaaagtcacgccttgtgtttttactactttattcagcaggattaaacctgaataacttttggctgttgtgctaatagtgtaaataaaataagcctgccttcataaaacactaacttttaaaaggaataaacgacttctaaaattatgcctattaacatgtgtaattagtcggcagctcaaatgtttgggagtgcaagaaattaggcaccccaggatataggtcatacagggatatataaaagccatgctcattacaaaatgagcagttgatgttttatgtggcattaagacaatcaagtcctcacaactctggaatgtcttcttatactgatgctgaatttatgaatccaaattaatttccaacaggttggaatcagatttaatgtgagatcatgatagacaagaccacagaggacgtatgctctatttcttgttggccaacagcttctttctaatgttctgtgaaaaattattttaagtgtcttatataatggtgcttttatggttattaaaaattgtaaatggtatcacatttatatggatttgtcattggatctttttttggttcaacaataaaaaaatttaattacctaaa

SEQ ID NO: 421196 - DNA, 2111 bp, Homo sapiens
atgctcagaatggagcagtggacaaaggagacaaaaatccctgccttcatggaacatgtattctatcagagaaaaaaaattctcaaggaaaaaaggcaattttagcatctgctctgctctgttctctcaaaaaataagcaaaggatttcacagtgttctaggtacttgggaatcatcagtgaacaaaacaaagatcctgcccttgtggaccttatgtgccagaggctcctgaccaccataaagatagaactggggcttaaccctcatcacttctgaagctgatggaatgacaattgcagcatgactttcccagggccctgattttcagcacggatgattttttcttcagggaagatggtgcctatgagttcaatcctgacttcctggaggaagctcatgaatggaaccaaaaaagagcaagaaaagcaatgaggaatggcatatcccccattattattgataataccaacctccacgcctgggaaatgaagccctatgcagtcatggcacttgaaaataactatgaagttatattccgagaacctgacactcgctggaaattcaacgttcaagagttagcaagaagaaacattcatggtgtctcaagagaaaaaatccaccgaatgaaagaacggtatgaacacgatgttacttttcacagtgtgcttcatgcagaaaagccaagcagaatgaacagaaaccaggacaggaataatgcattgccttccaacaatgccagatactggaattcctacacagagtttccaaaccggagggcccacggtggatttacaaatgagagctcctatcacagaaggggcggttgtcaccatggatattagaggcctatcttacagccaggcagaattttcctaagtcagtttctacttcagtttttgttattttttgttgcattttagtcagagctccaattccagtgtaaatagctgaactcaaaagtttctgagcaaagtcattatattcactttcttcaccaaaatttgttaaagtgcttctatatgcatggtctgatgctgggaattctgcagatttgagtaaacagtctctttctctagggtaagaatttgaaaccaaaacttgagaacacacccaagaatatatttacataggttcatagatgaaataaagtgtttatattatatataagcttcagtaccatttgctctgaagtgatctatttattttttcaggaaattcatctccatcggtaaagttgggaaggtggagagaagtggtgggggggcattgctacttatcaaagtgccattgctactttgataatctatgtatctaaaaatgtgagatgtgcgactcttatgatactgattttcctttaatgttaatatgccagaaagcatacatctaagggaacattgtccttcaaagtagacactttgggaagttatttctttattttaatgatgtatcattgttaaaaatgctgtcaaatccttaatagctacaggagctactgagggaaatcagtgtcattatttaaagtcacgccttgtgtttttactactttattcagcaggattaaacctgaataacttttggctgttgtgctaatagtgtaaataaaataagcctgccttcataaaacactaacttttaaaaggaataaacgacttctaaaattatgcctattaacatgtgtaattagtcggcagctcaaatgtttgggagtgcaagaaattaggcaccccaggatataggtcatacagggatatataaaagccatgctcattacaaaatgagcagttgatgttttatgtggcattaagacaatcaagtcctcacaactctggaatgtcttcttatactgatgctgaatttatgaatccaaattaatttccaacaggttggaatcagatttaatgtgagatcatgatagacaagaccacagaggacgtatgctctatttcttgttggccaacagcttctttctaatgttctgtgaaaaattattttaagtgtcttatataatggtgcttttatggttattaaaaattgtaaatggtatcacatttatatggatttgtcattggatctttttttggttcaacaataaaaaaatttaattacctaaa

SEQ ID NO: 421197 - DNA, 354 bp, Homo sapiens
tcccagcgcccgcccctctagcggatcacatggccggagagtcacaaaaacaacagctttggccaagaccgtgacttcagtaaagggaacccggggctctcgcagccagccctcctgcccatggaggacagtttccttcaatcttttgggaggctgagcctccagccccagcagcagcagcagcggcagcggccgccccggccgcccccgcgggggacacctcctcgccgccacagctttaggaaacacctctacctcctgcgaggcctcccgggctccgggaaaactacactggccagagacagtatggagtttccagaccatagtagacatttgctacagtgtctgagcgag

SEQ ID NO: 421198 - DNA, 2545 bp, Homo sapiens
  misc_feature (630)..(630): n is a, c, g, or t
atcttggcttggacttggtcctttaaaaggatgcatttaacattctgctaaaatgcttcttcatcaaggaacatttaaaagcactttatctgcatgggactgcacatgtcaatggtgtttttgcatttaggctaaagatctttagaggttgagcagtctgcgattcatttatgatctagatgctgcttctaatttataaagcaataaatgttcaaataatactaacttgttgattgaatgcatgggttcagatattctctgtctgtattatttgataatgtcattgacttaaaatagccagtgaggtaagaatttacttcttaggagtaaggctggttcctcttatggtaataggcagatagtgtcttcaaagtggatctgtggactactccatcagaattgcctcaggtggctattaaaatccgagttcatggaccccattcagtagttggaatctctggtaattatatttctaactatatccccagttgattcttctgcccactagaatttaagattgttttaataagtatctcctagaaatatatctcagggactgattaacataagtagatagatatatgcatgacattaacaggcaaatgtatgattttttaaaaatctcatggngttcttttatgtcttgaagcacgtaattgagaggaccagaaacaaagcatttctgaagctttagctccttgctagcctcagggtggtttgggggtgtgcagggcagcatgaaaaacatgagtggaggctgaaagagaactgctgaacaagatgtttgttatgcttttgccagagctaggtcctgagaacagggactgcaatatctgcaatactagaggacttgtaaaatataagtaactcattgtggtatcctgccttaactaaatgcattttttttccatgtagaagaaacattcatggtgtctcaagagaaaaaatccaccgaatgaaagaacggtatgaacacgatgttacttttcacagtgtgcttcatgcagaaaagccaagcagaatgaacagaaaccaggacaggaataatgcattgccttccaacaatgccagatactggaattcctacacagagtttccaaaccggagggcccacggtggatttacaaatgagagctcctatcacagaaggggcggttgtcaccatggatattagaggcctatcttacagccaggcagaattttcctaagtcagtttctacttcagtttttgttattttttgttgcattttagtcagagctccaattccagtgtaaatagctgaactcaaaagtttctgagcaaagtcattatattcactttcttcaccaaaatttgttaaagtgcttctatatgcatggtctgatgctgggaattctgcagatttgagtaaacagtctctttctctagggtaagaatttgaaaccaaaacttgagaacacacccaagaatatatttacataggttcatagatgaaataaagtgtttatattatatataagcttcagtaccatttgctctgaagtgatctatttattttttcaggaaattcatctccatcggtaaagttgggaaggtggagagaagtggtgggggggcattgctacttatcaaagtgccattgctactttgataatctatgtatctaaaaatgtgagatgtgcgactcttatgatactgattttcctttaatgttaatatgccagaaagcatacatctaagggaacattgtccttcaaagtagacactttgggaagttatttctttattttaatgatgtatcattgttaaaaatgctgtcaaatccttaatagctacaggagctactgagggaaatcagtgtcattatttaaagtcacgccttgtgtttttactactttattcagcaggattaaacctgaataacttttggctgttgtgctaatagtgtaaataaaataagcctgccttcataaaacactaacttttaaaaggaataaacgacttctaaaattatgcctattaacatgtgtaattagtcggcagctcaaatgtttgggagtgcaagaaattaggcaccccaggatataggtcatacagggatatataaaagccatgctcattacaaaatgagcagttgatgttttatgtggcattaagacaatcaagtcctcacaactctggaatgtcttcttatactgatgctgaatttatgaatccaaattaatttccaacaggttggaatcagatttaatgtgagatcatgatagacaagaccacagaggacgtatgctctatttcttgttggccaacagcttctttctaatgttctgtgaaaaattattttaagtgtcttatataatggtgcttttatggttattaaaaattgtaaatggtatcacatttatatggatttgtcattggatctttttttggttcaacaataaaaaaatttaattacctaaatgccaagaaactcaacaatataccagtttttctgtatcacaggcttatttaccagtcttttttttaataaataggaatcgtaaaggtaatgacaaaagcagc

SEQ ID NO: 421199 - DNA, 2654 bp, Homo sapiens
  misc_feature (630)..(630): n is a, c, g, or t
atcttggcttggacttggtcctttaaaaggatgcatttaacattctgctaaaatgcttcttcatcaaggaacatttaaaagcactttatctgcatgggactgcacatgtcaatggtgtttttgcatttaggctaaagatctttagaggttgagcagtctgcgattcatttatgatctagatgctgcttctaatttataaagcaataaatgttcaaataatactaacttgttgattgaatgcatgggttcagatattctctgtctgtattatttgataatgtcattgacttaaaatagccagtgaggtaagaatttacttcttaggagtaaggctggttcctcttatggtaataggcagatagtgtcttcaaagtggatctgtggactactccatcagaattgcctcaggtggctattaaaatccgagttcatggaccccattcagtagttggaatctctggtaattatatttctaactatatccccagttgattcttctgcccactagaatttaagattgttttaataagtatctcctagaaatatatctcagggactgattaacataagtagatagatatatgcatgacattaacaggcaaatgtatgattttttaaaaatctcatggngttcttttatgtcttgaagcacgtaattgagaggaccagaaacaaagcatttctgaagctttagctccttgctagcctcagggtggtttgggggtgtgcagggcagcatgaaaaacatgagtggaggctgaaagagaactgctgaacaagatgtttgttatgcttttgccagagctaggtcctgagaacagggactgcaatatctgcaatactagaggacttgtaaaatataagtaactcattgtggtatcctgccttaactaaatgcattttttttccatgtagaagaaacattcatggtgtctcaagagaaaaaatccaccgaatgaaagaacggtatgaacacgatgttacttttcacagtgtgcttcatgcagaaaagccaagcagaatgaacagaaaccaggacaggaataatgcattgccttccaacaatgccagatactggaattcctacacagagtttccaaaccggagggcccacggtggatttacaaatgagagctcctatcacagaaggggcggttgtcaccatggatattagaggcctatcttacagccaggcagaattttcctaagtcagtttctacttcagtttttgttattttttgttgcattttagtcagagctccaattccagtgtaaatagctgaactcaaaagtttctgagcaaagtcattatattcactttcttcaccaaaatttgttaaagtgcttctatatgcatggtctgatgctgggaattctgcagatttgagtaaacagtctctttctctagggtaagaatttgaaaccaaaacttgagaacacacccaagaatatatttacataggttcatagatgaaataaagtgtttatattatatataagcttcagtaccatttgctctgaagtgatctatttattttttcaggaaattcatctccatcggtaaagttgggaaggtggagagaagtggtgggggggcattgctacttatcaaagtgccattgctactttgataatctatgtatctaaaaatgtgagatgtgcgactcttatgatactgattttcctttaatgttaatatgccagaaagcatacatctaagggaacattgtccttcaaagtagacactttgggaagttatttctttattttaatgatgtatcattgttaaaaatgctgtcaaatccttaatagctacaggagctactgagggaaatcagtgtcattatttaaagtcacgccttgtgtttttactactttattcagcaggattaaacctgaataacttttggctgttgtgctaatagtgtaaataaaataagcctgccttcataaaacactaacttttaaaaggaataaacgacttctaaaattatgcctattaacatgtgtaattagtcggcagctcaaatgtttgggagtgcaagaaattaggcaccccaggatataggtcatacagggatatataaaagccatgctcattacaaaatgagcagttgatgttttatgtggcattaagacaatcaagtcctcacaactctggaatgtcttcttatactgatgctgaatttatgaatccaaattaatttccaacaggttggaatcagatttaatgtgagatcatgatagacaagaccacagaggacgtatgctctatttcttgttggccaacagcttctttctaatgttctgtgaaaaattattttaagtgtcttatataatggtgcttttatggttattaaaaattgtaaatggtatcacatttatatggatttgtcattggatctttttttggttcaacaataaaaaaatttaattacctaaaaaaaaaaataccaccaccataaacccactcaatcacactcacttttaaaaaaaaccatgtggcccgcttgggcccaagcgattttagacttgacaaagtttatcgcatgcggcggaatttggggctaactggcccaattcgccttatagggggccgaatcacaattcatgggcccgcggtcttacaatcccctttttgcaggttggccgaa

SEQ ID NO: 421200 - DNA, 2784 bp, Homo sapiens
  misc_feature (869)..(869): n is a, c, g, or t
tcccagcgcccgcccctctagcggatcacatggccggagagtcacaaaaacaacagctttggccaagaccgtgacttcagtaaagggaacccggggctctcgcagccagccctcctgcccatggaggacagtttccttcaatcttttgggaggctgagcctccagccccagcagcagcagcagcggcagcggccgccccggccgcccccgcgggggacacctcctcgccgccacagctttaggaaacacctctacctcctgcgaggcctcccgggctccgggaaaactacactggccagacaattgcagcatgactttcccagggccctgattttcagcacggatgattttttcttcagggaagatggtgcctatgagttcaatcctgacttcctggaggaagctcatgaatggaaccaaaaaagagcaagaaaagcaatgaggaatggcatatcccccattattattgataataccaacctccacgcctgggaaatgaagccctatgcagtcatggcacttgaaaataactatgaagttatattccgagaacctgacactcgctggaaattcaacgttcaagagttagcaaggcagatagtgtcttcaaagtggatctgtggactactccatcagaattgcctcaggtggctattaaaatccgagttcatggaccccattcagtagttggaatctctggtaattatatttctaactatatccccagttgattcttctgcccactagaatttaagattgttttaataagtatctcctagaaatatatctcagggactgattaacataagtagatagatatatgcatgacattaacaggcaaatgtatgattttttaaaaatctcatggngttcttttatgtcttgaagcacgtaattgagaggaccagaaacaaagcatttctgaagctttagctccttgctagcctcagggtggtttgggggtgtgcagggcagcatgaaaaacatgagtggaggctgaaagagaactgctgaacaagatgtttgttatgcttttgccagagctaggtcctgagaacagggactgcaatatctgcaatactagaggacttgtaaaatataagtaactcattgtggtatcctgccttaactaaatgcattttttttccatgtagaagaaacattcatggtgtctcaagagaaaaaatccaccgaatgaaagaacggtatgaacacgatgttacttttcacagtgtgcttcatgcagaaaagccaagcagaatgaacagaaaccaggacaggaataatgcattgccttccaacaatgccagatactggaattcctacacagagtttccaaaccggagggcccacggtggatttacaaatgagagctcctatcacagaaggggcggttgtcaccatggatattagaggcctatcttacagccaggcagaattttcctaagtcagtttctacttcagtttttgttattttttgttgcattttagtcagagctccaattccagtgtaaatagctgaactcaaaagtttctgagcaaagtcattatattcactttcttcaccaaaatttgttaaagtgcttctatatgcatggtctgatgctgggaattctgcagatttgagtaaacagtctctttctctagggtaagaatttgaaaccaaaacttgagaacacacccaagaatatatttacataggttcatagatgaaataaagtgtttatattatatataagcttcagtaccatttgctctgaagtgatctatttattttttcaggaaattcatctccatcggtaaagttgggaaggtggagagaagtggtgggggggcattgctacttatcaaagtgccattgctactttgataatctatgtatctaaaaatgtgagatgtgcgactcttatgatactgattttcctttaatgttaatatgccagaaagcatacatctaagggaacattgtccttcaaagtagacactttgggaagttatttctttattttaatgatgtatcattgttaaaaatgctgtcaaatccttaatagctacaggagctactgagggaaatcagtgtcattatttaaagtcacgccttgtgtttttactactttattcagcaggattaaacctgaataacttttggctgttgtgctaatagtgtaaataaaataagcctgccttcataaaacactaacttttaaaaggaataaacgacttctaaaattatgcctattaacatgtgtaattagtcggcagctcaaatgtttgggagtgcaagaaattaggcaccccaggatataggtcatacagggatatataaaagccatgctcattacaaaatgagcagttgatgttttatgtggcattaagacaatcaagtcctcacaactctggaatgtcttcttatactgatgctgaatttatgaatccaaattaatttccaacaggttggaatcagatttaatgtgagatcatgatagacaagaccacagaggacgtatgctctatttcttgttggccaacagcttctttctaatgttctgtgaaaaattattttaagtgtcttatataatggtgcttttatggttattaaaaattgtaaatggtatcacatttatatggatttgtcattggatctttttttggttcaacaataaaaaaatttaattacctaaatgccaagaaactcaacaatataccagtttttctgtatcacaggcttatttaccagtcttttttttaataaataggaatcgtaaaggtaatgacaaaagcagc

SEQ ID NO: 421201 - DNA, 2126 bp, Homo sapiens
tcccagcgcccgcccctctagcggatcacatggccggagagtcacaaaaacaacagctttggccaagaccgtgacttcagtaaagggaacccggggctctcgcagccagccctcctgcccatggaggacagtttccttcaatcttttgggaggctgagcctccagccccagcagcagcagcagcggcagcggccgccccggccgcccccgcgggggacacctcctcgccgccacagctttaggaaacacctctacctcctgcgaggcctcccgggctccgggaaaactacactggccagacaattgcagcatgactttcccagggccctgattttcagcacggatgattttttcttcagggaagatggtgcctatgagttcaatcctgacttcctggaggaagctcatgaatggaaccaaaaaagaggtatttcagaccgaacaaaagaatcttttcaggctggaaatggacatggtagttttcaggccagaaatgaagaaacattcatggtgtctcaagagaaaaaatccaccgaatgaaagaacggtatgaacacgatgttacttttcacagtgtgcttcatgcagaaaagccaagcagaatgaacagaaaccaggacaggaataatgcattgccttccaacaatgccagatactggaattcctacacagagtttccaaaccggagggcccacggtggatttacaaatgagagctcctatcacagaaggggcggttgtcaccatggatattagaggcctatcttacagccaggcagaattttcctaagtcagtttctacttcagtttttgttattttttgttgcattttagtcagagctccaattccagtgtaaatagctgaactcaaaagtttctgagcaaagtcattatattcactttcttcaccaaaatttgttaaagtgcttctatatgcatggtctgatgctgggaattctgcagatttgagtaaacagtctctttctctagggtaagaatttgaaaccaaaacttgagaacacacccaagaatatatttacataggttcatagatgaaataaagtgtttatattatatataagcttcagtaccatttgctctgaagtgatctatttattttttcaggaaattcatctccatcggtaaagttgggaaggtggagagaagtggtgggggggcattgctacttatcaaagtgccattgctactttgataatctatgtatctaaaaatgtgagatgtgcgactcttatgatactgattttcctttaatgttaatatgccagaaagcatacatctaagggaacattgtccttcaaagtagacactttgggaagttatttctttattttaatgatgtatcattgttaaaaatgctgtcaaatccttaatagctacaggagctactgagggaaatcagtgtcattatttaaagtcacgccttgtgtttttactactttattcagcaggattaaacctgaataacttttggctgttgtgctaatagtgtaaataaaataagcctgccttcataaaacactaacttttaaaaggaataaacgacttctaaaattatgcctattaacatgtgtaattagtcggcagctcaaatgtttgggagtgcaagaaattaggcaccccaggatataggtcatacagggatatataaaagccatgctcattacaaaatgagcagttgatgttttatgtggcattaagacaatcaagtcctcacaactctggaatgtcttcttatactgatgctgaatttatgaatccaaattaatttccaacaggttggaatcagatttaatgtgagatcatgatagacaagaccacagaggacgtatgctctatttcttgttggccaacagcttctttctaatgttctgtgaaaaattattttaagtgtcttatataatggtgcttttatggttattaaaaattgtaaatggtatcacatttatatggatttgtcattggatctttttttggttcaacaataaaaaaatttaattacctaaatgccaagaaactcaacaatataccagtttttctgtatcacaggcttatttaccagtcttttttttaataaataggaatcgtaaaggtaatgacaaaagcagc

SEQ ID NO: 421202 - DNA, 1208 bp, Homo sapiens
tcccagcgcccgcccctctagcggatcacatggccggagagtcacaaaaacaacagctttggccaagaccgtgacttcagtaaagggaacccggggctctcgcagccagccctcctgcccatggaggacagtttccttcaatcttttgggaggctgagcctccagccccagcagcagcagcagcggcagcggccgccccggccgcccccgcgggggacacctcctcgccgccacagctttaggaaacacctctacctcctgcgaggcctcccgggctccgggaaaactacactggccagacaattgcagcatgactttcccagggccctgattttcagcacggatgattttttcttcagggaagatggtgcctatgagttcaatcctgacttcctggaggaagctcatgaatggaaccaaaaaagagcaagaaaagcaatgaggaatggcatatcccccattattattgataataccaacctccacgcctgggaaatgaagccctatgcagtcatggcacttgaaaataactatgaagttatattccgagaacctgacactcgctggaaattcaacgttcaagagttagcaagaagaaacattcatggtgtctcaagagaaaaaatccaccgaatgaaagaacggtatgaacacgatgttacttttcacagtgtgcttcatgcagaaaagccaagcagaatgaacagaaaccaggacaggaataatgcattgccttccaacaatgccagatactggaattcctacacagagtttccaaaccggagggcccacggtggatttacaaatgagagctcctatcacagaaggggcggttgtcaccatggatattagaggcctatcttacagccaggcagaatttggaatcagatttaatgtgagatcatgatagacaagaccacagaggacgtatgctctatttcttgttggccaacagcttctttctaatgttctgtgaaaaattattttaagtgtcttatataatggtgcttttatggttattaaaaattgtaaatggtatcacatttatatggatttgtcattggatctttttttggttcaacaataaaaaaatttaattacctaaatgccaagaaactcaacaatataccagtttttctgtatcacaggcttatttaccagtcttttttttaataaataggaatcgtaaaggtaatgacaaaagcagc

SEQ ID NO: 421203 - DNA, 849 bp, Homo sapiens
  misc_feature (1)..(1): n is a, c, g, or t
natgatacgattcgagctcgtacccgaaatggaacgaacaaagtagacactttgggaagttatttctttattttaatgatgtatcattgttaaaaatgctgtcaaatccttaatagctacaggagctactgagggaaatcagtgtcattatttaaagtcacgccttgtgtttttactactttattcagcaggattaaacctgaataacttttggctgttgtgctaatagtgtaaataaaataagcctgccttcataaaacactaacttttaaaaggaataaacgacttctaaaattatgcctattaacatgtgtaattagtcggcagctcaaatgtttgggagtgcaagaaattaggcaccccaggatataggtcatacagggatatataaaagccatgctcattacaaaatgagcagttgatgttttatgtggcattaagacaatcaagtcctcacaactctggaatgtcttcttatactgatgctgaatttatgaatccaaattaatttccaacaggttggaatcagatttaatgtgagatcatgatagacaagaccacagaggacgtatgctctatttcttgttggccaacagcttctttctaatgttctgtgaaaaattattttaagtgtcttatataatggtgcttttatggttattaaaaattgtaaatggtatcacatttatatggatttgtcattggatctttttttggttcaacaataaaaaaatttaattacctaaatgccaagaaactcaacaatataccagtttttctgtatcacaggcttatttaccagtcttttttttaataaataggaatcgtaaaggtaatgacaaaagcagc

SEQ ID NO: 421204 - DNA, 1332 bp, Homo sapiens
tcccagcgcccgcccctctagcggatcacatggccggagagtcacaaaaacaacagctttggccaagaccgtgacttcagtaaagggaacccggggctctcgcagccagccctcctgcccatggaggacagtttccttcaatcttttgggaggctgagcctccagccccagcagcagcagcagcggcagcggccgccccggccgcccccgcgggggacacctcctcgccgccacagctttaggaaacacctctacctcctgcgaggcctcccgggctccgggaaaactacactggccagggacgactggagtgagcactggcctgggagtctgaagattgtgccttcagacctacttcgtcacttactagctggcgactttggtcagtcatctagtttttccgggccttatgttccttacatgtgactactaaaaggctactagattataggatttattaaagatccttctgactcttaatttccagtggtcagattaaaaatagtttgctaataatggctatgttaaagagctctgaccttggagtcaatttatggctccacatccaagctctaccattcactagttttgcttttcacccaacccctctgtgcctcggtttccttttctgttaaatggggatatctgttctgtttgcctctgagggttttgtgaacattaaatgtgtgtgggaggactttttaaacttaaagtgctatatacattttaagaggtgttagttactgctccgttgttggtcagctgagataaatcttcagtgttccctggatcctggctctggagtgaagaaggtagcttggcagttgactttgagtcctcccgtttcgctgggcattggcagttctgggagcagagcagccttggcatgccatggggtggattgtgtgtttatagaaaagtctgggacgtaagcgaggaaatgggccacagctcagcggaagggaggccggtggtgaggatggaatggtggagaggcaggctcaggtgtggcccaccaggagctgccttccccacttttttgggaggtagggtggggaagaagaaaagagcaaattgtttaaaaatacacatgtatatagaaaatagtaaaactgtaaggttatctgtgtgttgttggattctgggaaattcacattttctctattctctgtattttccaaattttctataacgaatatgtatttcttagaataaaaatttttttcttcaaaatttggaggaaatcgctttttacaaatgtgggttcatctttttctgcttaaccttttttctcatttgattaaagaactaataaaaatgtttttgaaatta

SEQ ID NO: 421205 - DNA, 1194 bp, Homo sapiens
tcccagcgcccgcccctctagcggatcacatggccggagagtcacaaaaacaacagctttggccaagaccgtgacttcagtaaagggaacccggggctctcgcagccagccctcctgcccatggaggacagtttccttcaatcttttgggaggctgagcctccagccccagcagcagcagcagcggcagcggccgccccggccgcccccgcgggggacacctcctcgccgccacagctttaggaaacacctctacctcctgcgaggcctcccgggctccgggaaaactacactggccagacaattgcagcatgactttcccagggccctgattttcagcacggatgattttttcttcagggaagatggtgcctatgagttcaatcctgacttcctggaggaagctcatgaatggaaccaaaaaagagcaagaaaagcaatgaggaatggcatatcccccattattattgataataccaacctccacgcctgggaaatgaagccctatgcagtcatggcacttgaaaataactatgaagttatattccgagaacctgacactcgctggaaattcaacgttcaagagttagcaagaagaaacattcatggtgtctcaagagaaaaaatccaccgaatgaaagaacggtatgaacacgatgttacttttcacagtgtgcttcatgcagaaaagccaagcagaatgaacagaaaccaggacaggaataatgcattgccttccaacaatgccagatactggaattcctacacagagtttccaaaccggagggcccacggtggatttacaaatgagagctcctatcacagaaggggcggttgtcaccatggatattagaggcctatcttacagccaggcagaattttcctaagtcagtttctacttcagtttttgttattttttgttgcattttagtcagagctccaattccagtgtaaatagctgaactcaaaagtttctgagcaaagtcattatattcactttcttcaccaaaatttgttaaagtgcttctatatgcatggtctgatgctgggaattctgcagatttgagtaaacagtctctttctctagggtaagaatttgaaaccaaaacttgagaacacacccaagaatgggggggcataggttcattgaaaaaaccccccgtaaatattatatattagctacagttctatctgc

SEQ ID NO: 421206 - DNA, 1032 bp, Homo sapiens
tggggctggaggctcagcctcccaaaagattgaaggaaactgtcctccatgggcaggagggctggctgcgagagccccgggttccctttactgaagtcacggtcttggccaaagctgttgtttttgtgactctccggccatgtgattataggatttattaaagatccttctgactcttaatttccagtggtcagattaaaaatagtttgctaataatggctatgttaaagagctctgaccttggagtcaatttatggctccacatccaagctctaccattcactagttttgcttttcacccaacccctctgtgcctcggtttccttttctgttaaatggggatatctgttctgtttgcctctgagggttttgtgaacattaaatgtgtgtgggaggactttttaaacttaaagtgctatatacattttaagaggtgttagttactgctccgttgttggtcagctgagataaatcttcagtgttccctggatcctggctctggagtgaagaaggtagcttggcagttgactttgagtcctcccgtttcgctgggcattggcagttctgggagcagagcagccttggcatgccatggggtggattgtgtgtttatagaaaagtctgggacgtaagcgaggaaatgggccacagctcagcggaagggaggccggtggtgaggatggaatggtggagaggcaggctcaggtgtggcccaccaggagctgccttccccacttttttgggaggtagggtggggaagaagaaaagagcaaattgtttaaaaatacacatgtatatagaaaatagtaaaactgtaaggttatctgtgtgttgttggattctgggaaattcacattttctctattctctgtattttccaaattttctataacgaatatgtatttcttagaataaaaatttttttcttcaaaatttggaggaaatcgctttttacaaatgtgggttcatctttttctgcttaaccttttttctcatttgattaaagaactaataaaaatgtttttgaaatta

SEQ ID NO: 421207 - DNA, 1209 bp, Homo sapiens
tgctgtcttcatggtactgctgaagatcatgatcacggagaaaagtcagagtgctcagtgccaacccaagggattctttccagagacgtacccgttggataccaaaattagtttggataatctgttcaaccattcttgataagttatctgaataataaaaaaactcaacagaggagggacgactggagtgagcactggcctgggagtctgaagattgtgccttcagacctacttcgtcacttactagctggcgactttggtcagtcatctagtttttccgggccttatgttccttacatgtgactactaaaaggctactagattataggatttattaaagatccttctgactcttaatttccagtggtcagattaaaaatagtttgctaataatggctatgttaaagagctctgaccttggagtcaatttatggctccacatccaagctctaccattcactagttttgcttttcacccaacccctctgtgcctcggtttccttttctgttaaatggggatatctgttctgtttgcctctgagggttttgtgaacattaaatgtgtgtgggaggactttttaaacttaaagtgctatatacattttaagaggtgttagttactgctccgttgttggtcagctgagataaatcttcagtgttccctggatcctggctctggagtgaagaaggtagcttggcagttgactttgagtcctcccgtttcgctgggcattggcagttctgggagcagagcagccttggcatgccatggggtggattgtgtgtttatagaaaagtctgggacgtaagcgaggaaatgggccacagctcagcggaagggaggccggtggtgaggatggaatggtggagaggcaggctcaggtgtggcccaccaggagctgccttccccacttttttgggaggtagggtggggaagaagaaaagagcaaattgtttaaaaatacacatgtatatagaaaatagtaaaactgtaaggttatctgtgtgttgttggattctgggaaattcacattttctctattctctgtattttccaaattttctataacgaatatgtatttcttagaataaaaatttttttcttcaaaatttggaggaaatcgctttttacaaatgtgggttcatctttttctgcttaaccttttttctcatttgattaaagaactaataaaaatgtttttgaaatta

SEQ ID NO: 421208 - DNA, 506 bp, Homo sapiens
ttaaaattacatgcaatgtctgactttctcagtgagtgactgactggctgaagagatatctaaatatatctctatggttctctattattaaataaagaattacacaaaagaataagttgtgaaatcaagattagcccctgagtttctcttataatagtgattttaaatgaatttgagcgggggttgtgggaggtgaaggttatatggaattaattatctttctattttttcccttttattttcattctctcaatttccctaatgcatgaggctcctgaccaccataaagatagaactggggcttaaccctcatcacttctgaagctgatggaatggtatttattgcttccacttaagtttgagaatctcaagattgtctatttaatcagttctttatttagctagtagagtttttattgtcctgcctattcaacatgctactatggctgctagtgctaatttaacatttaggtggagataaaacaagttttgaagtcattcaggaa

SEQ ID NO: 421209 - DNA, 602 bp, Homo sapiens
gaagttatattccgagaacctgacactcgctggaaattcaacgttcaagagttagcaaggtacttctttgtttttctagttcctcattatgtatcctgctattttcaggtatttcagaccgaacaaaagaatcttttcaggctggaaatggacatggtagttttcaggccagaaatggtaattcttggaaattgataactttggaattattaatgtgaagactttagttttgggtcagttttctaatataatgctaaatgctaaatcttggcttggacttggtcctttaaaaggatgcatttaacattctgctaaaatgcttcttcatcaaggaacatttaaaagcactttatctgcatgggactgcacatgtcaatggtgtttttgcatttaggctaaagatctttagaggttgagcagtctgcgattcatttatgatctagatgctgcttctaatttataaagcaataaatgttcaaataatactaacttgttgattgaatgcatgggttcagatattctctgtctgtattatttgataatgtcattgacttaaaatagccagtgaggtaagaatttacttcttaggagtaaggctggtt

SEQ ID NO: 421210 - DNA, 2604 bp, Homo sapiens
tcccagcgcccgcccctctagcggatcacatggccggagagtcacaaaaacaacagctttggccaagaccgtgacttcagtaaagggaacccggggctctcgcagccagccctcctgcccatggaggacagtttccttcaatcttttgggaggctgagcctccagccccagcagcagcagcagcggccgtggcagtggcccggggctggcagcccgctttgaaaatctggcgaagtcggggagcctgcgtttgctttggcagctgcgaaggcgcacaggtgcacgggggcggggggctggctggcggcgccaccaccgaccgtcactgacagagcctcgccatgggcgcccaaattcgttcacttgcgaattgcgtaagcggccctccggtacccaacctctgggaattacgcgggcttgtgcctgtggccaccttgctaggccccaccgctccagcctgaactcccaccgctccctgccttgcgcttgatgttccagcaacttcgaactgtttttatctcctgtaaaccaagccgcttctctccttgacgctggccttcctgcctggcttgccctcccgccttcttttgccttttaagaccgggcagctatcccaccccgccagtatatgcccctcttctgggctccttggcttcctgtttatacctacgtgactgtgcttacttttttgcacatggtttttcttatccttctgtaagtttcttgaaggtaggagccatgtcttaccctgccaagcacattgtctggcacgtagtagctgttcagtagaggaagtggtccctttccctcaaagggcttcccgtctcactggagagataaggctagccatggtaccaaggaactgccgaagaatcaaggtgatggacagtcacgtgcggatttcgatggtgccgagatagtgaccttaggaggagggacagcctggggaggtgctcctggttgactcgcggagtagaagcttttggccagaatattgctacattttcacaaattgcagggacatgtgacttctggaggaccgtgggcaccctttcctaaaccagggacacatttcaatagaccctctctggctcgctggggaggggaggtggaggacagaggcagagtcggggagcctccttggaactcagcagttggttattttgtgatacagtcatggtgggtaaatctgttaccaaccaagtatcttctgaatgtcaaatcctgtttaatttcactttcgctttgctgatctgtggcctgcctcatactgagtgtcaaagagacactgagtgtcaaagaaggaagtaaacgtctttggccagatttaatttctgactctgttgggaagcgaagtaacatgatgggtgcaagatacacagaatggaacatcaggggcttggattcacattcctcatctgtgaagccagggcgttgcctgagtggtccttagggtcctttctggctctaacattctgcacttttaggattttaattcctgattgacatttggctaagcagaagacaccggatgagagaacacctattacagaccatctctctctctctagggacgactggagtgagcactggcctgggagtctgaagattgtgccttcagacctacttcgtcacttactagctggcgactttggtcagtcatctagtttttccgggccttatgttccttacatgtgactactaaaaggctactagattataggatttattaaagatccttctgactcttaatttccagtggtcagattaaaaatagtttgctaataatggctatgttaaagagctctgaccttggagtcaatttatggctccacatccaagctctaccattcactagttttgcttttcacccaacccctctgtgcctcggtttccttttctgttaaatggggatatctgttctgtttgcctctgagggttttgtgaacattaaatgtgtgtgggaggactttttaaacttaaagtgctatatacattttaagaggtgttagttactgctccgttgttggtcagctgagataaatcttcagtgttccctggatcctggctctggagtgaagaaggtagcttggcagttgactttgagtcctcccgtttcgctgggcattggcagttctgggagcagagcagccttggcatgccatggggtggattgtgtgtttatagaaaagtctgggacgtaagcgaggaaatgggccacagctcagcggaagggaggccggtggtgaggatggaatggtggagaggcaggctcaggtgtggcccaccaggagctgccttccccacttttttgggaggtagggtggggaagaagaaaagagcaaattgtttaaaaatacacatgtatatagaaaatagtaaaactgtaaggttatctgtgtgttgttggattctgggaaattcacattttctctattctctgtattttccaaattttctataacgaatatgtatttcttagaataaaaatttttttcttcaaaatttggaggaaatcgctttttacaaatgtgggttcatctttttctgcttaaccttttttctcatttgattaaagaactaataaaaatgtttttgaaatta

SEQ ID NO: 421211 - DNA, 2223 bp, Homo sapiens
tcccagcgcccgcccctctagcggatcacatggccggagagtcacaaaaacaacagctttggccaagaccgtgacttcagtaaagggaacccggggctctcgcagccagccctcctgcccatggaggacagtttccttcaatcttttgggaggctgagcctccagccccagcagcagcagcagcggcagcggccgccccggccgcccccgcgggggacacctcctcgccgccacagctttaggaaacacctctacctcctgcgaggcctcccgggctccgggaaaactacactggccagacaattgcagcatgactttcccagggccctgattttcagcacggatgattttttcttcagggaagatggtgcctatgagttcaatcctgacttcctggaggaagctcatgaatggaaccaaaaaagagcaagaaaagcaatgaggaatggcatatcccccattattattgataataccaacctccacgcctgggaaatgaagccctatgcagtcatggcacttgaaaataactatgaagttatattccgagaacctgacactcgctggaaattcaacgttcaagagttagcaagaagaaacattcatggtgtctcaagagaaaaaatccaccgaatgaaagaacggtatgaacacgatgttacttttcacagtgtgcttcatgcagaaaagccaagcagaatgaacagaaaccaggacaggaataatgcattgccttccaacaatgccagatactggaattcctacacagagtttccaaaccggagggcccacggtggatttacaaatgagagctcctatcacagaaggggcggttgtcaccatggatattagaggcctatcttacagccaggcagaattttcctaagtcagtttctacttcagtttttgttattttttgttgcattttagtcagagctccaattccagtgtaaatagctgaactcaaaagtttctgagcaaagtcattatattcactttcttcaccaaaatttgttaaagtgcttctatatgcatggtctgatgctgggaattctgcagatttgagtaaacagtctctttctctagggtaagaatttgaaaccaaaacttgagaacacacccaagaatatatttacataggttcatagatgaaataaagtgtttatattatatataagcttcagtaccatttgctctgaagtgatctatttattttttcaggaaattcatctccatcggtaaagttgggaaggtggagagaagtggtgggggggcattgctacttatcaaagtgccattgctactttgataatctatgtatctaaaaatgtgagatgtgcgactcttatgatactgattttcctttaatgttaatatgccagaaagcatacatctaagggaacattgtccttcaaagtagacactttgggaagttatttctttattttaatgatgtatcattgttaaaaatgctgtcaaatccttaatagctacaggagctactgagggaaatcagtgtcattatttaaagtcacgccttgtgtttttactactttattcagcaggattaaacctgaataacttttggctgttgtgctaatagtgtaaataaaataagcctgccttcataaaacactaacttttaaaaggaataaacgacttctaaaattatgcctattaacatgtgtaattagtcggcagctcaaatgtttgggagtgcaagaaattaggcaccccaggatataggtcatacagggatatataaaagccatgctcattacaaaatgagcagttgatgttttatgtggcattaagacaatcaagtcctcacaactctggaatgtcttcttatactgatgctgaatttatgaatccaaattaatttccaacaggttggaatcagatttaatgtgagatcatgatagacaagaccacagaggacgtatgctctatttcttgttggccaacagcttctttctaatgttctgtgaaaaattattttaagtgtcttatataatggtgcttttatggttattaaaaattgtaaatggtatcacatttatatggatttgtcattggatctttttttggttcaacaataaaaaaatttaattacctaaatgccaagaaactcaacaatataccagtttttctgtatcacaggcttatttaccagtcttttttttaataaataggaatcgtaaaggtaatgacaaaagcagc

SEQ ID NO: 421212 - DNA, 2169 bp, Homo sapiens
tcccagcgcccgcccctctagcggatcacatggccggagagtcacaaaaacaacagctttggccaagaccgtgacttcagtaaagggaacccggggctctcgcagccagccctcctgcccatggaggacagtttccttcaatcttttgggaggctgagcctccagccccagcagcagcagcagcggcagcggccgccccggccgcccccgcgggggacacctcctcgccgccacagctttaggaaacacctctacctcctgcgaggcctcccgggctccgggaaaactacactggccagacaattgcagcatgactttcccagggccctgattttcagcacggatgattttttcttcagggaagatggtgcctatgagttcaatcctgacttcctggaggaagctcatgaatggaaccaaaaaagagcaagaaaagcaatgaggaatggcatatcccccattattattgataataccaacctccacgcctgggaaatgaagccctatgcagtcatggcacttgaaaataactatgaagttatattccgagaacctgacactcgctggaaattcaacgttcaagagttagcaagaagaaacattcatggtgtctcaagagaaaaaatccaccgaatgaaagaacggtatgaacacgatgttacttttcacagtgtgcttcatgcagaaaagccaagcagaatgaacagaaaccaggacaggaataatgcattgccttccaacaatgccagatactggaattcctacacagagtttccaaaccggagggcccacggtggatttacaaatgagagctcctatcacagaaggggcggttgtcaccatggatattagaggcctatcttacagccaggcagaattttcctaagtcagtttctacttcagtttttgttattttttgttgcattttagtcagagctccaattccagtgtaaatagctgaactcaaaagtttctgagcaaagtcattatattcactttcttcaccaaaatttgttaaagtgcttctatatgcatggtctgatgctgggaattctgcagatttgagtaaacagtctctttctctagggtaagaatttgaaaccaatgtttatattatatataagcttcagtaccatttgctctgaagtgatctatttattttttcaggaaattcatctccatcggtaaagttgggaaggtggagagaagtggtgggggggcattgctacttatcaaagtgccattgctactttgataatctatgtatctaaaaatgtgagatgtgcgactcttatgatactgattttcctttaatgttaatatgccagaaagcatacatctaagggaacattgtccttcaaagtagacactttgggaagttatttctttattttaatgatgtatcattgttaaaaatgctgtcaaatccttaatagctacaggagctactgagggaaatcagtgtcattatttaaagtcacgccttgtgtttttactactttattcagcaggattaaacctgaataacttttggctgttgtgctaatagtgtaaataaaataagcctgccttcataaaacactaacttttaaaaggaataaacgacttctaaaattatgcctattaacatgtgtaattagtcggcagctcaaatgtttgggagtgcaagaaattaggcaccccaggatataggtcatacagggatatataaaagccatgctcattacaaaatgagcagttgatgttttatgtggcattaagacaatcaagtcctcacaactctggaatgtcttcttatactgatgctgaatttatgaatccaaattaatttccaacaggttggaatcagatttaatgtgagatcatgatagacaagaccacagaggacgtatgctctatttcttgttggccaacagcttctttctaatgttctgtgaaaaattattttaagtgtcttatataatggtgcttttatggttattaaaaattgtaaatggtatcacatttatatggatttgtcattggatctttttttggttcaacaataaaaaaatttaattacctaaatgccaagaaactcaacaatataccagtttttctgtatcacaggcttatttaccagtcttttttttaataaataggaatcgtaaaggtaatgacaaaagcagc

SEQ ID NO: 421213 - DNA, 3028 bp, Homo sapiens
tcccagcgcccgcccctctagcggatcacatggccggagagtcacaaaaacaacagctttggccaagaccgtgacttcagtaaagggaacccggggctctcgcagccagccctcctgcccatggaggacagtttccttcaatcttttgggaggctgagcctccagccccagcagcagcagcagcggccgtggcagtggcccggggctggcagcccgctttgaaaatctggcgaagtcggggagcctgcgtttgctttggcagctgcgaaggcgcacaggtgcacgggggcggggggctggctggcggcgccaccaccgaccgtcactgacagagcctcgccatgggcgcccaaattcgttcacttgcgaattgcgtaagcggccctccggtacccaacctctgggaattacgcgggcttgtgcctgtggccaccttgctaggccccaccgctccagcctgaactcccaccgctccctgccttgcgcttgatgttccagcaacttcgaactgtttttatctcctgtaaaccaagccgcttctctccttgacgctggccttcctgcctggcttgccctcccgccttcttttgccttttaagaccgggcagctatcccaccccgccagtatatgcccctcttctgggctccttggcttcctgtttatacctacgtgactgtgcttacttttttgcacatggtttttcttatccttctgtaagtttcttgaaggtaggagccatgtcttaccctgccaagcacattgtctggcacgtagtagctgttcagtagaggaagtggtccctttccctcaaagggcttcccgtctcactggagagataaggctagccatggtaccaaggaactgccgaagaatcaaggtgatggacagtcacgtgcggatttcgatggtgccgagatagtgaccttaggaggagggacagcctggggaggtgctcctggttgactcgcggagtagaagcttttggccagaatattgctacattttcacaaattgcagggacatgtgacttctggaggaccgtgggcaccctttcctaaaccagggacacatttcaatagaccctctctggctcgctggggaggggaggtggaggacagaggcagagtcggggagcctccttggaactcagcagttggttattttgtgatacagtcatggtgggtaaatctgttaccaaccaagtatcttctgaatgtcaaatcctgtttaatttcactttcgctttgctgatctgtggcctgcctcatactgagtgtcaaagagacactgagtgtcaaagaaggaagtaaacgtctttggccagatttaatttctgactctgttgggaagcgaagtaacatgatgggtgcaagatacacagaatggaacatcaggggcttggattcacattcctcatctgtgaagccagggcgttgcctgagtggtccttagggtcctttctggctctaacattctgcacttttaggattttaattcctgattgacatttggctaagcagaagacaccggatgagagaacacctattacagaccatctctctctctctagggacgactggagtgagcactggcctgggagtctgaagattgtgccttcagacctacttcgtcacttactagctggcgactttggtcagtcatctagtttttccgggccttatgttccttacatgtgactactaaaaggctactagattataggatttattaaagatccttctgactcttaatttccagtggtcagattaaaaatagtttgctaataatggctatgttaaagagctctgaccttggagtcaatttatggctccacatccaagctctaccattcactagttttgcttttcacccaacccctctgtgcctcggtttccttttctgttaaatggggatatctgttctgtttgcctctgagggttttgtgaacattaaatgtgtgtgggaggactttttaaacttaaagtgctatatacattttaagaggtgttagttactgctccgttgttggtcagctgagataaatcttcagtgttccctggatcctggctctggagtgaagaaggtagcttggcagttgactttgagtcctcccgtttcgctgggcattggcagttctgggagcagagcagccttggcatgccatggggtggattgtgtgtttatagaaaagtctgggacgtaagcgaggaaatgggccacagctcagcggaagggaggccggtggtgaggatggaatggtggagaggcaggctcaggtgtggcccaccaggagctgccttccccacttttttgggaggtagggtggggaagaagaaaagagcaaattgtttaaaaatacacatgtatatagaaaatagtaaaactgtaaggttatctgtgtgttgttggattctgggaaattcacattttctctattctctgtattttccaaattttctataacgaatatgtatttcttagaataaaaatttttttcttcaaaatttggaggaaatcgctttttacaaatgtgggttcatctttttctgcttaaccttttttctcatttgattaaagaactaataaaaatgtttttgaaattaagatatgtcttgtctcccaaatcaatgttagatttctgtgctttttacatgttttcatagtttgaagtggatggaatgtggaaaaacatctatttaaattctttgaatttattttttaaaagttggagttttaactgattaaattttttgagcacatcaaagtactgacaaattagcatgtgccctaaatctgctttatcacccgtgtttcatttaaaaagcatattacagataggttcttaccactgacctataagctctacttccaggaattcatcctaagaaataattggagggtggagcggtggctcatgcctgtaatcccagcactttgggaggccgaggtgggtgtccactgagtacttataagacctttagcacttgtttagggaagcatatgccaaataagcatatgagaaggcgc

SEQ ID NO: 421214 - DNA, 1585 bp, Homo sapiens
tcccagcgcccgcccctctagcggatcacatggccggagagtcacaaaaacaacagctttggccaagaccgtgacttcagtaaagggaacccggggctctcgcagccagccctcctgcccatggaggacagtttccttcaatcttttgggaggctgagcctccagccccagcagcagcagcagcggcagcggccgccccggccgcccccgcgggggacacctcctcgccgccacagctttaggaaacacctctacctcctgcgaggcctcccgggctccgggaaaactacactggccagacaattgcagcatgactttcccagggccctgattttcagcacggatgattttttcttcagggaagatggtgcctatgagttcaatcctgacttcctggaggaagctcatgaatggaaccaaaaaagaggtgacaaattccttcccaaactcctgggaaaccctgatgtgcacatagattgtagctgctgcagaatgaataaattttatggaaggagtttaaccgaaagttctgccaatttttcccccaaaacagaacaccagagcataacctccttagattccagagaaagaaaattattgattgatagtgggctctgaagttgtgtgatgaggagatgagggcatcctgtaataaaaatgacgaatagagattacgctcaccttccctctgattgttgcatgttgttcactgttatgtaacattgtgttgcagcaagaaaagcaatgaggaatggcatatcccccattattattgataataccaacctccacgcctgggaaatgaagccctatgcagtcatggtaggaagaagtatcattctgaattttcagttatggacattttgtgagaaagttgaagcatctgttctttcctctttttctgatgttccatgatttcatatttgctaacagtggttctcccagggagaaggtaacgaggttttattttagtgtttctctgctgttcaatggctgaagtttgctgagatgctaatctcacttgaggatacaatttaaaaatagtccttggcaaatggtctttggtgtgaatccttgataacttttctgtcttaattactttcctacggcaaggcatacagagaagcacccaccgaaatgttcagatcaatactaatactgaattagatggcgctcgtagtggagctacaggtcacaacaggacggttctgcctctggtgagccgggaatttccacactgtgtgctgttgctccctgggagttccagggcaacagaatattttagtctaaagacagatttagggccaggtgtggtggctcacgcctgtaatcccagcaatttggggggccgaggtgggcggatcacttgagtccaggagttcgagaccagcctggccaccatggtgaaaacccatctctactaaaaatacaaaaatagccggggcatggtggcgggcgcctgtagtcccagctactggggagtctgaggcaggagaatggcgtgaacccgggaggtggagcttgcagtgagctgagatcgtgccactgcactccagcctgggtgaaagagcgagactctgtctca

SEQ ID NO: 421215 - DNA, 972 bp, Homo sapiens
tcccagcgcccgcccctctagcggatcacatggccggagagtcacaaaaacaacagctttggccaagaccgtgacttcagtaaagggaacccggggctctcgcagccagccctcctgcccatggaggacagtttccttcaatcttttgggaggctgagcctccagccccagcagcagcagcagcggcagcggccgccccggccgcccccgcgggggacacctcctcgccgccacagctttaggaaacacctctacctcctgcgaggcctcccgggctccgggaaaactacactggccagacaattgcagcatgactttcccagggccctgattttcagcacggatgattttttcttcagggaagatggtgcctatgagttcaatcctgacttcctggaggaagctcatgaatggaaccaaaaaagagcaagaaaagcaatgaggaatggcatatcccccattattattgataataccaacctccacgcctgggaaatgaagccctatgcagtcatggcacttgaaaataactatgaagttatattccgagaacctgacactcgctggaaattcaacgttcaagagttagcaagaagaaacattcatggtgtctcaagagaaaaaatccaccgaatgaaagaacgggaatcagatttaatgtgagatcatgatagacaagaccacagaggacgtatgctctatttcttgttggccaacagcttctttctaatgttctgtgaaaaattattttaagtgtcttatataatggtgcttttatggttattaaaaattgtaaatggtatcacatttatatggatttgtcattggatctttttttggttcaacaataaaaaaatttaattacctaaatgccaagaaactcaacaatataccagtttttctgtatcacaggcttatttaccagtcttttttttaataaataggaatcgtaaaggtaatgacaaaagcagc

SEQ ID NO: 421216 - DNA, 827 bp, Homo sapiens
  misc_feature (86)..(87): n is a, c, g, or t
  misc_feature (89)..(89): n is a, c, g, or t
  misc_feature (100)..(100): n is a, c, g, or t
  misc_feature (102)..(102): n is a, c, g, or t
  misc_feature (117)..(117): n is a, c, g, or t
  misc_feature (134)..(134): n is a, c, g, or t
tcggccctcctgttggcacgcgcagatgtggattagcaagcaggagtacgacgagtcgggcccctccatcgtccaccgcaaatgcnncnaaacggactcngnagatgcgtagcattngctgcatgggttaattnagaatagaaatttgcccctggcaaatgcacacacctcatgctagcctcacgaaactggaataagccttcgaaaagaaattgtccttgaagcttgtatctgatatcagcactggattgtagaacttgttgctgattttgaccttgtattgaagttaactgttccccttatttgtttaataccctgtacatatctttgagttcaacctttagtacgtgtggcttggtcacttcgtggctaaggtaagaacgtgcttgtggaagacaagtctgtggcttggtgagtctgtgtggccagccagcctctgatctgtgcagggtattaacgtgtcagggctgagtgttctgggatttctctagaggctggcaagaaccagttgttttgtcttgcgggtctgtcagggttggaaagtccaagccgtaggacccagtttcctttcttagctgatgtctttggccagaacaccgtgggctgttacttgctttgagttggaagcggtttgcatttacgcctgtaaatgtattcattcttaatttatgtaaggttttttttgtacgcaattctcgattctttgaagagatgacaacaaattttggttttctactgttatgtgagaacattaggccccagcaacacgtcattgtgtaaggaaaaataaaagtgctgccgtaaccaaaaaaaaaaaaacatataac

SEQ ID NO: 421217 - DNA, 1123 bp, Homo sapiens
gcttctctcctcttccccttcttctctctctcctctcctcttttccgttcccctcctcgttccttatctccttctcgtctttttccttcgctccgctccttgcgctccttgcgtcccgccccgtccccctccttctcttcgctttctgcctgtttctttctgtttttgctttcccttcgttccctgtcttcccttttctctctctcttctcttttttcctttttgttcccctcttgtctctctcttttctctgtcctcctcttgcttttgtgttgctctttttctctctcttctcttttgtcctccttctcttcttcctttcctcgttctttttttttcttcttcttgtttctcttgctctctttctctttctgtctgtttttccgtcctctttcctttctctctctctttctgttctttttgcttcttctcctcttcttttcctctcctttctctcttgctcttctgtctttctcgtttgccttgtatcctcttctttctctcgtcccctctctctcttcctgtctcgtctgcttgtccctccttctcccttcttctcttcctcttcccctccgcttttcttttttgttctttctcttcttctctctctttctcctcttgctcccctccttcttcctctcctgtctcttttctctgggtcgtttttctttctcttcttctctttttctcttttttcctcgttttgctcctgtgctccgtgttttctttttcttcttgttgttgttttctttttctcttgtcgtgtggttgttgttttcgttttgttggtttggtttctttttttctttcttttttctgtgtgtgtgtgtgtttgttgtttttttttgtcttgttcttttctctttttgcttgctgtttcttctctggttttgtgtgcccccccgccgccccccccccccccccccttttttttttttttttttttttttttttttttttttttatgtaaggttttttttgtacgcaattctcgattctttgaagagatgacaacaaattttggttttctactgttatgtgagaacattaggccccagcaacacgtcattgtgtaaggaaaaataaaagtgctgccgtaaccaaaaaaaaaaaaacatataac

SEQ ID NO: 421218 - DNA, 679 bp, Homo sapiens
  misc_feature (86)..(87): n is a, c, g, or t
  misc_feature (89)..(89): n is a, c, g, or t
  misc_feature (100)..(100): n is a, c, g, or t
  misc_feature (102)..(102): n is a, c, g, or t
  misc_feature (117)..(117): n is a, c, g, or t
  misc_feature (134)..(134): n is a, c, g, or t
tcggccctcctgttggcacgcgcagatgtggattagcaagcaggagtacgacgagtcgggcccctccatcgtccaccgcaaatgcnncnaaacggactcngnagatgcgtagcattngctgcatgggttaattnagaatagaaatttgcccctggcaaatgcacacacctcatgctagcctcacgaaactggaataagccttcgaaaagaaattgtccttgaagcttgtatctgatatcagcactggattgtagaacttgttgctgattttgaccttgtattgaagttaactgttccccttggtattaacgtgtcagggctgagtgttctgggatttctctagaggctggcaagaaccagttgttttgtcttgcgggtctgtcagggttggaaagtccaagccgtaggacccagtttcctttcttagctgatgtctttggccagaacaccgtgggctgttacttgctttgagttggaagcggtttgcatttacgcctgtaaatgtattcattcttaatttatgtaaggttttttttgtacgcaattctcgattctttgaagagatgacaacaaattttggttttctactgttatgtgagaacattaggccccagcaacacgtcattgtgtaaggaaaaataaaagtgctgccgtaaccaaaaaaaaaaaaacatataac

SEQ ID NO: 421219 - DNA, 1232 bp, Homo sapiens
ttttttttaacattcatccctaagcgctctgctctctactaagagctctttggatcaacattagattttaatcacatttttagcctcaaaaaactgggaagcaataaaaccaagttgctgatctctatttgcaatgtcattaaaataatccttaacaattctggtttaggtaataaatgcttataattttttttctcctagatatgggtcacctccaggtagattacagagataacaggctgcacccaagtgaagattcttcactggactccattgcctcagttgtggttcccataattatatgcctctctattataatagcattcctattcatcaatcagaagaaacagtggataccactgctttgctggtatcgaacaccaactaaggtactgtcttgcaaaagttagtctcttgaatgatgaatctaggaaaacttacactcatattgaaattgcttgaaaccttgtgtcttaaccagtgaagtttttactttgctcttcatagcctcaaatccataccaggctatagtatgaatcaaatacatagtacttgcccagggctggactgatcacaaggtgaattatccattatccattggttaatgaagcctaaccttacatggatccagttttctcgatgtactctgaagttttcaaatgaacaaatactcctggatttattcctaaatcattgtttatattagacattaaaacgtgatcacctggcatttcttagtcatcagtcaacttagaattgggagagaaaaaaagtcccaaagggatggagataatactcaggagagggctggaagatcatgagggtatacaaaaggcaaaaggaacaggtcagtgcaccaaaggcaagcaccaagtggaaaggtcgcaaaagatgaagaggtggtggaaagtaatagtagacaaggtagggagaggcagatttcacactaagggagaaaagatgtatgtttgttttcagtacaaacataaagggcctctaaatctgcctattttgaaagacaagaaaaaactgtattaattaagggaaataaatcataatcccttccaactctaattctaccttttgccttgagttggtttattttaatcataaaccttaagaattggaaacagcctgaacaattatgtaatgtaatttaccatctggttaacccttccatgtaaaaattctgtcctgcggttatcctgcctccgatttttctttgaacaaat

SEQ ID NO: 421220 - DNA, 909 bp, Homo sapiens
gctgggaaacagacccgctcataaagtgtatggagtgactagcaacacacaggctggcccagcctatgatagtgttgtacagtctgagtggttagaagtcatccctttgtttttaaaatctgcctaccttccactcattcttcagcccccttgaaacacaaggtctgcacttcaaggatttgaaatcatttcaccagtcttttttttttttttttcagttccttcatctccctatttgacagtttcttgacatttcaccttaaaatacagtttgtcagtgtccctcataaaagtatagttggtactagaacaagatgtgataatctgcatacaggctatcaatcaatgaattgtgaaactgttatctcacctgagttaggtactaaatttctgttcatttgagataatgtaaagcaactaattttttgtggttttattcctcctctcattaaatagccttcttccttaaataatcagctagtatctgtggactgcaagaaaggaaccagagtccaggtggacagttcccagagaatgctaagaattgcagaaccagatgcaagattcagtggcttctacagcatgcaaaaacagaaccatctacaggcagacaatttctaccaaacagtgtgaagaaaggcaactaggatgaggtttcaaaagacggaagacgactaaatctgctctaaaaagtaaactagaatttgtgcacttgcttagtggattgtattggattgtgacttgatgtacagcgctaagaccttactgggatgggctctgtctacagcaatgtgcagaacaagcattcccacttttcctcaagataactgaccaagtgttttcttagaaccaaagtttttaaagttgctaagatatatttgcctgtaagatagctgtagagatatttgg

SEQ ID NO: 421221 - DNA, 313 bp, Homo sapiens
actgcatctttcatgtcccaggaaatgtggtcttgaattgagtgcaccatttggattgagaatacaaaagccaacaatacagcagcttcatcatctcttaggaaaaatgttcccttcttttagaaatgtatgtcccagaaccaaccaatatacccattgagaagacaaaccatcgaggagaggttgacctggaggttcccctgtggcccacgcctagtgaaaatgatatcgtccatctccctagaggtaagcattgaaggcagctgagatctgctagttttctatgtggtctacttaggtgttttctaatttt

SEQ ID NO: 421222 - DNA, 2393 bp, Homo sapiens
atcacagtagaccaagctaatgtggggcggtatcaaactgcactctgacagggaaggactgcattaatggtttcaaacgcgatcacaatggttgtcggacctgtcagtgcataaacaccgaggaactatgttcagaacgtaaacaaggctgcaccttgaactgtcccttcggtttccttactgatgcccaaaactgtgagatctgtgagtgccgcccaaggcccaagaagtgcagacccataatctgtgacaagtattgtccacttggattgctgaagaataagcacggctgtgacatctgtcgctgtaagaaatgtccagagctctcatgcagtaagatctgccccttgggtttccagcaggacagtcacggctgtcttatctgcaagtgcagagaggcctctgcttcagctgggccacccatcctgtcgggcacttgtctcaccgtggatggtcatcatcataaaaatgaggagagctggcacgatgggtgccgggaatgctactgtctcaatggacgggaaatgtgtgccctgatcacctgcccggtgcctgcctgtggcaaccccaccattcaccctggacagtgctgcccatcatgtgcagatgactttgtggtgcagaagccagagctcagtactccctccatttgccacgcccctggaggagaatactttgtggaaggagaaacgtggaacattgactcctgtactcagtgcacctgccacagcggacgggtgctgtgtgagacagaggtgtgcccaccgctgctctgccagaacccctcacgcacccaggattcctgctgcccacagtgtacagatcaaccttttcggccttccttgtcccgcaataacagcgtacctaattactgcaaaaatgatgaaggggatatattcctggcagctgagtcctggaagcctgacgtttgtaccagctgcatctgcattgatagcgtaattagctgtttctctgagtcctgcccttctgtatcctgtgaaagacctgtcttgagaaaaggccagtgttgtccctactgcatagaagacacaattccaaagaaggtggtgtgccacttcagtgggaaggcctatgccgacgaggagcggtgggaccttgacagctgcacccactgctactgcctgcagggccagaccctctgctcgaccgtcagctgcccccctctgccctgtgttgagcccatcaacgtggaaggaagttgctgcccaatgtgtccagaaatgtatgtcccagaaccaaccaatatacccattgagaagacaaaccatcgaggagaggttgacctggaggttcccctgtggcccacgcctagtgaaaatgatatcgtccatctccctagagatatgggtcacctccaggtagattacagagataacaggctgcacccaagtgaagattcttcactggactccattgcctcagttgtggttcccataattatatgcctctctattataatagcattcctattcatcaatcagaagaaacagtggataccactgctttgctggtatcgaacaccaactaaggtactgtcttgcaaaagttagtctcttgaatgatgaatctaggaaaacttacactcatattgaaattgcttgaaaccttgtgtcttaaccagtgaagtttttactttgctcttcatagcctcaaatccataccaggctatagtatgaatcaaatacatagtacttgcccagggctggactgatcacaaggtgaattatccattatccattggttaatgaagcctaaccttacatggatccagttttctcgatgtactctgaagttttcaaatgaacaaatactcctggatttattcctaaatcattgtttatattagacattaaaacgtgatcacctggcatttcttagtcatcagtcaacttagaattgggagagaaaaaaagtcccaaagggatggagataatactcaggagagggctggaagatcatgagggtatacaaaaggcaaaaggaacaggtcagtgcaccaaaggcaagcaccaagtggaaaggtcgcaaaagatgaagaggtggtggaaagtaatagtagacaaggtagggagaggcagatttcacactaagggagaaaagatgtatgtttgttttcagtacaaacataaagggcctctaaatctgcctattttgaaagacaagaaaaaactgtattaattaagggaaataaatcataatcccttccaactctaattctaccttttgccttgagttggtttattttaatcataaaccttaagaattggaaacagcctgaacaattatgtaatgtaatttaccatctggttaacccttccatgtaaaaattctgtcctgcggttatcctgcctccgatttttctttgaacaaat

SEQ ID NO: 421223 - DNA, 2003 bp, Homo sapiens
atcacagtagaccaagctaatgtggggcggtatcaaactgcactctgacagggaaggactgcattaatggtttcaaacgcgatcacaatggttgtcggacctgtcagtgcataaacaccgaggaactatgttcagaacgtaaacaaggctgcaccttgaactgtcccttcggtttccttactgatgcccaaaactgtgagatctgtgagtgccgcccaaggcccaagaagtgcagacccataatctgtgacaagtattgtccacttggattgctgaagaataagcacggctgtgacatctgtcgctgtaagaaatgtccagagctctcatgcagtaagatctgccccttgggtttccagcaggacagtcacggctgtcttatctgcaagtgcagagaggcctctgcttcagctgggccacccatcctgtcgggcacttgtctcaccgtggatggtcatcatcataaaaatgaggagagctggcacgatgggtgccgggaatgctactgtctcaatggacgggaaatgtgtgccctgatcacctgcccggtgcctgcctgtggcaaccccaccattcaccctggacagtgctgcccatcatgtgcagatgactttgtggtgcagaagccagagctcagtactccctccatttgccacgcccctggaggagaatactttgtggaaggagaaacgtggaacattgactcctgtactcagtgcacctgccacagcggacgggtgctgtgtgagacagaggtgtgcccaccgctgctctgccagaacccctcacgcacccaggattcctgctgcccacagtgtacagatcaaccttttcggccttccttgtcccgcaataacagcgtacctaattactgcaaaaatgatgaaggggatatattcctggcagctgagtcctggaagcctgacgtttgtaccagctgcatctgcattgatagcgtaattagctgtttctctgagtcctgcccttctgtatcctgtgaaagacctgtcttgagaaaaggccagtgttgtccctactgcatagaagacacaattccaaagaaggtggtgtgccacttcagtgggaaggcctatgccgacgaggagcggtgggaccttgacagctgcacccactgctactgcctgcagggccagaccctctgctcgaccgtcagctgcccccctctgccctgtgttgagcccatcaacgtggaaggaagttgctgcccaatgtgtccagaaatgtatgtcccagaaccaaccaatatacccattgagaagacaaaccatcgaggagaggttgacctggaggttcccctgtggcccacgcctagtgaaaatgatatcgtccatctccctagagatatgggtcacctccaggtagattacagagataacaggctgcacccaagtgaagattcttcactggactccattgcctcagttgtggttcccataattatatgcctctctattataatagcattcctattcatcaatcagaagaaacagtggataccactgctttgctggtatcgaacaccaactaagccttcttccttaaataatcagctagtatctgtggactgcaagaaaggaaccagagtccaggtggacagttcccagagaatgctaagaattgcagaaccagatgcaagattcagtggcttctacagcatgcaaaaacagaaccatctacaggcagacaatttctaccaaacagtgtgaagaaaggcaactaggatgaggtttcaaaagacggaagacgactaaatctgctctaaaaagtaaactagaatttgtgcacttgcttagtggattgtattggattgtgacttgatgtacagcgctaagaccttactgggatgggctctgtctacagcaatgtgcagaacaagcattcccacttttcctcaagataactgaccaagtgttttcttagaaccaaagtttttaaagttgctaagatatatttgcctgtaagatagctgtagagatatttgg

SEQ ID NO: 421224 - DNA, 1736 bp, Homo sapiens
aaatttaagacccttcccgaatcatactttctgatttgttactgcgtcatgtatttaaggaggcaccgaaagccatcatgactgggtgtgctttgaaacacactatgttgcatagttgctggccaacagcatcttctttgctgacctatatgttcatttttccagatcaaccttttcggccttccttgtcccgcaataacagcgtacctaattactgcaaaaatgatgaaggggatatattcctggcagctgagtcctggaagcctgacgtttgtaccagctgcatctgcattgatagcgtaattagctgtttctctgagtcctgcccttctgtatcctgtgaaagacctgtcttgagaaaaggccagtgttgtccctactgcatagaagacacaattccaaagaaggtggtgtgccacttcagtgggaaggcctatgccgacgaggagcggtgggaccttgacagctgcacccactgctactgcctgcagggccagaccctctgctcgaccgtcagctgcccccctctgccctgtgttgagcccatcaacgtggaaggaagttgctgcccaatgtgtccagaaatgtatgtcccagaaccaaccaatatacccattgagaagacaaaccatcgaggagaggttgacctggaggttcccctgtggcccacgcctagtgaaaatgatatcgtccatctccctagagatatgggtcacctccaggtagattacagagataacaggctgcacccaagtgaagattcttcactggactccattgcctcagttgtggttcccataattatatgcctctctattataatagcattcctattcatcaatcagaagaaacagtggataccactgctttgctggtatcgaacaccaactaaggtactgtcttgcaaaagttagtctcttgaatgatgaatctaggaaaacttacactcatattgaaattgcttgaaaccttgtgtcttaaccagtgaagtttttactttgctcttcatagcctcaaatccataccaggctatagtatgaatcaaatacatagtacttgcccagggctggactgatcacaaggtgaattatccattatccattggttaatgaagcctaaccttacatggatccagttttctcgatgtactctgaagttttcaaatgaacaaatactcctggatttattcctaaatcattgtttatattagacattaaaacgtgatcacctggcatttcttagtcatcagtcaacttagaattgggagagaaaaaaagtcccaaagggatggagataatactcaggagagggctggaagatcatgagggtatacaaaaggcaaaaggaacaggtcagtgcaccaaaggcaagcaccaagtggaaaggtcgcaaaagatgaagaggtggtggaaagtaatagtagacaaggtagggagaggcagatttcacactaagggagaaaagatgtatgtttgttttcagtacaaacataaagggcctctaaatctgcctattttgaaagacaagaaaaaactgtattaattaagggaaataaatcataatcccttccaactctaattctaccttttgccttgagttggtttattttaatcataaaccttaagaattggaaacagcctgaacaattatgtaatgtaatttaccatctggttaacccttccatgtaaaaattctgtcctgcggttatcctgcctccgatttttctttgaacaaat

SEQ ID NO: 421225 - DNA, 478 bp, Homo sapiens
ttataaaatcagtgcttgtttattgtataaaatatgagaaagtacagtggaaggaataaaaaatcagcgatcatcccacgaattggagagaaactatttgccggtttttttctctcttttcttttttcaagattgagaacatactgacttaaattcttttcatgaacatgtcccatgtcacaaactgtcctgtgttagacgtaattgttggtggctggggtccagtccatgtacagactctgtagcctgtttctcctgtgcagtagccacttctttaccaggctgccttttgtctgtccagaggcctctgcttcagctgggccacccatcctgtcgggcacttgtctcaccgtggatggtcatcatcataaaaatgaggagagctggcacgatgggtgccgggaatgctactgtctcaatggacgggaaatgtgtgccctgatcacctgcccggtgcctgcctgtggcaaccccacca

SEQ ID NO: 421226 - DNA, 1808 bp, Homo sapiens
atcacagtagaccaagctaatgtggggcggtatcaaactgcactctgacagggaaggactgcattaatggtttcaaacgcgatcacaatggttgtcggacctgtcagtgcataaacaccgaggaactatgttcagaacgtaaacaaggctgcaccttgaactgtcccttcggtttccttactgatgcccaaaactgtgagatctgtgagtgccgcccaaggcccaagaagtgcagacccataatctgtgacaagtattgtccacttggattgctgaagaataagcacggctgtgacatctgtcgctgtaagaaatgtccagagctctcatgcagtaagatctgccccttgggtttccagcaggacagtcacggctgtcttatctgcaagtgcagagaggcctctgcttcagctgggccacccatcctgtcgggcacttgtctcaccgtggatggtcatcatcataaaaatgaggagagctggcacgatgggtgccgggaatgctactgtctcaatggacgggaaatgtgtgccctgatcacctgcccggtgcctgcctgtggcaaccccaccattcaccctggacagtgctgcccatcatgtgcagatgactttgtggtgcagaagccagagctcagtactccctccatttgccacgcccctggaggagaatactttgtggaaggagaaacgtggaacattgactcctgtactcagtgcacctgccacagcggacgggtgctgtgtgagacagaggtgtgcccaccgctgctctgccagaacccctcacgcacccaggattcctgctgcccacagtgtacagatcaaccttttcggccttccttgtcccgcaataacagcgtacctaattactgcaaaaatgatgaaggggatatattcctggcagctgagtcctggaagcctgacgtttgtaccagctgcatctgcattgatagcgtaattagctgtttctctgagtcctgcccttctgtatcctgtgaaagacctgtcttgagaaaaggccagtgttgtccctactgcatagaaatgtatgtcccagaaccaaccaatatacccattgagaagacaaaccatcgaggagaggttgacctggaggttcccctgtggcccacgcctagtgaaaatgatatcgtccatctccctagagatatgggtcacctccaggtagattacagagataacaggctgcacccaagtgaagattcttcactggactccattgcctcagttgtggttcccataattatatgcctctctattataatagcattcctattcatcaatcagaagaaacagtggataccactgctttgctggtatcgaacaccaactaagccttcttccttaaataatcagctagtatctgtggactgcaagaaaggaaccagagtccaggtggacagttcccagagaatgctaagaattgcagaaccagatgcaagattcagtggcttctacagcatgcaaaaacagaaccatctacaggcagacaatttctaccaaacagtgtgaagaaaggcaactaggatgaggtttcaaaagacggaagacgactaaatctgctctaaaaagtaaactagaatttgtgcacttgcttagtggattgtattggattgtgacttgatgtacagcgctaagaccttactgggatgggctctgtctacagcaatgtgcagaacaagcattcccacttttcctcaagataactgaccaagtgttttcttagaaccaaagtttttaaagttgctaagatatatttgcctgtaagatagctgtagagatatttgg

SEQ ID NO: 421227 - DNA, 263 bp, Homo sapiens
  misc_feature (7)..(7): n is a, c, g, or t
atcgaancggccgcgtcgacgttgcggagaagacgacgaagggagttcccgaggaatcaaacagtcctgaattcaaatccttgtttttgcacttattgtctggagagctttggataaggtattgaatctctctgagcctcagtttttcatttgttcaaatggcactgatgatgtctcccttacaagatggttgtgaggagtaaatgtgatcagcatgtaaagtgtctggcgtgtagtaggctcttaataaacactggctgaat

SEQ ID NO: 421228 - DNA, 2549 bp, Homo sapiens
cccccacggtggccggagcagccggaagctagcatggcggccgccggggctgcggctacacacctagaggtggcccggggcaagcgcgccgccctcttcttcgctgcggtggccatcgtgctggggctaccgctctggtggaagaccacggagacctaccgggcctcgttgccttactcccagatcagtggcctgaatgcccttcagctccgcctcatggtgcctgtcactgtcgtgtttacgcgggagtcagtgcccctggacgaccaggagaagctgcccttcaccgttgtgcatgaaagagagattcctctgaaatacaaaatgaaaatcaaatgccgtttccagaaggcctatcggagggctttggaccatgaggaggaggccctgtcatcgggcagtgtgcaagaggcagaagccatgttagatgagcctcaggaacaagcggagggctccctgactgtgtacgtgatatctgaacactcctcacttcttccccaggacatgatgagctacattgggcccaagaggacagcagtggtgcgggggataatgcaccgggaggcctttaacatcattggccgccgcatagtccaggtggcccaggccatgtctttgactgaggatgtgcttgctgctgctctggctgaccaccttccagaggacaagtggagcgctgagaagaggcggcctctcaagtccagcttgggctatgagatcaccttcagtttactcaacccagaccccaagtcccatgatgtctactgggacattgagggggctgtccggcgctatgtgcaacctttcctgaatgccctcggtgccgctggcaacttctctgtggactctcagattctttactatgcaatgttgggggtgaatccccgctttgactcagcttcctccagctactatttggacatgcacagcctcccccatgtcatcaacccagtggagtcccggctgggatccagtgctgcctccttgtaccctgtgctcaactttctactctacgtgcctgagcttgcacactcaccgctgtacattcaggacaaggatggcgctccagtggccaccaatgccttccatagtccccgctggggtggcattatggtatataatgttgactccaaaacctataatgcctcagtgctgccagtgagagtcgaggtggacatggtgcgagtgatggaggtgttcctggcacagttgcggttgctctttgggattgctcagccccagctgcctccaaaatgcctgctttcagggcctacgagtgaagggctaatgacctgggagctagaccggctgctctgggctcggtcagtggagaacctggccacagccaccaccacccttacctccctggcgcagcttctgggcaagatcagcaacattgtcattaaggacgacgtggcatctgaggtgtacaaggctgtagctgccgtccagaagtcggcagaagagttggcgtctgggcacctggcatctgcctttgtcgccagccaggaagctgtgacatcctctgagcttgccttctttgacccgtcactcctccacctcctttatttccctgatgaccagaagtttgccatctacatcccactcttcctgcctatggctgtgcccatcctcctgtccctggtcaagatcttcctggagacccgcaagtcctggagaaagcctgagaagacagactgagcagggcagcacctccataggaagccttcctttctggccaaggtgggcggtgttagattgtgaggcacgtacatggggcctgccggaatgacttaaatatttgtctccagtctccactgttggctctccagcaaccaaagtacaacactccaagatgggttcatcttttcttcctttcccattcacctggctcaatcctcctccaccaccaggggcctcaaaaggcacatcatccgggtctccttatcttgtttgataaggctgctgcctgtctccctctgtggcaaggactgtttgttcttttgccccatttctcaacatagcacacttgtgcactgagaggagggagcattatgggaaagtccctgccttccacacctctctctagtccctgtgggacagccctagcccctgctgtcatgaaggggccaggcattggtcacctgtgggaccttctccctcactcccctccctcctagttggctttgtctgtcaggtgcagtctggcgggagtccaggaggcagcagctcaggacatggtgctgtgtgtgtgtgtgtgtgtgtgtgtgtgtgtgtgtgtgtgtcagaggttccagaaagttccagatttggaatcaaacagtcctgaattcaaatccttgtttttgcacttattgtctggagagctttggataaggtattgaatctctctgagcctcagtttttcatttgttcaaatggcactgatgatgtctcccttacaagatggttgtgaggagtaaatgtgatcagcatgtaaagtgtctggcgtgtagtaggctcttaataaacactggctgaatatgaattggaatgataaaaaaaaaaag

SEQ ID NO: 421229 - DNA, 2823 bp, Homo sapiens
cccccacggtggccggagcagccggaagctagcatggcggccgccggggctgcggctacacacctaggtgcggtgggcttcgggtggggggcctgcagctagctgatggcaagggaggaatagcaggggtggggattgtggtgtgcgagaggtcccgcggacggggggctcgggggtctcttcagacgagattcccttcaggcttgggccgggtcccttcgcacggagatcccaatgaacgcgggcccctggaggccggtggttggggcttctccgcgtcggggatggggccggtaccctagcccgtttccagcgcctcagtcggttccccatgccctcagaggtggcccggggcaagcgcgccgccctcttcttcgctgcggtggccatcgtgctggggctaccgctctggtggaagaccacggagacctaccgggcctcgttgccttactcccagatcagtggcctgaatgcccttcagctccgcctcatggtgcctgtcactgtcgtgtttacgcgggagtcagtgcccctggacgaccaggagaagctgcccttcaccgttgtgcatgaaagagagattcctctgaaatacaaaatgaaaatcaaatgccgtttccagaaggcctatcggagggctttggaccatgaggaggaggccctgtcatcgggcagtgtgcaagaggcagaagccatgttagatgagcctcaggaacaagcggagggctccctgactgtgtacgtgatatctgaacactcctcacttcttccccaggacatgatgagctacattgggcccaagaggacagcagtggtgcgggggataatgcaccgggaggcctttaacatcattggccgccgcatagtccaggtggcccaggccatgtctttgactgaggatgtgcttgctgctgctctggctgaccaccttccagaggacaagtggagcgctgagaagaggcggcctctcaagtccagcttgggctatgagatcaccttcagtttactcaacccagaccccaagtcccatgatgtctactgggacattgagggggctgtccggcgctatgtgcaacctttcctgaatgccctcggtgccgctggcaacttctctgtggactctcagattctttactatgcaatgttgggggtgaatccccgctttgactcagcttcctccagctactatttggacatgcacagcctcccccatgtcatcaacccagtggagtcccggctgggatccagtgctgcctccttgtaccctgtgctcaactttctactctacgtgcctgagcttgcacactcaccgctgtacattcaggacaaggatggcgctccagtggccaccaatgccttccatagtccccgctggggtggcattatggtatataatgttgactccaaaacctataatgcctcagtgctgccagtgagagtcgaggtggacatggtgcgagtgatggaggtgttcctggcacagttgcggttgctctttgggattgctcagccccagctgcctccaaaatgcctgctttcagggcctacgagtgaagggctaatgacctgggagctagaccggctgctctgggctcggtcagtggagaacctggccacagccaccaccacccttacctccctggcgcagcttctgggcaagatcagcaacattgtcattaaggacgacgtggcatctgaggtgtacaaggctgtagctgccgtccagaagtcggcagaagagttggcgtctgggcacctggcatctgcctttgtcgccagccaggaagctgtgacatcctctgagcttgccttctttgacccgtcactcctccacctcctttatttccctgatgaccagaagtttgccatctacatcccactcttcctgcctatggctgtgcccatcctcctgtccctggtcaagatcttcctggagacccgcaagtcctggagaaagcctgagaagacagactgagcagggcagcacctccataggaagccttcctttctggccaaggtgggcggtgttagattgtgaggcacgtacatggggcctgccggaatgacttaaatatttgtctccagtctccactgttggctctccagcaaccaaagtacaacactccaagatgggttcatcttttcttcctttcccattcacctggctcaatcctcctccaccaccaggggcctcaaaaggcacatcatccgggtctccttatcttgtttgataaggctgctgcctgtctccctctgtggcaaggactgtttgttcttttgccccatttctcaacatagcacacttgtgcactgagaggagggagcattatgggaaagtccctgccttccacacctctctctagtccctgtgggacagccctagcccctgctgtcatgaaggggccaggcattggtcacctgtgggaccttctccctcactcccctccctcctagttggctttgtctgtcaggtgcagtctggcgggagtccaggaggcagcagctcaggacatggtgctgtgtgtgtgtgtgtgtgtgtgtgtgtgtgtgtgtgtgtgtcagaggttccagaaagttccagatttggaatcaaacagtcctgaattcaaatccttgtttttgcacttattgtctggagagctttggataaggtattgaatctctctgagcctcagtttttcatttgttcaaatggcactgatgatgtctcccttacaagatggttgtgaggagtaaatgtgatcagcatgtaaagtgtctggcgtgtagtaggctcttaataaacactggctgaatatgaattggaatgataaaaaaaaaaag

SEQ ID NO: 421230 - DNA, 2455 bp, Homo sapiens
  misc_feature (210)..(210): n is a, c, g, or t
  misc_feature (216)..(216): n is a, c, g, or t
  misc_feature (227)..(227): n is a, c, g, or t
ctcggtacccccacagccaccaccacccttacctccctggcgcagcttctgggcaagatcagcaacattgtcattaaggacgacgtggcatctgaggtgtacaaggctgtagctgccgtccagaagtcggcagaagagttggcgtctgggcacctggcatctgcctttgtcgccagccaggaagctgtgacatcctctgagcttgccttntttganccgtcactccnccacctcctttatttccctgatgaccagaagtttgccatctacatcccactcttcctgcctatggtgtgccatcctcctgtccctggtcaagatcttcctggagacccgcaagtcctggagaaagcctgagaagacagactgtgtacgtgatatctgaacactcctcacttcttccccaggacatgatgagctacattgggcccaagaggacagcagtggtgcgggggataatgcaccgggaggcctttaacatcattggccgccgcatagtccaggtggcccaggccatgtctttgactgaggatgtgcttgctgctgctctggctgaccaccttccagaggacaagtggagcgctgagaagaggcggcctctcaagtccagcttgggctatgagatcaccttcagtttactcaacccagaccccaagtcccatgatgtctactgggacattgagggggctgtccggcgctatgtgcaacctttcctgaatgccctcggtgccgctggcaacttctctgtggactctcagattctttactatgcaatgttgggggtgaatccccgctttgactcagcttcctccagctactatttggacatgcacagcctcccccatgtcatcaacccagtggagtcccggctgggatccagtgctgcctccttgtaccctgtgctcaactttctactctacgtgcctgagcttgcacactcaccgctgtacattcaggacaaggatggcgctccagtggccaccaatgccttccatagtccccgctggggtggcattatggtatataatgttgactccaaaacctataatgcctcagtgctgccagtgagagtcgaggtggacatggtgcgagtgatggaggtgttcctggcacagttgcggttgctctttgggattgctcagccccagctgcctccaaaatgcctgctttcagggcctacgagtgaagggctaatgacctgggagctagaccggctgctctgggctcggtcagtggagaacctggccacagccaccaccacccttacctccctggcgcagcttctgggcaagatcagcaacattgtcattaaggacgacgtggcatctgaggtgtacaaggctgtagctgccgtccagaagtcggcagaagagttggcgtctgggcacctggcatctgcctttgtcgccagccaggaagctgtgacatcctctgagcttgccttctttgacccgtcactcctccacctcctttatttccctgatgaccagaagtttgccatctacatcccactcttcctgcctatggctgtgcccatcctcctgtccctggtcaagatcttcctggagacccgcaagtcctggagaaagcctgagaagacagactgagcagggcagcacctccataggaagccttcctttctggccaaggtgggcggtgttagattgtgaggcacgtacatggggcctgccggaatgacttaaatatttgtctccagtctccactgttggctctccagcaaccaaagtacaacactccaagatgggttcatcttttcttcctttcccattcacctggctcaatcctcctccaccaccaggggcctcaaaaggcacatcatccgggtctccttatcttgtttgataaggctgctgcctgtctccctctgtggcaaggactgtttgttcttttgccccatttctcaacatagcacacttgtgcactgagaggagggagcattatgggaaagtccctgccttccacacctctctctagtccctgtgggacagccctagcccctgctgtcatgaaggggccaggcattggtcacctgtgggaccttctccctcactcccctccctcctagttggctttgtctgtcaggtgcagtctggcgggagtccaggaggcagcagctcaggacatggtgctgtgtgtgtgtgtgtgtgtgtgtgtgtgtgtgtgtgtgtgtcagaggttccagaaagttccagatttggaatcaaacagtcctgaattcaaatccttgtttttgcacttattgtctggagagctttggataaggtattgaatctctctgagcctcagtttttcatttgttcaaatggcactgatgatgtctcccttacaagatggttgtgaggagtaaatgtgatcagcatgtaaagtgtctggcgtgtagtaggctcttaataaacactggctgaatatgaattggaatgataaaaaaaaaaag

SEQ ID NO: 421231 - DNA, 2216 bp, Homo sapiens
tatatactcatagctcagaaatgctgagttaatagctcatgaatctcaagagaggtgcaaacctgttggtcattggcaaaggggcagattcggaacagtaggagccagggtgctttttggctttcttttctgagccatgggcattctgtctcttgctcacccccacaggacatgatgagctacattgggcccaagaggacagcagtggtgcgggggataatgcaccgggaggcctttaacatcattggccgccgcatagtccaggtggcccaggccatgtctttgactgaggatgtgcttgctgctgctctggctgaccaccttccagaggacaagtggagcgctgagaagaggcggcctctcaagtccagcttgggctatgagatcaccttcagtttactcaacccagaccccaagtcccatgatgtctactgggacattgagggggctgtccggcgctatgtgcaacctttcctgaatgccctcggtgccgctggcaacttctctgtggactctcagattctttactatgcaatgttgggggtgaatccccgctttgactcagcttcctccagctactatttggacatgcacagcctcccccatgtcatcaacccagtggagtcccggctgggatccagtgctgcctccttgtaccctgtgctcaactttctactctacgtgcctgagcttgcacactcaccgctgtacattcaggacaaggatggcgctccagtggccaccaatgccttccatagtccccgctggggtggcattatggtatataatgttgactccaaaacctataatgcctcagtgctgccagtgagagtcgaggtggacatggtgcgagtgatggaggtgttcctggcacagttgcggttgctctttgggattgctcagccccagctgcctccaaaatgcctgctttcagggcctacgagtgaagggctaatgacctgggagctagaccggctgctctgggctcggtcagtggagaacctggccacagccaccaccacccttacctccctggcgcagcttctgggcaagatcagcaacattgtcattaaggacgacgtggcatctgaggtgtacaaggctgtagctgccgtccagaagtcggcagaagagttggcgtctgggcacctggcatctgcctttgtcgccagccaggaagctgtgacatcctctgagcttgccttctttgacccgtcactcctccacctcctttatttccctgatgaccagaagtttgccatctacatcccactcttcctgcctatggctgtgcccatcctcctgtccctggtcaagatcttcctggagacccgcaagtcctggagaaagcctgagaagacagactgagcagggcagcacctccataggaagccttcctttctggccaaggtgggcggtgttagattgtgaggcacgtacatggggcctgccggaatgacttaaatatttgtctccagtctccactgttggctctccagcaaccaaagtacaacactccaagatgggttcatcttttcttcctttcccattcacctggctcaatcctcctccaccaccaggggcctcaaaaggcacatcatccgggtctccttatcttgtttgataaggctgctgcctgtctccctctgtggcaaggactgtttgttcttttgccccatttctcaacatagcacacttgtgcactgagaggagggagcattatgggaaagtccctgccttccacacctctctctagtccctgtgggacagccctagcccctgctgtcatgaaggggccaggcattggtcacctgtgggaccttctccctcactcccctccctcctagttggctttgtctgtcaggtgcagtctggcgggagtccaggaggcagcagctcaggacatggtgctgtgtgtgtgtgtgtgtgtgtgtgtgtgtgtgtgtgtgtgtcagaggttccagaaagttccagatttggaatcaaacagtcctgaattcaaatccttgtttttgcacttattgtctggagagctttggataaggtattgaatctctctgagcctcagtttttcatttgttcaaatggcactgatgatgtctcccttacaagatggttgtgaggagtaaatgtgatcagcatgtaaagtgtctggcgtgtagtaggctcttaataaacactggctgaatatgaattggaatgataaaaaaaaaaag

SEQ ID NO: 421232 - DNA, 1999 bp, Homo sapiens
ctcagtgttcctcatcccagttttgtcctccttttggttccatgatggaaagcagccccattccagaggagaaacaagttcagctcagctgggagtacaggctgcccctcttctttgatccacaagagcctctgacttccctgactcctgtttctgtaggctatgagatcaccttcagtttactcaacccagaccccaagtcccatgatgtctactgggacattgagggggctgtccggcgctatgtgcaacctttcctgaatgccctcggtgccgctggcaacttctctgtggactctcagattctttactatgcaatgttgggggtgaatccccgctttgactcagcttcctccagctactatttggacatgcacagcctcccccatgtcatcaacccagtggagtcccggctgggatccagtgctgcctccttgtaccctgtgctcaactttctactctacgtgcctgagcttgcacactcaccgctgtacattcaggacaaggatggcgctccagtggccaccaatgccttccatagtccccgctggggtggcattatggtatataatgttgactccaaaacctataatgcctcagtgctgccagtgagagtcgaggtggacatggtgcgagtgatggaggtgttcctggcacagttgcggttgctctttgggattgctcagccccagctgcctccaaaatgcctgctttcagggcctacgagtgaagggctaatgacctgggagctagaccggctgctctgggctcggtcagtggagaacctggccacagccaccaccacccttacctccctggcgcagcttctgggcaagatcagcaacattgtcattaaggacgacgtggcatctgaggtgtacaaggctgtagctgccgtccagaagtcggcagaagagttggcgtctgggcacctggcatctgcctttgtcgccagccaggaagctgtgacatcctctgagcttgccttctttgacccgtcactcctccacctcctttatttccctgatgaccagaagtttgccatctacatcccactcttcctgcctatggctgtgcccatcctcctgtccctggtcaagatcttcctggagacccgcaagtcctggagaaagcctgagaagacagactgagcagggcagcacctccataggaagccttcctttctggccaaggtgggcggtgttagattgtgaggcacgtacatggggcctgccggaatgacttaaatatttgtctccagtctccactgttggctctccagcaaccaaagtacaacactccaagatgggttcatcttttcttcctttcccattcacctggctcaatcctcctccaccaccaggggcctcaaaaggcacatcatccgggtctccttatcttgtttgataaggctgctgcctgtctccctctgtggcaaggactgtttgttcttttgccccatttctcaacatagcacacttgtgcactgagaggagggagcattatgggaaagtccctgccttccacacctctctctagtccctgtgggacagccctagcccctgctgtcatgaaggggccaggcattggtcacctgtgggaccttctccctcactcccctccctcctagttggctttgtctgtcaggtgcagtctggcgggagtccaggaggcagcagctcaggacatggtgctgtgtgtgtgtgtgtgtgtgtgtgtgtgtgtgtgtgtgtgtcagaggttccagaaagttccagatttggaatcaaacagtcctgaattcaaatccttgtttttgcacttattgtctggagagctttggataaggtattgaatctctctgagcctcagtttttcatttgttcaaatggcactgatgatgtctcccttacaagatggttgtgaggagtaaatgtgatcagcatgtaaagtgtctggcgtgtagtaggctcttaataaacactggctgaatatgaattggaatgataaaaaaaaaaag

SEQ ID NO: 421233 - DNA, 2357 bp, Homo sapiens
cccccacggtggccggagcagccggaagctagcatggcggccgccggggctgcggctacacacctagaggtggcccggggcaagcgcgccgccctcttcttcgctgcggtggccatcgtgctggggctaccgctctggtggaagaccacggagacctaccgggcctcgttgccttactcccagatcagtggcctgaatgcccttcagctccgcctcatggtgcctgtcactgtcgtgtttacgcgggagtcagtgcccctggacgaccaggagaagctgcccttcaccgttgtgcatgaaagagagattcctctgaaatacaaaatgaaaatcaaatgccgtttccagaaggcctatcggagggctttggaccatgaggaggaggccctgtcatcgggcagtgtgcaagaggcagaagccatgttagatgagcctcaggaacaagcggagggctccctgactgtgtacgtgatatctgaacactcctcacttcttccccaggacatgatgagctacattgggcccaagaggacagcagtggtgcgggggataatgcaccgggaggcctttaacatcattggccgccgcatagtccaggtggcccaggccatgtctttgactgaggatgtgcttgctgctgctctggctgaccaccttccagaggacaagtggagcgctgagaagaggcggcctctcaagtccagcttgggctatgagatcaccttcagtttactcaacccagaccccaagtcccatgatgtctactgggacattgagggggctgtccggcgctatgtgcaacctttcctgaatgccctcggtgccgctggcaacttctctgtggactctcagattctttactatgcaatgttgggggtgaatccccgctttgactcagcttcctccagctactatttggacatgcacagcctcccccatgtcatcaacccagtggagtcccggctgggatccagtgctgcctccttgtaccctgtgctcaactttctactctacgtgcctgagcttgcacactcaccgctgtacattcaggacaaggatggcgctccagtggccaccaatgccttccatagtccccgctggggtggcattatggtatataatgttgactccaaaacctataatgcctcagtgctgccagtgagagtcgaggtggacatggtgcgagtgatggaggtgttcctggcacagttgcggttgctctttgggattgctcagccccagctgcctccaaaatgcctgctttcagggcctacgagtgaagggctaatgacctgggagctagaccggctgctctgggctcggtcagtggagaacctggccacagccaccaccacccttacctccctggcgcagcttctgggcaagatcagcaacattgtcattaaggacgacgtggcatctgaggtgtacaaggctgtagctgccgtccagaagtcggcagaagagttggcgtctgggcacctggcatctgcctttgtcgccagccaggaagctgtgacatcctctgagcttgccttctttgacccgtcactcctccacctcctttatttccctgatgaccagaagtttgccatctacatcccactcttcctgcctatggctgtgcccatcctcctgtccctggtcaagatcttcctggagacccgcaagtcctggagaaagcctgagaagacagactgagcagggcagcacctccataggaagccttcctttctggccaaggtgggcggtgttagattgtgaggcacgtacatggggcctgccggaatgacttaaatatttgtctccagtctccactgttggctctccagcaaccaaagtacaacactccaagatgggttcatcttttcttcctttcccattcacctggctcaatcctcctccaccaccaggggcctcaaaaggcacatcatccgggtctccttatcttgtttgataaggctgctgcctgtctccctctgtggcaaggactgtttgttcttttgccccatttctcaacatagcacacttgtgcactgagaggagggagcattatgggaaagtccctgccttccacacctctctctagtccctgtgggacagccctagcccctgctgtcatgaaggggccaggcattggtcacctgtgggaccttctccctcactcccctccctcctagttggctttgtctgtcaggtgcagtctggcgggagtccaggaggcagcagctcaggacatggtgctgtgtgtgtgtgtgtgtgtgtgtgtgtgtgtgtgtgtgtgtcagaggattatcaggctggtgttgaggcggatcctgaggcgtgccgtgcgctacttgactgaggtggtcgac

SEQ ID NO: 421234 - DNA, 2136 bp, Homo sapiens
cccccacggtggccggagcagccggaagctagcatggcggccgccggggctgcggctacacacctagaggtggcccggggcaagcgcgccgccctcttcttcgctgcggtggccatcgtgctggggctaccgctctggtggaagaccacggagacctaccgggcctcgttgccttactcccagatcagtggcctgaatgcccttcagctccgcctcatggtgcctgtcactgtcgtgtttacgcgggagtcagtgcccctggacgaccaggagaagctgcccttcaccgttgtgcatgaaagagagattcctctgaaatacaaaatgaaaatcaaatgccgtttccagaaggcctatcggagggctttggaccatgaggaggaggccctgtcatcgggcagtgtgcaagaggcagaagccatgttagatgagcctcaggaacaagcggagggctccctgactgtgtacgtgatatctgaacactcctcacttcttccccaggacatgatgagctacattgggcccaagaggacagcagtggtgcgggggataatgcaccgggaggcctttaacatcattggccgccgcatagtccaggtggcccaggccatgtctttgactgaggatgtgcttgctgctgctctggctgaccaccttccagaggacaagtggagcgctgagaagaggcggcctctcaagtccagcttgggctatgagatcaccttcagtttactcaacccagaccccaagtcccatgatgtctactgggacattgagggggctgtccggcgctatgtgcaacctttcctgaatgccctcggtgccgctggcaacttctctgtggactctcagattctttactatgcaatgttgggggtgaatccccgctttgactcagcttcctccagctactatttggacatgcacagcctcccccatgtcatcaacccagtggagtcccggctgggatccagtgctgcctccttgtaccctgtgctcaactttctactctacgtgcctgagcttgcacactcaccgctgtacattcaggacaaggatggcgctccagtggccaccaatgccttccatagtccccgctggggtggcattatggtatataatgttgactccaaaacctataatgcctcagtgctgccagtgagagtcgaggtggacatggtgcgagtgatggaggtgttcctggcacagttgcggttgctctttgggattgctcagccccagctgcctccaaaatgcctgctttcagggcctacgagtgaagggctaatgacctgggagctagaccggctgctctgggctcggtcagtggagaacctggccacagccaccaccacccttacctccctggcgcagcttctgggcaagatcagcaacattgtcattaaggacgacgtggcatctgaggtgtacaaggctgtagctgccgtccagaagtcggcagaagagttggcgtctgggcacctggcatctgcctttgtcgccagccaggaagctgtgacatcctctgagcttgccttctttgacccgtcactcctccacctcctttatttccctgatgaccagaagtttgccatctacatcccactcttcctgcctatggctgtgcccatcctcctgtccctggtcaagatcttcctggagacccgcaagtcctggagaaagcctgagaagacagactgagcagggcagcacctccataggaagccttcctttctggccaaggtgggcggtgttagattgtgaggcacgtacatggggcctgccggaatgacttaaatatttgtctccagtctccactgttggctctccagcaaccaaagtacaacactccaagatgggttcatcttttcttcctttcccattcacctggctcaatcctcctccttccagaaagttccagatttggaatcaaacagtcctgaattcaaatccttgtttttgcacttattgtctggagagctttggataaggtattgaatctctctgagcctcagtttttcatttgttcaaatggcactgatgatgtctcccttacaagatggttgtgaggagtaaatgtgatcagcatgtaaagtgtctggcgtgtagtaggctcttaataaacactggctgaat

SEQ ID NO: 421235 - DNA, 335 bp, Homo sapiens
tgtagtaatatgggtacattgtgggagtggccaagaaagctgtcgtagacagtcaaggggcctttgaggagggagaattcgggggtgttttggagctaaggactatgtttccatcggtatggcacatctcgggagaacattctgaagccctttactagagacaccctggacaggaggatatcctaatgattgttagttggggaatcagtcccagagtgagtgaccagcaagttagaggccgacctgggactaaggtccaggtccagcatgttttgatattctgctttccctttataccacaggatccagtgctgcctccttgtaccctgtgctca

SEQ ID NO: 421236 - DNA, 468 bp, Homo sapiens
ggagtcttgcaaggttgggagccttgtctcccttgttagactggaagtttctcatgggggagaattctaaaatgggataagaaaaaaatatgttctacaggactttcaagggggtaattgggataatgtatttaatgctctccgtagtaggtactcaaaaaatattagctataccatgaggtttatagcttctaaagagcacagaatatgttttccttttctctccagagtgcctagggcagagctgtgcaagggcctggtatgatgttgtggcaatctcattccccctttcaggtatataatgttgactccaaaacctataatgcctcagtgctgccagtgagagtcgaggtggacatggtgcgagtgatggaggtgttcctggcacagttgcggtgaggtcctggatgatccacttggggacatagtctccttggctgtagaggggagttgcaaagtggaatcaag

SEQ ID NO: 421237 - DNA, 2522 bp, Homo sapiens
cccccacggtggccggagcagccggaagctagcatggcggccgccggggctgcggctacacacctagaggtggcccggggcaagcgcgccgccctcttcttcgctgcggtggccatcgtgctggggctaccgctctggtggaagaccacggagacctaccgggcctcgttgccttactcccagatcagtggcctgaatgcccttcagctccgcctcatggtgcctgtcactgtcgtgtttacgcgggagtcagtgcccctggacgaccaggagaagctgcccttcaccgttgtgcatgaaagagagattcctctgaaatacaaaatgaaaatcaaatgccgtttccagaaggcctatcggagggctttggaccatgaggaggaggccctgtcatcgggcagtgtgcaagaggcagaagccatgttagatgagcctcaggaacaagcggagggctccctgactgtgtacgtgatatctgaacactcctcacttcttccccaggacatgatgagctacattgggcccaagaggacagcagtggtgcgggggataatgcaccgggaggcctttaacatcattggccgccgcatagtccaggtggcccaggccatgtctttgactgaggatgtgcttgctgctgctctggctgaccaccttccagaggacaagtggagcgctgagaagaggcggcctctcaagtccagcttgggctatgagatcaccttcagtttactcaacccagaccccaagtcccatgatgtctactgggacattgagggggctgtccggcgctatgtgcaacctttcctgaatgccctcggtgccgctggcaacttctctgtggactctcagattctttactatgcaatgttgggggtgaatccccgctttgactcagcttcctccagctactatttggacatgcacagcctcccccatgtcatcaacccagtggagtcccggctgggatccagtgctgcctccttgtaccctgtgctcaactttctactctacgtgcctgagcttgcacactcaccgctgtacattcaggacaaggatggcgctccagtggccaccaatgccttccatagtccccgctggggtggcattatggtatataatgttgactccaaaacctataatgcctcagtgctgccagtgagagtcgaggtggacatggtgcgagtgatggaggtgttcctggcacagttgcggttgctctttgggattgctcagccccagctgcctccaaaatgcctgctttcagggcctacgagtgaagggctaatgacctgggagctagaccggctgctctgggctcggtcagtggagaacctggccacagccaccaccacccttacctccctggcgcagcttctgggcaagatcagcaacattgtcattaaggacgacgtggcatctgaggtgtacaaggctgtagctgccgtccagaagtcggcagaagagttggcgtctgggcacctggcatctgcctttgtcgccagccaggaagctgtgacatcctctgagcttgccttctttgacccgtcactcctccacctcctttatttccctgatgaccagaagtttgccatctacatcccactcttcctgcctatggctgtgcccatcctcctgtccctggtcaagatcttcctggagacccgcaagtcctggagaaagcctgagaagacagactgagcagggcagcacctccataggaagccttcctttctggccaaggtgggcggtgttagattgtgaggcacgtacatggggcctgccggaatgacttaaatatttgtctccagtctccactgttggctctccagcaaccaaagtacaacactccaagatgggttcatcttttcttcctttcccattcacctggctcaatcctcctccaccaccaggggcctcaaaaggcacatcatccgggtctccttatcttgtttgataaggctgctgcctgtctccctctgtggcaaggactgtttgttcttttgccccatttctcaacatagcacacttgtgcactgagaggagggagcattatgggaaagtccctgccttccacacctctctctagtccctgtgggacagccctagcccctgctgtcatgaaggggccaggcattggtcacctgtgggaccttctccctcactcccctccctcctagttggctttgtctgtcaggtgcagtctggcgggagtccaggaggcagcagctcaggacatggtgctgtgtgtgtgtgtgtgtgtgtgtgtgtgtgtgtgtgtgtgtcagaggttccagaaagttccagatttggaatcaaacagtcctgaattcaaatccttgtttttgcacttattgtctggagagctttggataaggtattgaatctctctgagcctcagtttttcatttgttcaaatggcactgatgatgtctcccttacaagatggttgtgaggagtaaatgtgatcagcatgtaaagtgtctggcgtgtagtaggctcttaataaacactggctgaat

SEQ ID NO: 421238 - DNA, 2613 bp, Homo sapiens
cccccacggtggccggagcagccggaagctagcatggcggccgccggggctgcggctacacacctagaggtggcccggggcaagcgcgccgccctcttcttcgctgcggtggccatcgtgctggggctaccgctctggtggaagaccacggagacctaccgggcctcgttgccttactcccagatcagtggcctgaatgcccttcagctccgcctcatggtgcctgtcactgtcgtgtttacgcgggagtcagtgcccctggacgaccaggagaagctgcccttcaccgttgtgcatgaaagagagattcctctgaaatacaaaatgaaaatcaaatgccgtttccagaaggcctatcggagggctttggaccatgaggaggaggccctgtcatcgggcagtgtgcaagaggcagaagccatgttagatgagcctcaggaacaagcggagggctccctgactgtgtacgtgatatctgaacactcctcacttcttccccaggacatgatgagctacattgggcccaagaggacagcagtggtgcgggggataatgcaccgggaggcctttaacatcattggccgccgcatagtccaggtggcccaggccatgtctttgactgaggatgtgcttgctgctgctctggctgaccaccttccagaggacaagtggagcgctgagaagaggcggcctctcaagtccagcttgggctatgagatcaccttcagtttactcaacccagaccccaagtcccatgatgtctactgggacattgagggggctgtccggcgctatgtgcaacctttcctgaatgccctcggtgccgctggcaacttctctgtggactctcagattctttactatgcaatgttgggggtgaatccccgctttgactcagcttcctccagctactatttggacatgcacagcctcccccatgtcatcaacccagtggagtcccggctgggatccagtgctgcctccttgtaccctgtgctcaactttctactctacgtgcctgagcttgcacactcaccgctgtacattcaggacaaggatggcgctccagtggccaccaatgccttccatagtccccgctggggtggcattatggtatataatgttgactccaaaacctataatgcctcagtgctgccagtgagagtcgaggtggacatggtgcgagtgatggaggtgttcctggcacagttgcggttgctctttgggattgctcagccccagctgcctccaaaatgcctgctttcagggcctacgagtgaagggctaatgacctgggagctagaccggctgctctgggctcggtcagtggagaacctggccacagccaccaccacccttacctccctggcgcagcttctgggcaagatcagcaacattgtcattaaggacgacgtggcatctgaggtgtacaaggctgtagctgccgtccagaagtcggcagaagagttggcgtctgggcacctggcatctgcctttgtcgccagccaggaagctgtgacatcctctgagcttgccttctttgacccgtcactcctccacctcctttatttccctgatgaccagaagtttgccatctacatcccactcttcctgcctatggctgtgcccatcctcctgtccctggtcaagatcttcctggagacccgcaagtcctggagaaagcctgagaagacagactgagcagggcagcacctccataggaagccttcctttctggccaaggtgggcggtgttagattgtgaggcacgtacatggggcctgccggaatgacttaaatatttgtctccagtctccactgttggctctccagcaaccaaagtacaacactccaagatgggttcatcttttcttcctttcccattcacctggctcaatcctcctccaccaccaggggcctcaaaaggcacatcatccgggtctccttatcttgtttgataaggctgctgcctgtctccctctgtggcaaggactgtttgttcttttgccccatttctcaacatagcacacttgtgcactgagaggagggagcattatgggaaagtccctgccttccacacctctctctagtccctgtgggacagccctagcccctgctgtcatgaaggggccaggcattggtcacctgtgggaccttctccctcactcccctccctcctagttggctttgtctgtcaggtgcagtctggcgggagtccaggaggcagcagctcaggacatggtgctgtgtgtgtgtgtgtgtgtgtgtgtgtgtgtgtgtgtgtgtcagaggttccagaaagttccagatttggaatcaaacagtcctgaattcaaatccttgtttttgcacttattgtctggagagctttggataaggtattgaatctctctgagcctcagtttttcatttgttcaaatggcactgatgatgtctcccttacaagatggttgtgaggagtaaatgtgatcagcatgtaaagtgtctggcgtgtagtaggctcttaataaacactggctgaattttgattcggcacaataaatatgaaagttatctatgctaagttttacgggtataattataattcgttttctccctttgtgggatcatctat

SEQ ID NO: 421239 - DNA, 2615 bp, Homo sapiens
cccccacggtggccggagcagccggaagctagcatggcggccgccggggctgcggctacacacctaggtgcggtgggcttcgggtggggggcctgcagctagctgatggcaagggaggaatagcaggggtggggattgtggtgtgcgagaggtcccgcggacggggggctcgggggtctcttcagacgagattcccttcaggcttgggccgggtcccttcgcacggagatcccaatgaacgcgggcccctggaggccggtggttggggcttctccgcgtcggggatggggccggtaccctagcccgtttccagcgcctcagtcggttccccatgccctcagaggtggcccggggcaagcgcgccgccctcttcttcgctgcggtggccatcgtgctggggctaccgctctggtggaagaccacggagacctaccgggcctcgttgccttactcccagatcagtggcctgaatgcccttcagctccgcctcatggtgcctgtcactgtcgtgtttacgcgggagtcagtgcccctggacgaccaggagaagctgcccttcaccgttgtgcatgaaagagagattcctctgaaatacaaaatgaaaatcaaatgccgtttccagaaggcctatcggagggctttggaccatgaggaggaggccctgtcatcgggcagtgtgcaagaggcagaagccatgttagatgagcctcaggaacaagcggagggctccctgactgtgtacgtgatatctgaacactcctcacttcttccccaggctatgagatcaccttcagtttactcaacccagaccccaagtcccatgatgtctactgggacattgagggggctgtccggcgctatgtgcaacctttcctgaatgccctcggtgccgctggcaacttctctgtggactctcagattctttactatgcaatgttgggggtgaatccccgctttgactcagcttcctccagctactatttggacatgcacagcctcccccatgtcatcaacccagtggagtcccggctgggatccagtgctgcctccttgtaccctgtgctcaactttctactctacgtgcctgagcttgcacactcaccgctgtacattcaggacaaggatggcgctccagtggccaccaatgccttccatagtccccgctggggtggcattatggtatataatgttgactccaaaacctataatgcctcagtgctgccagtgagagtcgaggtggacatggtgcgagtgatggaggtgttcctggcacagttgcggttgctctttgggattgctcagccccagctgcctccaaaatgcctgctttcagggcctacgagtgaagggctaatgacctgggagctagaccggctgctctgggctcggtcagtggagaacctggccacagccaccaccacccttacctccctggcgcagcttctgggcaagatcagcaacattgtcattaaggacgacgtggcatctgaggtgtacaaggctgtagctgccgtccagaagtcggcagaagagttggcgtctgggcacctggcatctgcctttgtcgccagccaggaagctgtgacatcctctgagcttgccttctttgacccgtcactcctccacctcctttatttccctgatgaccagaagtttgccatctacatcccactcttcctgcctatggctgtgcccatcctcctgtccctggtcaagatcttcctggagacccgcaagtcctggagaaagcctgagaagacagactgagcagggcagcacctccataggaagccttcctttctggccaaggtgggcggtgttagattgtgaggcacgtacatggggcctgccggaatgacttaaatatttgtctccagtctccactgttggctctccagcaaccaaagtacaacactccaagatgggttcatcttttcttcctttcccattcacctggctcaatcctcctccaccaccaggggcctcaaaaggcacatcatccgggtctccttatcttgtttgataaggctgctgcctgtctccctctgtggcaaggactgtttgttcttttgccccatttctcaacatagcacacttgtgcactgagaggagggagcattatgggaaagtccctgccttccacacctctctctagtccctgtgggacagccctagcccctgctgtcatgaaggggccaggcattggtcacctgtgggaccttctccctcactcccctccctcctagttggctttgtctgtcaggtgcagtctggcgggagtccaggaggcagcagctcaggacatggtgctgtgtgtgtgtgtgtgtgtgtgtgtgtgtgtgtgtgtgtgtcagaggttccagaaagttccagatttggaatcaaacagtcctgaattcaaatccttgtttttgcacttattgtctggagagctttggataaggtattgaatctctctgagcctcagtttttcatttgttcaaatggcactgatgatgtctcccttacaagatggttgtgaggagtaaatgtgatcagcatgtaaagtgtctggcgtgtagtaggctcttaataaacactggctgaatatgaattggaatgataaaaaaaaaaag

SEQ ID NO: 421240 - DNA, 2325 bp, Homo sapiens
cccccacggtggccggagcagccggaagctagcatggcggccgccggggctgcggctacacacctagaggtggcccggggcaagcgcgccgccctcttcttcgctgcggtggccatcgtgctggggctaccgctctggtggaagaccacggagacctaccgggcctcgttgccttactcccagatcagtggcctgaatgcccttcagctccgcctcatggtgcctgtcactgtcgtgtttacgcgggagtcagtgcccctggacgaccaggagaagctgcccttcaccgttgtgcatgaaagagagattcctctgaaatacaaaatgaaaatcaaatgccgtttccagaaggcctatcggagggctttggaccatgaggaggaggccctgtcatcgggcagtgtgcaagaggcagaagccatgttagatgagcctcaggaacaagcggagggctccctgactgtgtacgtgatatctgaacactcctcacttcttccccaggacatgatgagctacattgggcccaagaggacagcagtggtgcgggggataatgcaccgggaggcctttaacatcattggccgccgcatagtccaggtggcccaggccatgtctttgactgaggatgtgcttgctgctgctctggctgaccaccttccagaggacaagtggagcgctgagaagaggcggcctctcaagtccagcttgggctatgagatcaccttcagtttactcaacccagaccccaagtcccatgatgtctactgggacattgagggggctgtccggcgctatgtgcaacctttcctgaatgccctcggtgccgctggcaacttctctgtggactctcagattctttactatgcaatgttgggggtgaatccccgctttgactcagcttcctccagctactatttggacatgcacagcctcccccatgtcatcaacccagtggagtcccggctgggatccagtgctgcctccttgtaccctgtgctcaactttctactctacgtgcctgagcttgcacactcaccgctgtacattcaggacaaggatggcgctccagtggccaccaatgccttccatagtccccgctggggtggcattatggtatataatgttgactccaaaacctataatgcctcagtgctgccagtgagagtcgaggtggacatggtgcgagtgatggaggtgttcctggcacagttgcggttgctctttgggattgctcagccccagctgcctccaaaatgcctgctttcagggcctacgagtgaagggctaatgacctgggagctagaccggctgctctgggctcggtcagtggagaacctggccacagccaccaccacccttacctccctggcgcagcttctgggcaagatcagcaacattgtcattaaggacgacgtggcatctgaggtgtacaaggctgtagctgccgtccagaagtcggcagaagagttggcgtctgggcacctggcatctgcctttgtcgccagccaggaagctgtgacatcctctgagcttgccttctttgacccgtcactcctccacctcctttatttccctgatgaccagaagtttgccatctacatcccactcttcctgcctatggctgtgcccatcctcctgtccctggtcaagatcttcctggagacccgcaagtcctggagaaagcctgagaagacagactgagcagggcagcacctccataggaagccttcctttctggccaaggtgggcggtgttagattgtgaggcacgtacatggggcctgccggaatgacttaaatatttgtctccagtctccactgttggctctccagcaaccaaagtacaacactccaagatgggttcatcttttcttcctttcccattcacctggctcaatcctcctccaccaccaggggcctcaaaaggcacatcatccgggtctccttatcttgtttgataaggctgctgcctgtctcccttctggcgggagtccaggaggcagcagctcaggacatggtgctgtgtgtgtgtgtgtgtgtgtgtgtgtgtgtgtgtgtgtgtcagaggttccagaaagttccagatttggaatcaaacagtcctgaattcaaatccttgtttttgcacttattgtctggagagctttggataaggtattgaatctctctgagcctcagtttttcatttgttcaaatggcactgatgatgtctcccttacaagatggttgtgaggagtaaatgtgatcagcatgtaaagtgtctggcgtgtagtaggctcttaataaacactggctgaatatgaattggaatgataaaaaaaaaaag

SEQ ID NO: 421241 - DNA, 1494 bp, Homo sapiens
aagctagtagaggcggtggtgaattcggccgaggatgtcccgctggggtggcattatggtatataatgttgactccaaaacctataatgcctcagtgctgccagtgagagtcgaggtggacatggtgcgagtgatggaggtgttcctggcacagttgcggttgctctttgggattgctcagccccagctgcctccaaaatgcctgctttcagggcctacgagtgaagggctaatgacctgggagctagaccggctgctctgggctcggtcagtggagaacctggccacagccaccaccacccttacctccctggcgcagcttctgggcaagatcagcaacattgtcattaaggacgacgtggcatctgaggtgtacaaggctgtagctgccgtccagaagtcggcagaagagttggcgtctgggcacctggcatctgcctttgtcgccagccaggaagctgtgacatcctctgagcttgccttctttgacccgtcactcctccacctcctttatttccctgatgaccagaagtttgccatctacatcccactcttcctgcctatggctgtgcccatcctcctgtccctggtcaagatcttcctggagacccgcaagtcctggagaaagcctgagaagacagactgagcagggcagcacctccataggaagccttcctttctggccaaggtgggcggtgttagattgtgaggcacgtacatggggcctgccggaatgacttaaatatttgtctccagtctccactgttggctctccagcaaccaaagtacaacactccaagatgggttcatcttttcttcctttcccattcacctggctcaatcctcctccaccaccaggggcctcaaaaggcacatcatccgggtctccttatcttgtttgataaggctgctgcctgtctccctctgtggcaaggactgtttgttcttttgccccatttctcaacatagcacacttgtgcactgagaggagggagcattatgggaaagtccctgccttccacacctctctctagtccctgtgggacagccctagcccctgctgtcatgaaggggccaggcattggtcacctgtgggaccttctccctcactcccctccctcctagttggctttgtctgtcaggtgcagtctggcgggagtccaggaggcagcagctcaggacatggtgctgtgtgtgtgtgtgtgtgtgtgtgtgtgtgtgtgtgtgtgtcagaggttccagaaagttccagatttggaatcaaacagtcctgaattcaaatccttgtttttgcacttattgtctggagagctttggataaggtattgaatctctctgagcctcagtttttcatttgttcaaatggcactgatgatgtctcccttacaagatggttgtgaggagtaaatgtgatcagcatgtaaagtgtctggcgtgtagtaggctcttaataaacactggctgaatatgaattggaatgataaaaaaaaaaag

SEQ ID NO: 421242 - DNA, 2643 bp, Homo sapiens
ctcgcccgccccggcccggcagcgaatgagcgggcgcgccgggagggcgcgaggtcagggggctggggacgcgcgtggggatcgctacccggctcggccactgctgggcggacacctgggcgcgccgccgcgggaggagcccggactcgggccgaggctgcccaggcaatgcgttcactcggcgcaaacatggctgcggccctgcgcgccgcgggcgtcctgctccgcgatccgctggcatccagcagctggagggtctgtcagccatggaggtggaagtcaggtgcagctgcagcggccgtcaccacagaaacagcccagcatgcccagggtgcaaaacctcaagttcaaccgcagaagaggaagccgaaaactggaatattaatgctaaacatgggaggccctgaaactcttggagatgttcacgacttccttctgagactcttcttggaccgagacctcatgacacttcctattcagaataagctggcaccattcatcgccaaacgccgaacccccaagattcaagagcagtaccgcaggattggaggcggatcccccatcaagatatggacttccaagcagggagagggcatggtgaagctgctggatgaattgtcccccaacacagcccctcacaaatactatattggatttcggtacgtccatcctttaacagaagaagcaattgaagagatggagagagatggcctagaaagggctattgctttcacacagtatccacagtacagctgctccaccacaggcagcagcttaaatgccatttacagatactataatcaagtgggacggaagcccacgatgaagtggagcactattgacaggtggcccacacatcacctcctcatccagtgctttgcagatcatattctaaaggaactggaccattttccacttgagaagagaagcgaggtggtcattctgttttctgctcactcactgccgatgtctgtggtcaacagaggcgacccatatcctcaggaggtaagcgccactgtccaaaaagtcatggaaaggctggagtactgcaacccctaccgactggtgtggcaatccaaggttggtccgatgccctggttgggtcctcaaacagacgaatctatcaaagggctttgtgagagggggaggaagaatatcctcttggttccgatagcatttaccagtgaccatattgaaacgctgtatgagctggacatcgagtactctcaagttttagccaaggagtgtggagttgaaaacatcagaagagctgagtctcttaatggaaatccattgttctctaaggccctggccgacttggtgcattcacacatccagtcaaacgagctgtgttccaagcagctgaccctgagctgtccgctctgtgtcaatcctgtctgcagggagactaaatccttcttcaccagccagcagctgtgacccccgccggtggaccccgtggcgttaggcaaatgcccaacctccagatacctccgatgtggagagggtgttatttagagatcaaggaaggaagtcatccttccttgatatatatacagcctttgggtacaaattgtgtggtttcttgaggattggactcttgatggatttctatttttatataactatacagtaagcatttgtattttctctctctaggtataagttactagtttggaatgtccatcaggacctttaataaatgagttaaaaatttgtcttatgagacacacctatttaagtacagattttggctttattgcccaaaaccctcctgaaagggtacggagagtcccctctgtgggctggcagtgtgaatgagatctgtttagtctcgtgcatatagttgctgttttttaaatgaacacagttgagtatttgaagtgaatttgaaaaagaaatgttacttaatctttccctaagcccatgggttacagaatgctagggaggcaatttggttacctgcaatggctgcttttgccagcgaggccaccattcattggtcatcttggtatttgtgtgtgaatctcactttcctcaatgtaaaaaggaatcaagtatggatttcagaggtgctcttagattccccatacacccaagggtaataaacgtgtacaagtacagtgttcatgatacgtgccttggtgggagtccgtggtgccacagggaaggggctcccactgcttctggtctccagggacagtgctgctggaaaggctagtgatgagcttcaccctggagctcctcccgggaccttgcaagcctctccatccagcatcttctctatcttagttgaatgccttctttctgaacatttgttttaagaattattttataaagtcaacaatactttgcttgaattctttcttaatttacgattttttattataaaaatgtatagtgatacaatgggacatgtgaagaatacagaaaagtaaccactttaatgcaataactgttatcataatattgtatttcgtggtagtcctttcctgtagatatttttaatgccatttaatgccattgtcaccttggatttatgagtgaaaagtgtttctaaaaatatagaaataatgtcagatcagagtctgatcttctatgtttgtatttaaatggattaaaagatccccggtggttccatga

SEQ ID NO: 421243 - DNA, 3766 bp, Homo sapiens
ctcgcccgccccggcccggcagcgaatgagcgggcgcgccgggagggcgcgaggtcagggggctggggacgcgcgtggggatcgctacccggctcggccactgctgggcggacacctgggcgcgccgccgcgggaggagcccggactcgggccgaggctgcccaggcaatgcgttcactcggcgcaaacatggctgcggccctgcgcgccgcgggcgtcctgctccgcgatccgctggcatccagcagctggagggtctgtcagccatggaggtggaagtcaggtgcagctgcagcggccgtcaccacagaaacagcccagcatgcccagggtgcaaaacctcaagttcaaccgcagaagaggaagccgaaaactggaatattaatgctaaacatgggaggccctgaaactcttggagatgttcacgacttccttctgagactcttcttggaccgagacctcatgacacttcctattcagaataagctggcaccattcatcgccaaacgccgaacccccaagattcaagagcagtaccgcaggattggaggcggatcccccatcaagatatggacttccaagcagggagagggcatggtgaagctgctggatgaattgtcccccaacacagcccctcacaaatactatattggatttcggtacgtccatcctttaacagaagaagcaattgaagagatggagagagatggcctagaaagggctattgctttcacacagtatccacagtacagctgctccaccacaggcagcagcttaaatgccatttacagatactataatcaagtgggacggaagcccacgatgaagtggagcactattgacaggtggcccacacatcacctcctcatccaggtggtcaacagaggcgacccatatcctcaggaggtaagcgccactgtccaaaaagtcatggaaaggctggagtactgcaacccctaccgactggtgtggcaatccaaggttggtccgatgccctggttgggtcctcaaacagacgaatctatcaaagggctttgtgagagggggaggaagaatatcctcttggttccgatagcatttaccagtgaccatattgaaacgctgtatgagctggacatcgagtactctcaagttttagccaaggagtgtggagttgaaaacatcagaagagctgagtctcttaatggaaatccattgttctctaaggccctggccgacttggtgcattcacacatccagtcaaacgagctgtgttccaagcagctgaccctgagctgtccgctctgtgtcaatcctgtctgcagggagactaaatccttcttcaccagccagcagctgtgacccccgccggtggaccccgtggcgttaggcaaatgcccaacctccagatacctccgatgtggagagggtgttatttagagatcaaggaaggaagtcatccttccttgatatatatacagcctttgggtacaaattgtgtggtttcttgaggattggactcttgatggatttctatttttatataactatacagtaagcatttgtattttctctctctaggtataagttactagtttggaatgtccatcaggacctttaataaatgagttaaaaatttgtcttatgagacacacctatttaagtacagattttggctttattgcccaaaaccctcctgaaagggtacggagagtcccctctgtgggctggcagtgtgaatgagatctgtttagtctcgtgcatatagttgctgttttttaaatgaacacagttgagtatttgaagtgaatttgaaaaagaaatgttacttaatctttccctaagcccatgggttacagaatgctagggaggcaatttggttacctgcaatggctgcttttgccagcgaggccaccattcattggtcatcttggtatttgtgtgtgaatctcactttcctcaatgtaaaaaggaatcaagtatggatttcagaggtgctcttagattccccatacacccaagggtaataaacgtgtacaagtacagtgttcatgatacgtgccttggtgggagtccgtggtgccacagggaaggggctcccactgcttctggtctccagggacagtgctgctggaaaggctagtgatgagcttcaccctggagctcctcccgggaccttgcaagcctctccatccagcatcttctctatcttagttgaatgccttctttctgaacatttgttttaagaattattttataaagtcaacaatactttgcttgaattctttcttaatttacgattttttattataaaaatgtatagtgatacaatgggacatgtgaagaatacagaaaagtaaccactttaatgcaataactgttatcataatattgtatttcgtggtagtcctttcctgtagatatttttaatgccatttaatgccattgtcaccttggatttatgagtgaaaagtgtttctaaaaatatagaaataatgtcagatcagagtctgatcttctatgtttgtatttaaatggattaaaagatccccggtggttccatgaagaatttgtaaagatcactttctctttcctccaagccctgaaactttgttcttcaaaagagcgtttcttttttttttttttttttaagccagtttataaagtggaagtattaggagattcataaatcttctatattgagaattggctatgttaataaatattacaacatcattaaggttttagctaagtttgattcatgctgtctgttaaatcaaaactgatctaaatcagaattattaaatgtgaggagcttttttaatacaggaaaagaaacatgtcatccacttgagttaatagttttcctacgttgatgacagccctcatgagtagcatccacatttttaaaatttcaaattggtttttctactagtagattgtgtttctagagaaagatacaaggcataggtgattgtttaggattttcctctagcctttgccattacctttttggggatgaggttcacagtagactttgagtgaccgtcccaccgtgaagtgaattctctgagctggtggtgtggtgctggaaggaaggttatttttggagccactctctccccttaaggatatttcccaagggcctgcttcaattctttgatgactttagaggtgaaaaaatatttttatggagatgatgcagaaaactccaattcaggagcccttgcgagtatatctgaagcacttatttgctaaggaaacctgaattgatagcagtactgtgctgtctggaataatgtccttgatactgagttgggaccagactggcttttatagtgacaggcaaagaggaatttattgagatcactgctcatggcatttgttgctgtaagaagtgttgcctttgattgttactaaccacggatgggtaacggtcatacattaggctagtgtttggtaggacaaaatctttttagagctttgagaattgtcatcctgttggtcaactttgaaatacaaatgtttgccctggtaattagcaatgaactgctggcagtttcttcagctgtgtatatacggatctggcttttaattgatgaatcaacttctacagaaacttttgcagggacagtgttgatgaggcagtttagcttgccagggtgatgataaagcccaggtccctgcatgtatagtgctcttctaaagaatatgcattcttgaactacttaactttttaaaaatcacaataaatttttgcactcaaaatttgcttcgtatcaggaga

SEQ ID NO: 421244 - DNA, 3547 bp, Homo sapiens
cactataggctaggtacgaggctgggtggtttctgagactcttcttggacgcagactcatgacacttcctattcagaaggaagtcgtgaacatctccaagagtttcaggccttccttctgagactcttcttggaccgagacctcatgacacttcctattcagaataagctggcaccattcatcgccaaacgccgaacccccaagattcaagagcagtaccgcaggattggaggcggatcccccatcaagatatggacttccaagcagggagagggcatggtgaagctgctggatgaattgtcccccaacacagcccctcacaaatactatattggatttcggtacgtccatcctttaacagaagaagcaattgaagagatggagagagatggcctagaaagggctattgctttcacacagtatccacagtacagctgctccaccacaggcagcagcttaaatgccatttacagatactataatcaagtgggacggaagcccacgatgaagtggagcactattgacaggtggcccacacatcacctcctcatccagtgctttgcagatcatattctaaaggaactggaccattttccacttgagaagagaagcgaggtggtcattctgttttctgctcactcactgccgatgtctgtggtcaacagaggcgacccatatcctcaggaggtaagcgccactgtccaaaaagtcatggaaaggctggagtactgcaacccctaccgactggtgtggcaatccaaggttggtccgatgccctggttgggtcctcaaacagacgaatctatcaaagggctttgtgagagggggaggaagaatatcctcttggttccgatagcatttaccagtgaccatattgaaacgctgtatgagctggacatcgagtactctcaagttttagccaaggagtgtggagttgaaaacatcagaagagctgagtctcttaatggaaatccattgttctctaaggccctggccgacttggtgcattcacacatccagtcaaacgagctgtgttccaagcagctgaccctgagctgtccgctctgtgtcaatcctgtctgcagggagactaaatccttcttcaccagccagcagctgtgacccccgccggtggaccccgtggcgttaggcaaatgcccaacctccagatacctccgatgtggagagggtgttatttagagatcaaggaaggaagtcatccttccttgatatatatacagcctttgggtacaaattgtgtggtttcttgaggattggactcttgatggatttctatttttatataactatacagtaagcatttgtattttctctctctaggtataagttactagtttggaatgtccatcaggacctttaataaatgagttaaaaatttgtcttatgagacacacctatttaagtacagattttggctttattgcccaaaaccctcctgaaagggtacggagagtcccctctgtgggctggcagtgtgaatgagatctgtttagtctcgtgcatatagttgctgttttttaaatgaacacagttgagtatttgaagtgaatttgaaaaagaaatgttacttaatctttccctaagcccatgggttacagaatgctagggaggcaatttggttacctgcaatggctgcttttgccagcgaggccaccattcattggtcatcttggtatttgtgtgtgaatctcactttcctcaatgtaaaaaggaatcaagtatggatttcagaggtgctcttagattccccatacacccaagggtaataaacgtgtacaagtacagtgttcatgatacgtgccttggtgggagtccgtggtgccacagggaaggggctcccactgcttctggtctccagggacagtgctgctggaaaggctagtgatgagcttcaccctggagctcctcccgggaccttgcaagcctctccatccagcatcttctctatcttagttgaatgccttctttctgaacatttgttttaagaattattttataaagtcaacaatactttgcttgaattctttcttaatttacgattttttattataaaaatgtatagtgatacaatgggacatgtgaagaatacagaaaagtaaccactttaatgcaataactgttatcataatattgtatttcgtggtagtcctttcctgtagatatttttaatgccatttaatgccattgtcaccttggatttatgagtgaaaagtgtttctaaaaatatagaaataatgtcagatcagagtctgatcttctatgtttgtatttaaatggattaaaagatccccggtggttccatgaagaatttgtaaagatcactttctctttcctccaagccctgaaactttgttcttcaaaagagcgtttcttttttttttttttttttaagccagtttataaagtggaagtattaggagattcataaatcttctatattgagaattggctatgttaataaatattacaacatcattaaggttttagctaagtttgattcatgctgtctgttaaatcaaaactgatctaaatcagaattattaaatgtgaggagcttttttaatacaggaaaagaaacatgtcatccacttgagttaatagttttcctacgttgatgacagccctcatgagtagcatccacatttttaaaatttcaaattggtttttctactagtagattgtgtttctagagaaagatacaaggcataggtgattgtttaggattttcctctagcctttgccattacctttttggggatgaggttcacagtagactttgagtgaccgtcccaccgtgaagtgaattctctgagctggtggtgtggtgctggaaggaaggttatttttggagccactctctccccttaaggatatttcccaagggcctgcttcaattctttgatgactttagaggtgaaaaaatatttttatggagatgatgcagaaaactccaattcaggagcccttgcgagtatatctgaagcacttatttgctaaggaaacctgaattgatagcagtactgtgctgtctggaataatgtccttgatactgagttgggaccagactggcttttatagtgacaggcaaagaggaatttattgagatcactgctcatggcatttgttgctgtaagaagtgttgcctttgattgttactaaccacggatgggtaacggtcatacattaggctagtgtttggtaggacaaaatctttttagagctttgagaattgtcatcctgttggtcaactttgaaatacaaatgtttgccctggtaattagcaatgaactgctggcagtttcttcagctgtgtatatacggatctggcttttaattgatgaatcaacttctacagaaacttttgcagggacagtgttgatgaggcagtttagcttgccagggtgatgataaagcccaggtccctgcatgtatagtgctcttctaaagaatatgcattcttgaactacttaactttttaaaaatcacaataaatttttgcactcaaaatttgcttcgtatcaggaga

SEQ ID NO: 421245 - DNA, 3493 bp, Homo sapiens
ctcgcccgccccggcccggcagcgaatgagcgggcgcgccgggagggcgcgaggtcagggggctggggacgcgcgtggggatcgctacccggctcggccactgctgggcggacacctgggcgcgccgccgcgggaggagcccggactcgggccgaggctgcccaggcaatgcgttcactcggcgcaaacatggctgcggccctgcgcgccgcgggcgtcctgctccgcgatccgctggatgaattgtcccccaacacagcccctcacaaatactatattggatttcggtacgtccatcctttaacagaagaagcaattgaagagatggagagagatggcctagaaagggctattgctttcacacagtatccacagtacagctgctccaccacaggcagcagcttaaatgccatttacagatactataatcaagtgggacggaagcccacgatgaagtggagcactattgacaggtggcccacacatcacctcctcatccagtgctttgcagatcatattctaaaggaactggaccattttccacttgagaagagaagcgaggtggtcattctgttttctgctcactcactgccgatgtctgtggtcaacagaggcgacccatatcctcaggaggtaagcgccactgtccaaaaagtcatggaaaggctggagtactgcaacccctaccgactggtgtggcaatccaaggttggtccgatgccctggttgggtcctcaaacagacgaatctatcaaagggctttgtgagagggggaggaagaatatcctcttggttccgatagcatttaccagtgaccatattgaaacgctgtatgagctggacatcgagtactctcaagttttagccaaggagtgtggagttgaaaacatcagaagagctgagtctcttaatggaaatccattgttctctaaggccctggccgacttggtgcattcacacatccagtcaaacgagctgtgttccaagcagctgaccctgagctgtccgctctgtgtcaatcctgtctgcagggagactaaatccttcttcaccagccagcagctgtgacccccgccggtggaccccgtggcgttaggcaaatgcccaacctccagatacctccgatgtggagagggtgttatttagagatcaaggaaggaagtcatccttccttgatatatatacagcctttgggtacaaattgtgtggtttcttgaggattggactcttgatggatttctatttttatataactatacagtaagcatttgtattttctctctctaggtataagttactagtttggaatgtccatcaggacctttaataaatgagttaaaaatttgtcttatgagacacacctatttaagtacagattttggctttattgcccaaaaccctcctgaaagggtacggagagtcccctctgtgggctggcagtgtgaatgagatctgtttagtctcgtgcatatagttgctgttttttaaatgaacacagttgagtatttgaagtgaatttgaaaaagaaatgttacttaatctttccctaagcccatgggttacagaatgctagggaggcaatttggttacctgcaatggctgcttttgccagcgaggccaccattcattggtcatcttggtatttgtgtgtgaatctcactttcctcaatgtaaaaaggaatcaagtatggatttcagaggtgctcttagattccccatacacccaagggtaataaacgtgtacaagtacagtgttcatgatacgtgccttggtgggagtccgtggtgccacagggaaggggctcccactgcttctggtctccagggacagtgctgctggaaaggctagtgatgagcttcaccctggagctcctcccgggaccttgcaagcctctccatccagcatcttctctatcttagttgaatgccttctttctgaacatttgttttaagaattattttataaagtcaacaatactttgcttgaattctttcttaatttacgattttttattataaaaatgtatagtgatacaatgggacatgtgaagaatacagaaaagtaaccactttaatgcaataactgttatcataatattgtatttcgtggtagtcctttcctgtagatatttttaatgccatttaatgccattgtcaccttggatttatgagtgaaaagtgtttctaaaaatatagaaataatgtcagatcagagtctgatcttctatgtttgtatttaaatggattaaaagatccccggtggttccatgaagaatttgtaaagatcactttctctttcctccaagccctgaaactttgttcttcaaaagagcgtttcttttttttttttttttttaagccagtttataaagtggaagtattaggagattcataaatcttctatattgagaattggctatgttaataaatattacaacatcattaaggttttagctaagtttgattcatgctgtctgttaaatcaaaactgatctaaatcagaattattaaatgtgaggagcttttttaatacaggaaaagaaacatgtcatccacttgagttaatagttttcctacgttgatgacagccctcatgagtagcatccacatttttaaaatttcaaattggtttttctactagtagattgtgtttctagagaaagatacaaggcataggtgattgtttaggattttcctctagcctttgccattacctttttggggatgaggttcacagtagactttgagtgaccgtcccaccgtgaagtgaattctctgagctggtggtgtggtgctggaaggaaggttatttttggagccactctctccccttaaggatatttcccaagggcctgcttcaattctttgatgactttagaggtgaaaaaatatttttatggagatgatgcagaaaactccaattcaggagcccttgcgagtatatctgaagcacttatttgctaaggaaacctgaattgatagcagtactgtgctgtctggaataatgtccttgatactgagttgggaccagactggcttttatagtgacaggcaaagaggaatttattgagatcactgctcatggcatttgttgctgtaagaagtgttgcctttgattgttactaaccacggatgggtaacggtcatacattaggctagtgtttggtaggacaaaatctttttagagctttgagaattgtcatcctgttggtcaactttgaaatacaaatgtttgccctggtaattagcaatgaactgctggcagtttcttcagctgtgtatatacggatctggcttttaattgatgaatcaacttctacagaaacttttgcagggacagtgttgatgaggcagtttagcttgccagggtgatgataaagcccaggtccctgcatgtatagtgctcttctaaagaatatgcattcttgaactacttaactttttaaaaatcacaataaatttttgcactcaaaatttgcttcgtatcaggaga

SEQ ID NO: 421246 - DNA, 1448 bp, Homo sapiens
ctcgcccgccccggcccggcagcgaatgagcgggcgcgccgggagggcgcgaggtcagggggctggggacgcgcgtggggatcgctacccggctcggccactgctgggcggacacctgggcgcgccgccgcgggaggagcccggactcgggccgaggctgcccaggcaatgcgttcactcggcgcaaacatggctgcggccctgcgcgccgcgggcgtcctgctccgcgatccgctggcatccagcagctggagggtctgtcagccatggaggtggaagtcaggtgcagctgcagcggccgtcaccacagaaacagcccagcatgcccagggtgcaaaacctcaagttcaaccgcagaagaggaagccgaaaactggaatattaatgctaaacatgggaggccctgaaactcttggagatgttcacgacttccttctgagactcttcttggaccgagacctcatgacacttcctattcagaataagctggcaccattcatcgccaaacgccgaacccccaagattcaagagcagtaccgcaggattggaggcggatcccccatcaagatatggacttccaagcagggagagggcatggtgaagctgctggatgaattgtcccccaacacagcccctcacaaatactatattggatttcggtacgtccatcctttaacagaagaagcaattgaagagatggagagagatggcctagaaagggctattgctttcacacagtatccacagtacagctgctccaccacaggcagcagcttaaatgccatttacagatactataatcaagtgggacggaagcccacgatgaagtggagcactattgacaggtggcccacacatcacctcctcatccagtgctttgcagatcatattctaaaggaactggaccattttccacttgagaagagaagcgaggtggtcattctgttttctgctcactcactgccgatgtctgtggtcaacagaggcgacccatatcctcaggaggtaagcgccactgtccaaaaagtcatggaaaggctggagtactgcaacccctaccgactggtgtggcaatccaaggttggtccgatgccctggttgggtcctcaaacagacgaatctatcaaagggctttgtgagagggggaggaagaatatcctcttggttccgatagcatttaccagtgaccatattgaaacgctgtatgagctggacatcgagtactctcaagttttagccaaggagtgtggagttgaaaacatcagaagagctgagtctcttaatggaaatccattgttctctaaggtatctacagtgttacaatcgttttagtagaacataccagagagtaatcctctgagaaactcttgcagaatattggtttttctcacatattagaacatttggagttccaattaattacaaaaataaaatcgaattccttatct

SEQ ID NO: 421247 - DNA, 858 bp, Homo sapiens
  misc_feature (2)..(2): n is a, c, g, or t
gntcgctctagagtatccccccactctagtccaaggcataggtgattgtttaggattttcctctagcctttgccattacctttttggggatgaggttcacagtagactttgagtgaccgtcccaccgtgaagtgaattctctgagctggtggtgtggtgctggaaggaaggttatttttggagccactctctccccttaaggatatttcccaagggcctgcttcaattctttgatgactttagaggtgaaaaaatatttttatggagatgatgcagaaaactccaattcaggagcccttgcgagtatatctgaagcacttatttgctaaggaaacctgaattgatagcagtactgtgctgtctggaataatgtccttgatactgagttgggaccagactggcttttatagtgacaggcaaagaggaatttattgagatcactgctcatggcatttgttgctgtaagaagtgttgcctttgattgttactaaccacggatgggtaacggtcatacattaggctagtgtttggtaggacaaaatctttttagagctttgagaattgtcatcctgttggtcaactttgaaatacaaatgtttgccctggtaattagcaatgaactgctggcagtttcttcagctgtgtatatacggatctggcttttaattgatgaatcaacttctacagaaacttttgcagggacagtgttgatgaggcagtttagcttgccagggtgatgataaagcccaggtccctgcatgtatagtgctcttctaaagaatatgcattcttgaactacttaactttttaaaaatcacaataaatttttgcactcaaaatttgcttcgtatcaggaga

SEQ ID NO: 421248 - DNA, 503 bp, Homo sapiens
ctcgcccgccccggcccggcagcgaatgagcgggcgcgccgggagggcgcgaggtcagggggctggggacgcgcgtggggatcgctacccggctcggccactgctgggcggacacctgggcgcgccgccgcgggaggagcccggactcgggccgaggctgcccaggcaatgcgttcactcggcgcaaacatggctgcggccctgcgcgccgcgggcgtcctgctccgcgatccgctggcatccagcagctggagggtctgtcagccatggaggtggaagtcaggtgcagctgcagcggccgtcaccacagaaacagcccagcatgcccagggtgcaaaacctcaagttcaaccgcagaagaggaagccgaaaactggaatattaatgctaaacatgggaggccctgaaactcttggagatgttcacgacttccttctgagactcttcttggaccgagacctcatgacacttcctattcagaagtgagatatatataaacacct

SEQ ID NO: 421249 - DNA, 426 bp, Homo sapiens
ggaaacttgaagttgggagaggtcaggtaacctctgtattcatatggtactcacatgtacaggtgctttagctgcaggacaattttagatttctaccttgactcccagtccctaaaggttcgatctctcttcaggccgagactttaaaagggaaacatttctagcggagtgaagactgatatcatgaattaagccaaaagacaaaggtccaagtctgagctgggaccatggggaactggaggccacagatgtccccgaataggtatctgtgtgacggcagtgaaaagagccatagtatttacctttgtatggaacagattagagtttgctggctgaaccaagagtccaccctggaagaaaataagaagtgtgacaaatcaaccgttgtattttattttatataggaagccgaaaactggaatatta

SEQ ID NO: 421250 - DNA, 251 bp, Homo sapiens
tccttccatttctttcttcccttcctctttatcctcctttcttgttactcactcagtgctttgcagatcatattctaaaggaactggaccattttccacttgagaagagaagcgaggtggtcattctgttttctgctcactcactgccgatgtctgtaagtaagaacattttctgggatgacctagtgatagaggattgggtgatttcattttctaaatgtgtaaaatgggtccagcttccattatgtcct

SEQ ID NO: 421251 - DNA, 638 bp, Homo sapiens
aagtgtaaccacaaaaaggatttgcaaacaaaccacctttaggaaggtaatggggaaggggaagggacataagaattgaggaataatttatgataacagaatcaacatacagccctgccccatgagtatttttcattaatgagcagtctgcgaacagttgaagtcagactttgaattgtgtgtgtgtatctgtgtgtatttatttttttgtagcagtttctttgaaaaaaaaggaaaataaaatatatctgtgtttttcctcccttttctcatttgattcagtgtggagttgaaaacatcagaagagctgagtctcttaatggaaatccattgttctctaaggtatctacagtgttacaatcgttttagtagaacataccagagagtaatcctctgagaaactcttgcagaatattggtttttctcacatattagaacatttggagttccaattaattacaaaaataaaatcgaattccttatctcagtcttttttccttcagatagccccaattttctgatttctacccacctataactatgtctgatttaaaacctgctttccagagaaaaggcctagtgggtagggtaagaggttttcatctcctgaaatctctgttttaactttctgtaagctg

SEQ ID NO: 421252 - DNA, 3865 bp, Homo sapiens
ctcgcccgccccggcccggcagcgaatgagcgggcgcgccgggagggcgcgaggtcagggggctggggacgcgcgtggggatcgctacccggctcggccactgctgggcggacacctgggcgcgccgccgcgggaggagcccggactcgggccgaggctgcccaggcaatgcgttcactcggcgcaaacatggctgcggccctgcgcgccgcgggcgtcctgctccgcgatccgctggcatccagcagctggagggtctgtcagccatggaggtggaagtcaggtgcagctgcagcggccgtcaccacagaaacagcccagcatgcccagggtgcaaaacctcaagttcaaccgcagaagaggaagccgaaaactggaatattaatgctaaacatgggaggccctgaaactcttggagatgttcacgacttccttctgagactcttcttggaccgagacctcatgacacttcctattcagaataagctggcaccattcatcgccaaacgccgaacccccaagattcaagagcagtaccgcaggattggaggcggatcccccatcaagatatggacttccaagcagggagagggcatggtgaagctgctggatgaattgtcccccaacacagcccctcacaaatactatattggatttcggtacgtccatcctttaacagaagaagcaattgaagagatggagagagatggcctagaaagggctattgctttcacacagtatccacagtacagctgctccaccacaggcagcagcttaaatgccatttacagatactataatcaagtgggacggaagcccacgatgaagtggagcactattgacaggtggcccacacatcacctcctcatccagtgctttgcagatcatattctaaaggaactggaccattttccacttgagaagagaagcgaggtggtcattctgttttctgctcactcactgccgatgtctgtggtcaacagaggcgacccatatcctcaggaggtaagcgccactgtccaaaaagtcatggaaaggctggagtactgcaacccctaccgactggtgtggcaatccaaggttggtccgatgccctggttgggtcctcaaacagacgaatctatcaaagggctttgtgagagggggaggaagaatatcctcttggttccgatagcatttaccagtgaccatattgaaacgctgtatgagctggacatcgagtactctcaagttttagccaaggagtgtggagttgaaaacatcagaagagctgagtctcttaatggaaatccattgttctctaaggccctggccgacttggtgcattcacacatccagtcaaacgagctgtgttccaagcagctgaccctgagctgtccgctctgtgtcaatcctgtctgcagggagactaaatccttcttcaccagccagcagctgtgacccccgccggtggaccccgtggcgttaggcaaatgcccaacctccagatacctccgatgtggagagggtgttatttagagatcaaggaaggaagtcatccttccttgatatatatacagcctttgggtacaaattgtgtggtttcttgaggattggactcttgatggatttctatttttatataactatacagtaagcatttgtattttctctctctaggtataagttactagtttggaatgtccatcaggacctttaataaatgagttaaaaatttgtcttatgagacacacctatttaagtacagattttggctttattgcccaaaaccctcctgaaagggtacggagagtcccctctgtgggctggcagtgtgaatgagatctgtttagtctcgtgcatatagttgctgttttttaaatgaacacagttgagtatttgaagtgaatttgaaaaagaaatgttacttaatctttccctaagcccatgggttacagaatgctagggaggcaatttggttacctgcaatggctgcttttgccagcgaggccaccattcattggtcatcttggtatttgtgtgtgaatctcactttcctcaatgtaaaaaggaatcaagtatggatttcagaggtgctcttagattccccatacacccaagggtaataaacgtgtacaagtacagtgttcatgatacgtgccttggtgggagtccgtggtgccacagggaaggggctcccactgcttctggtctccagggacagtgctgctggaaaggctagtgatgagcttcaccctggagctcctcccgggaccttgcaagcctctccatccagcatcttctctatcttagttgaatgccttctttctgaacatttgttttaagaattattttataaagtcaacaatactttgcttgaattctttcttaatttacgattttttattataaaaatgtatagtgatacaatgggacatgtgaagaatacagaaaagtaaccactttaatgcaataactgttatcataatattgtatttcgtggtagtcctttcctgtagatatttttaatgccatttaatgccattgtcaccttggatttatgagtgaaaagtgtttctaaaaatatagaaataatgtcagatcagagtctgatcttctatgtttgtatttaaatggattaaaagatccccggtggttccatgaagaatttgtaaagatcactttctctttcctccaagccctgaaactttgttcttcaaaagagcgtttcttttttttttttttttttaagccagtttataaagtggaagtattaggagattcataaatcttctatattgagaattggctatgttaataaatattacaacatcattaaggttttagctaagtttgattcatgctgtctgttaaatcaaaactgatctaaatcagaattattaaatgtgaggagcttttttaatacaggaaaagaaacatgtcatccacttgagttaatagttttcctacgttgatgacagccctcatgagtagcatccacatttttaaaatttcaaattggtttttctactagtagattgtgtttctagagaaagatacaaggcataggtgattgtttaggattttcctctagcctttgccattacctttttggggatgaggttcacagtagactttgagtgaccgtcccaccgtgaagtgaattctctgagctggtggtgtggtgctggaaggaaggttatttttggagccactctctccccttaaggatatttcccaagggcctgcttcaattctttgatgactttagaggtgaaaaaatatttttatggagatgatgcagaaaactccaattcaggagcccttgcgagtatatctgaagcacttatttgctaaggaaacctgaattgatagcagtactgtgctgtctggaataatgtccttgatactgagttgggaccagactggcttttatagtgacaggcaaagaggaatttattgagatcactgctcatggcatttgttgctgtaagaagtgttgcctttgattgttactaaccacggatgggtaacggtcatacattaggctagtgtttggtaggacaaaatctttttagagctttgagaattgtcatcctgttggtcaactttgaaatacaaatgtttgccctggtaattagcaatgaactgctggcagtttcttcagctgtgtatatacggatctggcttttaattgatgaatcaacttctacagaaacttttgcagggacagtgttgatgaggcagtttagcttgccagggtgatgataaagcccaggtccctgcatgtatagtgctcttctaaagaatatgcattcttgaactacttaactttttaaaaatcacaataaatttttgcactcaaaatttgcttcgtatcaggaga

SEQ ID NO: 421253 - DNA, 3928 bp, Homo sapiens
ctcgcccgccccggcccggcagcgaatgagcgggcgcgccgggagggcgcgaggtcagggggctggggacgcgcgtggggatcgctacccggctcggccactgctgggcggacacctgggcgcgccgccgcgggaggagcccggactcgggccgaggctgcccaggcaatgcgttcactcggcgcaaacatggctgcggccctgcgcgccgcgggcgtcctgctccgcgatccgctggcatccagcagctggagggtctgtcagccatggaggtggaagtcaggtgcagctgcagcggccgtcaccacagaaacagcccagcatgcccagggtgcaaaacctcaagttcaaccgcagaagaggaagccgaaaactggaatattaatgctaaacatgggaggccctgaaactcttggagatgttcacgacttccttctgagactcttcttggaccgagacctcatgacacttcctattcagaaaaaacatttctcaggttgctaagctggaataaaatccacttacctgtatgttaaatgatttagtaagctggcaccattcatcgccaaacgccgaacccccaagattcaagagcagtaccgcaggattggaggcggatcccccatcaagatatggacttccaagcagggagagggcatggtgaagctgctggatgaattgtcccccaacacagcccctcacaaatactatattggatttcggtacgtccatcctttaacagaagaagcaattgaagagatggagagagatggcctagaaagggctattgctttcacacagtatccacagtacagctgctccaccacaggcagcagcttaaatgccatttacagatactataatcaagtgggacggaagcccacgatgaagtggagcactattgacaggtggcccacacatcacctcctcatccagtgctttgcagatcatattctaaaggaactggaccattttccacttgagaagagaagcgaggtggtcattctgttttctgctcactcactgccgatgtctgtggtcaacagaggcgacccatatcctcaggaggtaagcgccactgtccaaaaagtcatggaaaggctggagtactgcaacccctaccgactggtgtggcaatccaaggttggtccgatgccctggttgggtcctcaaacagacgaatctatcaaagggctttgtgagagggggaggaagaatatcctcttggttccgatagcatttaccagtgaccatattgaaacgctgtatgagctggacatcgagtactctcaagttttagccaaggagtgtggagttgaaaacatcagaagagctgagtctcttaatggaaatccattgttctctaaggccctggccgacttggtgcattcacacatccagtcaaacgagctgtgttccaagcagctgaccctgagctgtccgctctgtgtcaatcctgtctgcagggagactaaatccttcttcaccagccagcagctgtgacccccgccggtggaccccgtggcgttaggcaaatgcccaacctccagatacctccgatgtggagagggtgttatttagagatcaaggaaggaagtcatccttccttgatatatatacagcctttgggtacaaattgtgtggtttcttgaggattggactcttgatggatttctatttttatataactatacagtaagcatttgtattttctctctctaggtataagttactagtttggaatgtccatcaggacctttaataaatgagttaaaaatttgtcttatgagacacacctatttaagtacagattttggctttattgcccaaaaccctcctgaaagggtacggagagtcccctctgtgggctggcagtgtgaatgagatctgtttagtctcgtgcatatagttgctgttttttaaatgaacacagttgagtatttgaagtgaatttgaaaaagaaatgttacttaatctttccctaagcccatgggttacagaatgctagggaggcaatttggttacctgcaatggctgcttttgccagcgaggccaccattcattggtcatcttggtatttgtgtgtgaatctcactttcctcaatgtaaaaaggaatcaagtatggatttcagaggtgctcttagattccccatacacccaagggtaataaacgtgtacaagtacagtgttcatgatacgtgccttggtgggagtccgtggtgccacagggaaggggctcccactgcttctggtctccagggacagtgctgctggaaaggctagtgatgagcttcaccctggagctcctcccgggaccttgcaagcctctccatccagcatcttctctatcttagttgaatgccttctttctgaacatttgttttaagaattattttataaagtcaacaatactttgcttgaattctttcttaatttacgattttttattataaaaatgtatagtgatacaatgggacatgtgaagaatacagaaaagtaaccactttaatgcaataactgttatcataatattgtatttcgtggtagtcctttcctgtagatatttttaatgccatttaatgccattgtcaccttggatttatgagtgaaaagtgtttctaaaaatatagaaataatgtcagatcagagtctgatcttctatgtttgtatttaaatggattaaaagatccccggtggttccatgaagaatttgtaaagatcactttctctttcctccaagccctgaaactttgttcttcaaaagagcgtttcttttttttttttttttttaagccagtttataaagtggaagtattaggagattcataaatcttctatattgagaattggctatgttaataaatattacaacatcattaaggttttagctaagtttgattcatgctgtctgttaaatcaaaactgatctaaatcagaattattaaatgtgaggagcttttttaatacaggaaaagaaacatgtcatccacttgagttaatagttttcctacgttgatgacagccctcatgagtagcatccacatttttaaaatttcaaattggtttttctactagtagattgtgtttctagagaaagatacaaggcataggtgattgtttaggattttcctctagcctttgccattacctttttggggatgaggttcacagtagactttgagtgaccgtcccaccgtgaagtgaattctctgagctggtggtgtggtgctggaaggaaggttatttttggagccactctctccccttaaggatatttcccaagggcctgcttcaattctttgatgactttagaggtgaaaaaatatttttatggagatgatgcagaaaactccaattcaggagcccttgcgagtatatctgaagcacttatttgctaaggaaacctgaattgatagcagtactgtgctgtctggaataatgtccttgatactgagttgggaccagactggcttttatagtgacaggcaaagaggaatttattgagatcactgctcatggcatttgttgctgtaagaagtgttgcctttgattgttactaaccacggatgggtaacggtcatacattaggctagtgtttggtaggacaaaatctttttagagctttgagaattgtcatcctgttggtcaactttgaaatacaaatgtttgccctggtaattagcaatgaactgctggcagtttcttcagctgtgtatatacggatctggcttttaattgatgaatcaacttctacagaaacttttgcagggacagtgttgatgaggcagtttagcttgccagggtgatgataaagcccaggtccctgcatgtatagtgctcttctaaagaatatgcattcttgaactacttaactttttaaaaatcacaataaatttttgcactcaaaatttgcttcgtatcaggaga

SEQ ID NO: 421254 - DNA, 3606 bp, Homo sapiens
cccgctgaaacaagccctgctgaccccggcggactggaagcctctgcgctactgcccgacggcggtgctgctggtcctaacctcaagttcaaccgcagaagaggaagccgaaaactggaatattaatgctaaacatgggaggccctgaaactcttggagatgttcacgacttccttctgagactcttcttggaccgagacctcatgacacttcctattcagaataagctggcaccattcatcgccaaacgccgaacccccaagattcaagagcagtaccgcaggattggaggcggatcccccatcaagatatggacttccaagcagggagagggcatggtgaagctgctggatgaattgtcccccaacacagcccctcacaaatactatattggatttcggtacgtccatcctttaacagaagaagcaattgaagagatggagagagatggcctagaaagggctattgctttcacacagtatccacagtacagctgctccaccacaggcagcagcttaaatgccatttacagatactataatcaagtgggacggaagcccacgatgaagtggagcactattgacaggtggcccacacatcacctcctcatccagtgctttgcagatcatattctaaaggaactggaccattttccacttgagaagagaagcgaggtggtcattctgttttctgctcactcactgccgatgtctgtggtcaacagaggcgacccatatcctcaggaggtaagcgccactgtccaaaaagtcatggaaaggctggagtactgcaacccctaccgactggtgtggcaatccaaggttggtccgatgccctggttgggtcctcaaacagacgaatctatcaaagggctttgtgagagggggaggaagaatatcctcttggttccgatagcatttaccagtgaccatattgaaacgctgtatgagctggacatcgagtactctcaagttttagccaaggagtgtggagttgaaaacatcagaagagctgagtctcttaatggaaatccattgttctctaaggccctggccgacttggtgcattcacacatccagtcaaacgagctgtgttccaagcagctgaccctgagctgtccgctctgtgtcaatcctgtctgcagggagactaaatccttcttcaccagccagcagctgtgacccccgccggtggaccccgtggcgttaggcaaatgcccaacctccagatacctccgatgtggagagggtgttatttagagatcaaggaaggaagtcatccttccttgatatatatacagcctttgggtacaaattgtgtggtttcttgaggattggactcttgatggatttctatttttatataactatacagtaagcatttgtattttctctctctaggtataagttactagtttggaatgtccatcaggacctttaataaatgagttaaaaatttgtcttatgagacacacctatttaagtacagattttggctttattgcccaaaaccctcctgaaagggtacggagagtcccctctgtgggctggcagtgtgaatgagatctgtttagtctcgtgcatatagttgctgttttttaaatgaacacagttgagtatttgaagtgaatttgaaaaagaaatgttacttaatctttccctaagcccatgggttacagaatgctagggaggcaatttggttacctgcaatggctgcttttgccagcgaggccaccattcattggtcatcttggtatttgtgtgtgaatctcactttcctcaatgtaaaaaggaatcaagtatggatttcagaggtgctcttagattccccatacacccaagggtaataaacgtgtacaagtacagtgttcatgatacgtgccttggtgggagtccgtggtgccacagggaaggggctcccactgcttctggtctccagggacagtgctgctggaaaggctagtgatgagcttcaccctggagctcctcccgggaccttgcaagcctctccatccagcatcttctctatcttagttgaatgccttctttctgaacatttgttttaagaattattttataaagtcaacaatactttgcttgaattctttcttaatttacgattttttattataaaaatgtatagtgatacaatgggacatgtgaagaatacagaaaagtaaccactttaatgcaataactgttatcataatattgtatttcgtggtagtcctttcctgtagatatttttaatgccatttaatgccattgtcaccttggatttatgagtgaaaagtgtttctaaaaatatagaaataatgtcagatcagagtctgatcttctatgtttgtatttaaatggattaaaagatccccggtggttccatgaagaatttgtaaagatcactttctctttcctccaagccctgaaactttgttcttcaaaagagcgtttcttttttttttttttttttaagccagtttataaagtggaagtattaggagattcataaatcttctatattgagaattggctatgttaataaatattacaacatcattaaggttttagctaagtttgattcatgctgtctgttaaatcaaaactgatctaaatcagaattattaaatgtgaggagcttttttaatacaggaaaagaaacatgtcatccacttgagttaatagttttcctacgttgatgacagccctcatgagtagcatccacatttttaaaatttcaaattggtttttctactagtagattgtgtttctagagaaagatacaaggcataggtgattgtttaggattttcctctagcctttgccattacctttttggggatgaggttcacagtagactttgagtgaccgtcccaccgtgaagtgaattctctgagctggtggtgtggtgctggaaggaaggttatttttggagccactctctccccttaaggatatttcccaagggcctgcttcaattctttgatgactttagaggtgaaaaaatatttttatggagatgatgcagaaaactccaattcaggagcccttgcgagtatatctgaagcacttatttgctaaggaaacctgaattgatagcagtactgtgctgtctggaataatgtccttgatactgagttgggaccagactggcttttatagtgacaggcaaagaggaatttattgagatcactgctcatggcatttgttgctgtaagaagtgttgcctttgattgttactaaccacggatgggtaacggtcatacattaggctagtgtttggtaggacaaaatctttttagagctttgagaattgtcatcctgttggtcaactttgaaatacaaatgtttgccctggtaattagcaatgaactgctggcagtttcttcagctgtgtatatacggatctggcttttaattgatgaatcaacttctacagaaacttttgcagggacagtgttgatgaggcagtttagcttgccagggtgatgataaagcccaggtccctgcatgtatagtgctcttctaaagaatatgcattcttgaactacttaactttttaaaaatcacaataaatttttgcactcaaaatttgcttcgtatcaggaga

SEQ ID NO: 421255 - DNA, 3297 bp, Homo sapiens
catctggaagtgtgccctgtccttccgaggggaagcagatccacagcgcgcatttgcagtgagccattagcgagctttagaagtttcccagcaaattccctaggcccccgaaactgttatgatccattttgatgtaaaccaatgctgagaggctggactgtttgcaattttttaaaaaagagagttcggatttttgagggttgctgtgagatttttggtgtaggcttcattttaaaattattttctttttccttccatttctttcttcccttcctctttatcctcctttcttgttactcactcagtgctttgcagatcatattctaaaggaactggaccattttccacttgagaagagaagcgaggtggtcattctgttttctgctcactcactgccgatgtctgtggtcaacagaggcgacccatatcctcaggaggtaagcgccactgtccaaaaagtcatggaaaggctggagtactgcaacccctaccgactggtgtggcaatccaaggttggtccgatgccctggttgggtcctcaaacagacgaatctatcaaagggctttgtgagagggggaggaagaatatcctcttggttccgatagcatttaccagtgaccatattgaaacgctgtatgagctggacatcgagtactctcaagttttagccaaggagtgtggagttgaaaacatcagaagagctgagtctcttaatggaaatccattgttctctaaggccctggccgacttggtgcattcacacatccagtcaaacgagctgtgttccaagcagctgaccctgagctgtccgctctgtgtcaatcctgtctgcagggagactaaatccttcttcaccagccagcagctgtgacccccgccggtggaccccgtggcgttaggcaaatgcccaacctccagatacctccgatgtggagagggtgttatttagagatcaaggaaggaagtcatccttccttgatatatatacagcctttgggtacaaattgtgtggtttcttgaggattggactcttgatggatttctatttttatataactatacagtaagcatttgtattttctctctctaggtataagttactagtttggaatgtccatcaggacctttaataaatgagttaaaaatttgtcttatgagacacacctatttaagtacagattttggctttattgcccaaaaccctcctgaaagggtacggagagtcccctctgtgggctggcagtgtgaatgagatctgtttagtctcgtgcatatagttgctgttttttaaatgaacacagttgagtatttgaagtgaatttgaaaaagaaatgttacttaatctttccctaagcccatgggttacagaatgctagggaggcaatttggttacctgcaatggctgcttttgccagcgaggccaccattcattggtcatcttggtatttgtgtgtgaatctcactttcctcaatgtaaaaaggaatcaagtatggatttcagaggtgctcttagattccccatacacccaagggtaataaacgtgtacaagtacagtgttcatgatacgtgccttggtgggagtccgtggtgccacagggaaggggctcccactgcttctggtctccagggacagtgctgctggaaaggctagtgatgagcttcaccctggagctcctcccgggaccttgcaagcctctccatccagcatcttctctatcttagttgaatgccttctttctgaacatttgttttaagaattattttataaagtcaacaatactttgcttgaattctttcttaatttacgattttttattataaaaatgtatagtgatacaatgggacatgtgaagaatacagaaaagtaaccactttaatgcaataactgttatcataatattgtatttcgtggtagtcctttcctgtagatatttttaatgccatttaatgccattgtcaccttggatttatgagtgaaaagtgtttctaaaaatatagaaataatgtcagatcagagtctgatcttctatgtttgtatttaaatggattaaaagatccccggtggttccatgaagaatttgtaaagatcactttctctttcctccaagccctgaaactttgttcttcaaaagagcgtttcttttttttttttttttttaagccagtttataaagtggaagtattaggagattcataaatcttctatattgagaattggctatgttaataaatattacaacatcattaaggttttagctaagtttgattcatgctgtctgttaaatcaaaactgatctaaatcagaattattaaatgtgaggagcttttttaatacaggaaaagaaacatgtcatccacttgagttaatagttttcctacgttgatgacagccctcatgagtagcatccacatttttaaaatttcaaattggtttttctactagtagattgtgtttctagagaaagatacaaggcataggtgattgtttaggattttcctctagcctttgccattacctttttggggatgaggttcacagtagactttgagtgaccgtcccaccgtgaagtgaattctctgagctggtggtgtggtgctggaaggaaggttatttttggagccactctctccccttaaggatatttcccaagggcctgcttcaattctttgatgactttagaggtgaaaaaatatttttatggagatgatgcagaaaactccaattcaggagcccttgcgagtatatctgaagcacttatttgctaaggaaacctgaattgatagcagtactgtgctgtctggaataatgtccttgatactgagttgggaccagactggcttttatagtgacaggcaaagaggaatttattgagatcactgctcatggcatttgttgctgtaagaagtgttgcctttgattgttactaaccacggatgggtaacggtcatacattaggctagtgtttggtaggacaaaatctttttagagctttgagaattgtcatcctgttggtcaactttgaaatacaaatgtttgccctggtaattagcaatgaactgctggcagtttcttcagctgtgtatatacggatctggcttttaattgatgaatcaacttctacagaaacttttgcagggacagtgttgatgaggcagtttagcttgccagggtgatgataaagcccaggtccctgcatgtatagtgctcttctaaagaatatgcattcttgaactacttaactttttaaaaatcacaataaatttttgcactcaaaatttgcttcgtatcaggaga

SEQ ID NO: 421256 - DNA, 1573 bp, Homo sapiens
ctcgcccgccccggcccggcagcgaatgagcgggcgcgccgggagggcgcgaggtcagggggctggggacgcgcgtggggatcgctacccggctcggccactgctgggcggacacctgggcgcgccgccgcgggaggagcccggactcgggccgaggctgcccaggcaatgcgttcactcggcgcaaacatggctgcggccctgcgcgccgcgggcgtcctgctccgcgatccgctggcatccagcagctggagggtctgtcagccatggaggtggaagtcaggtgcagctgcagcggccgtcaccacagaaacagcccagcatgcccagggtgcaaaacctcaagttcaaccgcagaagaggaagccgaaaactggaatattaatgctaaacatgggaggccctgaaactcttggagatgttcacgacttccttctgagactcttcttggaccgagacctcatgacacttcctattcagaataagctggcaccattcatcgccaaacgccgaacccccaagattcaagagcagtaccgcaggattggaggcggatcccccatcaagatatggacttccaagcagggagagggcatggtgaagctgctggatgaattgtcccccaacacagcccctcacaaatactatattggatttcggtacgtccatcctttaacagaagaagcaattgaagagatggagagagatggcctagaaagggctattgctttcacacagtatccacagtacagctgctccaccacaggcagcagcttaaatgccatttacagatactataatcaagtgggacggaagcccacgatgaagtggagcactattgacaggtggcccacacatcacctcctcatccagtgctttgcagatcatattctaaaggaactggaccattttccacttgagaagagaagcgaggtggtcattctgttttctgctcactcactgccgatgtctgtggtcaacagaggcgacccatatcctcaggaggtaagcgccactgtccaaaaagtcatggaaaggctggagtactgcaacccctaccgactggtgtggcaatccaaggttggtccgatgccctggttgggtcctcaaacagacgaatctatcaaagggctttgtgagagggggaggaagaatatcctcttggttccgatagcatttaccagtgaccatattgaaacgctgtatgagctggacatcgagtactctcaagttttagccaaggagtgtggagttgaaaacatcagaagagctgagtctcttaatggaaatccattgttctctaagttcctttagaatatgatctgcaaagcactggatgaggaggtgatgtgtggtccacctgtcaatagtgctccacttcatcgtgggcttccgtcccacttgattatagtgtctgtaaatggcatttaagctgctgcctgtggtggagcagctgtactgtggatactgtgtgaaagcaatagccctttctaggccatctctctccatctcttcaattgcttcttctgttaaaggatggacgtaccgaaatccaatatagtatttgtgagat

SEQ ID NO: 421257 - DNA, 1683 bp, Homo sapiens
ggacttgaggtccgcggcctatttacccaagttggaggtaggggcctgtggaaacatgaagagggtaaacagctgtgtgaagagtgatgagcatgtcctggaggagctggaaacagaaggggagaggcagctgaaaagcctccttcagcatcaacttgatacttctgtctccattgaggaatgtatgtctaagaaagagagctttgctcctggtactatgtacaagccctttgggaaggaagcagctgggactatgactttgtcccaattccagacactgcatgagaaggaccaggaaactgcttctctcagggaattagggcttaatgaaacagaaatcttgatctggaagagccatgtttctggtgaaaagaagacaaaactgagggcaactcctgaagcaatacagaaccgtcttcaagatattgaagaaaggatctcggagcgtcagcgcattctttgcctgccacagagatttgcaaagagcaaacagctgacccggcgagaaatggaaatagaaaagtctttatttcagggagctgatcgtcactccttccttaaggctctttattaccaagatgaaccccaaaagaagaacaaaggtgatcccatgaacaacctggaaagtttttaccaagagatgataatgaaaaaacgtcttgaagagtttcaacttatgagaggtgaaccctttgcttcccactcactggtctcagctacatcagtgggtgatagtggcacagctgagagcccatcattactccaggacaagggaaaacaggcagcacagggtaaaggccccagtctccatgtggcaaatgttattgatttttcacctgagcagtgttggactgggcctaagaagctgacgcagccaatagaatttgtcccagaagatgaaatccagagaaatcgtttgtcagaggaagagatccgaaaaattcctatgttttcttcatataatccaggggaaccaaacaaggtattatacctgaagaaccttagccctcgggtgactgaaagagatcttgtgtcattgttcgctcggttccaggagaaaaaaggacctccaattcaattccgaatgatgactggacgaatgaggggccaggcttttatcacctttcccaataaggagatagcatggcaagcattgcatctagtaaatggatacaaactacatgggaaaatattggtgatagagtttggaaagaacaaaaagcaacggtcaaatctccaagcgacttctctcatatcatgtgctacaggtagcactacagaaattagtggtagctagaatatatataaattgtgggtcctggatggtctttcttgaattggaatcttggatctaggatttatgtatagacaccagtttgtttggagttgaagaggaaaaactaactgagggaggggaaaaaagtaatttcagcttttggagagaactggtagaaaacattttctattatataattgaagactatataggacagatgatatgctgagtatgaagggtaaagtgcaaagagtattattttctcaggatgaattacaacggattattcctaaggatttttaaaaatctttataatttttctggggtcctcaatatttgtctctagagataacattctttcttagactgcttcgtatacacagaaataaaaaactaattaaatgttg

SEQ ID NO: 421258 - DNA, 5143 bp, Homo sapiens
ggacttgaggtccgcggcctatttacccaagttggaggtaggggcctgtggaaacatgaagagggtaaacagctgtgtgaagagtgatgagcatgtcctggaggagctggaaacagaaggggagaggcagctgaaaagcctccttcagcatcaacttgatacttctgtctccattgaggaatgtatgtctaagaaagagagctttgctcctggtactatgtacaagccctttgggaaggaagcagctgggactatgactttgtcccaattccagacactgcatgagaaggaccaggaaactgcttctctcagggaattagggcttaatgaaacagaaatcttgatctggaagagccatgtttctggtgaaaagaagacaaaactgagggcaactcctgaagcaatacagaaccgtcttcaagatattgaagaaaggatctcggagcgtcagcgcattctttgcctgccacagagatttgcaaagagcaaacagctgacccggcgagaaatggaaatagaaaagtctttatttcagggagctgatcgtcactccttccttaaggctctttattaccaagatgaaccccaaaagaagaacaaaggtgatcccatgaacaacctggaaagtttttaccaagagatgataatgaaaaaacgtcttgaagagtttcaacttatgagaggtgaaccctttgcttcccactcactggtctcagctacatcagtgggtgatagtggcacagctgagagcccatcattactccaggacaagggaaaacaggcagcacagggtaaaggccccagtctccatgtggcaaatgttattgatttttcacctgagcagtgttggactgggcctaagaagctgacgcagccaatagaatttgtcccagaagatgaaatccagagaaatcgtttgtcagaggaagagatccgaaaaattcctatgttttcttcatataatccaggggaaccaaacaaggtattatacctgaagaaccttagccctcgggtgactgaaagagatcttgtgtcattgttcgctcggttccaggagaaaaaaggacctccaattcaattccgaatgatgactggacgaatgaggggccaggcttttatcacctttcccaataaggagatagcatggcaagcattgcatctagtaaatggatacaaactacatgggaaaatattggtgatagagtttggaaagaacaaaaagcaacggtcaaatctccaagcgacttctctcatatcatgtgctacaggttgaagaagctgagtggaagcaaaactgtcttgtactaaagaactgactccagatggtaagacaaatccacaggaacaaatggagagaacgtgaaataggaaataagtttaatataaaaaaactataaacatatacttactcttctctcagcttcttttaaagatgtaaaattatattaagtaattataataatgtgtgttgggtttgtaatgtataggaataacatatataacaataataccacaaagcgggggatgggtttatataggaatagggttgttacattggaattaagttagtgtttatctgaagcctattctgtttagttaagatgtgtatggtaagccctagagcaaccactgaggaaataacttttaaaaaatcaaaaatattattaaatgtaaatatcacattatgaaataatgcaaaagaaggaatggagaagcaaaaagcttgaggcatatcaaaaacaataaaatggcagtcataagtcttcctatatcaaaataacaatgtgcatggattaagcaatactataaaaggcagagatgtcagaaacaagtctgattccacttcatgccatctatttgagacacactttagaagatagaaagagattaaaggtaaaaggatggaaaacaaatatatcacacagacaacagccataagaaagctggagtggctattctaataccagacaaaatagacttaaaaaaatgttactggagataaagagtaaaatgttacaatgataaaagggtcaatacatcaggaagatgtaacaactataaatatatatgcatctaacagtagagcccaaaatacatgaagcaaaaactgaaaggaaaggagaaacagataagtccataaaaagagttggaatattcaatacccctttttcaataatagagcacctagacagaagataaaccaggaaatagaagacttgaacaacattataaggcaaattgacctaaaagacatctatagaactttccacccaacatcagaatacatattcttctcgagtgcatatgaaacatctccaaaataggtcataagttaaagcataaaacaagccttaataaatataagtagactgaaatcatgcaaagcatgccctctgaccacatgggatgaagttagaaaacaatgaaaagttgggaaactcacaaatatgtggaaatcagacacacttgtaagtgactggctgggtgcagtagctcacgcctgaaatctcagcactttggtaggccgaagtgggaggattccttggatcccttgagaccaggaattcaagaccagcctgggcaacacagcaagaccctgtcattaccaaaaaaaaaaaaaaaatgtgtcaaagaaaaaaatcataagggaaattacaaaaccctttgagatgagtgataatgaagacacaacaaaccaaaacttacaagatgcagctaaagcagtgtttacagggaaatctataggtacaaatgcctgtacttaagaagaaaaaagaccaggcacagtggcttacgcctgtaatcccagcactttgggaggccggggcgggtggagatcatggggtcaggagatcgagaccattctgggtaacatggtgaaaccctgtctctactaaaaatacaaaaaattagccaggcgtggtcgtgggcacctgtagtcccagctactcgggaggctgaggcaggagaatggcgtgaacctgggaggcagagcttgcagtgagccaagattgcaccactgcactccagcctgggcagcagagcgagactccatctcaaaaaaaaaaaaaaaaagaaaagaaagaccatagcactaacctcactttacaccttaagaccctggaaaaagaagagcaaactaaacctagagccaggagaaagaaggaaatataaaagattagatgagaataaatgaaatagagtgaagaaaagtagagaaaaatcaatgcaaccaaaagttgattctataaaaagatcagtaaaactgacacaccttctgctagactgaccaggaaaaaaggagaatcaaattactaaaatcagaaatgaaggagggaacatttcaactgaacttgtagaaataaaaaagattatgaaggcatattatgaataattttatgtcaataaattatcaatgaagtggacaaattcctaggaagacacaaactaccaaaaccaactcagaagtagaaaacttgaataaacctatatcaagtaaataggttaaatgagtttttgaaaagatacccacaaagaagagcccaggctgaaatagcttcttaaatgaattctacaaaacttttaatgaaaaattaatacaaattcttcacaaactttttcaaaaagtagaagagtggtgaacacttctgacacatactacaacatggaagaactcagaatatgctcagtgcaagaagccagtcacaaaagactacatattatatgatactatttatatgaagtgtccagaattggcaaatatatagagatagaaagtggattagtggttgcttagggctagcacagagttggggggaatgggaagggctgggggtaacagttgaagtgtatgaagtttctttagaggttgatgaaagtgttctaaaattggtcgtggtggtgatttcacaactctgaatatactaaaaaccaggaattgtacacgttaaatgggtgaattgtgtggtgtatgaattatatctcaataaaactcacaaaagtaggggtgtccatcaataggaaaatgggtaaataacttatggtacatctatttagtacaatactatgcagccattaaaatagtgaagtgtatctatgaatatattatgacctatactcatgtccaaggttgtgtattaagttaataaacaagatgcagaaatatgtatagtatgaatacatttttatgcaaaagcattcatttatgtatagtatgtatgtatatagatatttctgaataaatttaagaaaaagctgggaaatagacatagaaagttataaacctttggaagtgggattgaataggctgaaggaggactttcactttgtaaaatttttaaagtggtgtgattttggggtgatttttacttttttcattttcttttttaactaaaaaattttttaaaaaatattctgccaatggcatggcttccagaatatttgtcaggcctactctggggatatcatctgactatactcaggacaaactcctattcctttgatatactgctcacttaggattaacactctaatttcagacatagttaagtgacaaggaataaattatcctgatatagcctctgatacatgttaccaggggcatacttctaagctggactttttagaaggaagtgcttcctgttaggtagaaaatttcacctctgctttttactagacctacagaccactgcaattgaggaacataaaaatgaaggatatccttcaactggtgcatagataaaccgtagtatatccatgcaatggaatcctactcagcaataaactaatgaaatacacatgcaaccacttggatgaatcttaaatgcattttactaagtaaaagaagccaaactcaaaaggctgcttactgtttgattccattcatattattttctcaaaaagcaaaacaatagggatggagaaaaaacttcagtggatgtcaggggttaaggttggaatgctccttgactacaaagtggtagcatgaggaatttgtcttaataattgaaattttccgtgtctttattgtagttacataagtatatgcatttgtcaaaacccataggcttgtacactaaaaaggatgaattttactgtgtgtaatttttttaaataaatgttatttttatggaggaaagaaaaa

SEQ ID NO: 421259 - DNA, 5234 bp, Homo sapiens
ggacttgaggtccgcggcctatttacccaagttggaggtaggggcctgtggaaacatgaagagggtaaacagctgtgtgaagagtgatgagcatgtcctggaggagctggaaacagaaggggagaggcagctgaaaagcctccttcagcatcaacttgatacttctgtctccattgaggaatgtatgtctaagaaagagagctttgctcctggtactatgtacaagccctttgggaaggaagcagctgggactatgactttgtcccaattccagacactgcatgagaaggaccaggaaactgcttctctcagggaattagggcttaatgaaacagaaatcttgatctggaagagccatgtttctggtgaaaagaagacaaaactgagggcaactcctgaagcaatacagaaccgtcttcaagatattgaagaaaggatctcggagcgtcagcgcattctttgcctgccacagagatttgcaaagagcaaacagctgacccggcgagaaatggaaatagaaaagtctttatttcagggagctgatcgtcactccttccttaaggctctttattaccaagatgaaccccaaaagaagaacaaaggtgatcccatgaacaacctggaaagtttttaccaagagatgataatgaaaaaacgtcttgaagagtttcaacttatgagaggtgaaccctttgcttcccactcactggtctcagctacatcagtgggtgatagtggcacagctgagagcccatcattactccaggacaagggaaaacaggcagcacagggtaaaggccccagtctccatgtggcaaatgttattgatttttcacctgagcagtgttggactgggcctaagaagctgacgcagccaatagaatttgtcccagaagatgaaatccagagaaatcgtttgtcagaggaagagatccgaaaaattcctatgttttcttcatataatccaggggaaccaaacaaggtattatacctgaagaaccttagccctcgggtgactgaaagagatcttgtgtcattgttcgctcggttccaggagaaaaaaggacctccaattcaattccgaatgatgactggacgaatgaggggccaggcttttatcacctttcccaataaggagatagcatggcaagcattgcatctagtaaatggatacaaactacatgggaaaatattggtgatagagtttggaaagaacaaaaagcaacggtcaaatctccaagcgacttctctcatatcatgtgctacaggttgaagaagctgagtggaagcaaaactgtcttgtactaaagaactgactccagatggtaagacaaatccacaggaacaaatggagagaacgtgaaataggaaataagtttaatataaaaaaactataaacatatacttactcttctctcagcttcttttaaagatgtaaaattatattaagtaattataataatgtgtgttgggtttgtaatgtataggaataacatatataacaataataccacaaagcgggggatgggtttatataggaatagggttgttacattggaattaagttagtgtttatctgaagcctattctgtttagttaagatgtgtatggtaagccctagagcaaccactgaggaaataacttttaaaaaatcaaaaatattattaaatgtaaatatcacattatgaaataatgcaaaagaaggaatggagaagcaaaaagcttgaggcatatcaaaaacaataaaatggcagtcataagtcttcctatatcaaaataacaatgtgcatggattaagcaatactataaaaggcagagatgtcagaaacaagtctgattccacttcatgccatctatttgagacacactttagaagatagaaagagattaaaggtaaaaggatggaaaacaaatatatcacacagacaacagccataagaaagctggagtggctattctaataccagacaaaatagacttaaaaaaatgttactggagataaagagtaaaatgttacaatgataaaagggtcaatacatcaggaagatgtaacaactataaatatatatgcatctaacagtagagcccaaaatacatgaagcaaaaactgaaaggaaaggagaaacagataagtccataaaaagagttggaatattcaatacccctttttcaataatagagcacctagacagaagataaaccaggaaatagaagacttgaacaacattataaggcaaattgacctaaaagacatctatagaactttccacccaacatcagaatacatattcttctcgagtgcatatgaaacatctccaaaataggtcataagttaaagcataaaacaagccttaataaatataagtagactgaaatcatgcaaagcatgccctctgaccacatgggatgaagttagaaaacaatgaaaagttgggaaactcacaaatatgtggaaatcagacacacttgtaagtgactggctgggtgcagtagctcacgcctgaaatctcagcactttggtaggccgaagtgggaggattccttggatcccttgagaccaggaattcaagaccagcctgggcaacacagcaagaccctgtcattaccaaaaaaaaaaaaaaaatgtgtcaaagaaaaaaatcataagggaaattacaaaaccctttgagatgagtgataatgaagacacaacaaaccaaaacttacaagatgcagctaaagcagtgtttacagggaaatctataggtacaaatgcctgtacttaagaagaaaaaagaccaggcacagtggcttacgcctgtaatcccagcactttgggaggccggggcgggtggagatcatggggtcaggagatcgagaccattctgggtaacatggtgaaaccctgtctctactaaaaatacaaaaaattagccaggcgtggtcgtgggcacctgtagtcccagctactcgggaggctgaggcaggagaatggcgtgaacctgggaggcagagcttgcagtgagccaagattgcaccactgcactccagcctgggcagcagagcgagactccatctcaaaaaaaaaaaaaaaaagaaaagaaagaccatagcactaacctcactttacaccttaagaccctggaaaaagaagagcaaactaaacctagagccaggagaaagaaggaaatataaaagattagatgagaataaatgaaatagagtgaagaaaagtagagaaaaatcaatgcaaccaaaagttgattctataaaaagatcagtaaaactgacacaccttctgctagactgaccaggaaaaaaggagaatcaaattactaaaatcagaaatgaaggagggaacatttcaactgaacttgtagaaataaaaaagattatgaaggcatattatgaataattttatgtcaataaattatcaatgaagtggacaaattcctaggaagacacaaactaccaaaaccaactcagaagtagaaaacttgaataaacctatatcaagtaaataggttaaatgagtttttgaaaagatacccacaaagaagagcccaggctgaaatagcttcttaaatgaattctacaaaacttttaatgaaaaattaatacaaattcttcacaaactttttcaaaaagtagaagagtggtgaacacttctgacacatactacaacatggaagaactcagaatatgctcagtgcaagaagccagtcacaaaagactacatattatatgatactatttatatgaagtgtccagaattggcaaatatatagagatagaaagtggattagtggttgcttagggctagcacagagttggggggaatgggaagggctgggggtaacagttgaagtgtatgaagtttctttagaggttgatgaaagtgttctaaaattggtcgtggtggtgatttcacaactctgaatatactaaaaaccaggaattgtacacgttaaatgggtgaattgtgtggtgtatgaattatatctcaataaaactcacaaaagtaggggtgtccatcaataggaaaatgggtaaataacttatggtacatctatttagtacaatactatgcagccattaaaatagtgaagtgtatctatgaatatattatgacctatactcatgtccaaggttgtgtattaagttaataaacaagatgcagaaatatgtatagtatgaatacatttttatgcaaaagcattcatttatgtatagtatgtatgtatatagatatttctgaataaatttaagaaaaagctgggaaatagacatagaaagttataaacctttggaagtgggattgaataggctgaaggaggactttcactttgtaaaatttttaaagtggtgtgattttggggtgatttttacttttttcattttcttttttaactaaaaaattttttaaaaaatattctgccaatggcatggcttccagaatatttgtcaggcctactctggggatatcatctgactatactcaggacaaactcctattcctttgatatactgctcacttaggattaacactctaatttcagacatagttaagtgacaaggaataaattatcctgatatagcctctgatacatgttaccaggggcatacttctaagctggactttttagaaggaagtgcttcctgttaggtagaaaatttcacctctgctttttactagacctacagaccactgcaattgaggaacataaaaatgaaggatatccttcaactggtgcatagataaaccgtagtatatccatgcaatggaatcctactcagcaataaactaatgaaatacacatgcaaccacttggatgaatcttaaatgcattttactaagtaaaagaagccaaactcaaaaggctgcttactgtttgattccattcatattattttctcaaaaagcaaaacaatagggatggagaaaaaacttcagtggatgtcaggggttaaggttggaatgctccttgactacaaagtggtagcatgaggaatttgtcttaataattgaaattttccgtgtctttattgtagttacataagtatatgcatttgtcaaaacccataggcttgtacactaaaaaggatgaattttactgtgtgtaatttttttaaataaatgttatttttatggaggaaagaaaaaaacaaaagtgacccggccgacatttagtagtggagtcgaccggaaattcggaccggaaccgcagcgtaccgcttcccaaagtgagtctata

SEQ ID NO: 421260 - DNA, 5215 bp, Homo sapiens
ggacttgaggtccgcggcctatttacccaagttggaggtaggggcctgtggaaacatgaagagggtaaacagctgtgtgaagagtgatgagcatgtcctggaggagctggaaacagaaggggagaggcagctgaaaagcctccttcagcatcaacttgatacttctgtctccattgaggaatgtatgtctaagaaagagagctttgctcctggtactatgtacaagccctttgggaaggaagcagctgggactatgactttgtcccaattccagacactgcatgagaaggaccaggaaactgcttctctcagggaattagggcttaatgaaacagaaatcttgatctggaagagccatgtttctggtgaaaagaagacaaaactgagggcaactcctgaagcaatacagaaccgtcttcaagatattgaagaaaggatctcggagcgtcagcgcattctttgcctgccacagagatttgcaaagagcaaacagctgacccggcgagaaatggaaatagaaaagtctttatttcagggagctgatcgtcactccttccttaaggctctttattaccaagcataccacaaaaagacaagtgcagacaagtacatgacctcaatgaagaggaagataaaattaggcacaaaagatgaaccccaaaagaagaacaaaggtgatcccatgaacaacctggaaagtttttaccaagagatgataatgaaaaaacgtcttgaagagtttcaacttatgagaggtgaaccctttgcttcccactcactggtctcagctacatcagtgggtgatagtggcacagctgagagcccatcattactccaggacaagggaaaacaggcagcacagggtaaaggccccagtctccatgtggcaaatgttattgatttttcacctgagcagtgttggactgggcctaagaagctgacgcagccaatagaatttgtcccagaagatgaaatccagagaaatcgtttgtcagaggaagagatccgaaaaattcctatgttttcttcatataatccaggggaaccaaacaaggtattatacctgaagaaccttagccctcgggtgactgaaagagatcttgtgtcattgttcgctcggttccaggagaaaaaaggacctccaattcaattccgaatgatgactggacgaatgaggggccaggcttttatcacctttcccaataaggagatagcatggcaagcattgcatctagtaaatggatacaaactacatgggaaaatattggtgatagagtttggaaagaacaaaaagcaacggtcaaatctccaagcgacttctctcatatcatgtgctacaggttgaagaagctgagtggaagcaaaactgtcttgtactaaagaactgactccagatggtaagacaaatccacaggaacaaatggagagaacgtgaaataggaaataagtttaatataaaaaaactataaacatatacttactcttctctcagcttcttttaaagatgtaaaattatattaagtaattataataatgtgtgttgggtttgtaatgtataggaataacatatataacaataataccacaaagcgggggatgggtttatataggaatagggttgttacattggaattaagttagtgtttatctgaagcctattctgtttagttaagatgtgtatggtaagccctagagcaaccactgaggaaataacttttaaaaaatcaaaaatattattaaatgtaaatatcacattatgaaataatgcaaaagaaggaatggagaagcaaaaagcttgaggcatatcaaaaacaataaaatggcagtcataagtcttcctatatcaaaataacaatgtgcatggattaagcaatactataaaaggcagagatgtcagaaacaagtctgattccacttcatgccatctatttgagacacactttagaagatagaaagagattaaaggtaaaaggatggaaaacaaatatatcacacagacaacagccataagaaagctggagtggctattctaataccagacaaaatagacttaaaaaaatgttactggagataaagagtaaaatgttacaatgataaaagggtcaatacatcaggaagatgtaacaactataaatatatatgcatctaacagtagagcccaaaatacatgaagcaaaaactgaaaggaaaggagaaacagataagtccataaaaagagttggaatattcaatacccctttttcaataatagagcacctagacagaagataaaccaggaaatagaagacttgaacaacattataaggcaaattgacctaaaagacatctatagaactttccacccaacatcagaatacatattcttctcgagtgcatatgaaacatctccaaaataggtcataagttaaagcataaaacaagccttaataaatataagtagactgaaatcatgcaaagcatgccctctgaccacatgggatgaagttagaaaacaatgaaaagttgggaaactcacaaatatgtggaaatcagacacacttgtaagtgactggctgggtgcagtagctcacgcctgaaatctcagcactttggtaggccgaagtgggaggattccttggatcccttgagaccaggaattcaagaccagcctgggcaacacagcaagaccctgtcattaccaaaaaaaaaaaaaaaatgtgtcaaagaaaaaaatcataagggaaattacaaaaccctttgagatgagtgataatgaagacacaacaaaccaaaacttacaagatgcagctaaagcagtgtttacagggaaatctataggtacaaatgcctgtacttaagaagaaaaaagaccaggcacagtggcttacgcctgtaatcccagcactttgggaggccggggcgggtggagatcatggggtcaggagatcgagaccattctgggtaacatggtgaaaccctgtctctactaaaaatacaaaaaattagccaggcgtggtcgtgggcacctgtagtcccagctactcgggaggctgaggcaggagaatggcgtgaacctgggaggcagagcttgcagtgagccaagattgcaccactgcactccagcctgggcagcagagcgagactccatctcaaaaaaaaaaaaaaaaagaaaagaaagaccatagcactaacctcactttacaccttaagaccctggaaaaagaagagcaaactaaacctagagccaggagaaagaaggaaatataaaagattagatgagaataaatgaaatagagtgaagaaaagtagagaaaaatcaatgcaaccaaaagttgattctataaaaagatcagtaaaactgacacaccttctgctagactgaccaggaaaaaaggagaatcaaattactaaaatcagaaatgaaggagggaacatttcaactgaacttgtagaaataaaaaagattatgaaggcatattatgaataattttatgtcaataaattatcaatgaagtggacaaattcctaggaagacacaaactaccaaaaccaactcagaagtagaaaacttgaataaacctatatcaagtaaataggttaaatgagtttttgaaaagatacccacaaagaagagcccaggctgaaatagcttcttaaatgaattctacaaaacttttaatgaaaaattaatacaaattcttcacaaactttttcaaaaagtagaagagtggtgaacacttctgacacatactacaacatggaagaactcagaatatgctcagtgcaagaagccagtcacaaaagactacatattatatgatactatttatatgaagtgtccagaattggcaaatatatagagatagaaagtggattagtggttgcttagggctagcacagagttggggggaatgggaagggctgggggtaacagttgaagtgtatgaagtttctttagaggttgatgaaagtgttctaaaattggtcgtggtggtgatttcacaactctgaatatactaaaaaccaggaattgtacacgttaaatgggtgaattgtgtggtgtatgaattatatctcaataaaactcacaaaagtaggggtgtccatcaataggaaaatgggtaaataacttatggtacatctatttagtacaatactatgcagccattaaaatagtgaagtgtatctatgaatatattatgacctatactcatgtccaaggttgtgtattaagttaataaacaagatgcagaaatatgtatagtatgaatacatttttatgcaaaagcattcatttatgtatagtatgtatgtatatagatatttctgaataaatttaagaaaaagctgggaaatagacatagaaagttataaacctttggaagtgggattgaataggctgaaggaggactttcactttgtaaaatttttaaagtggtgtgattttggggtgatttttacttttttcattttcttttttaactaaaaaattttttaaaaaatattctgccaatggcatggcttccagaatatttgtcaggcctactctggggatatcatctgactatactcaggacaaactcctattcctttgatatactgctcacttaggattaacactctaatttcagacatagttaagtgacaaggaataaattatcctgatatagcctctgatacatgttaccaggggcatacttctaagctggactttttagaaggaagtgcttcctgttaggtagaaaatttcacctctgctttttactagacctacagaccactgcaattgaggaacataaaaatgaaggatatccttcaactggtgcatagataaaccgtagtatatccatgcaatggaatcctactcagcaataaactaatgaaatacacatgcaaccacttggatgaatcttaaatgcattttactaagtaaaagaagccaaactcaaaaggctgcttactgtttgattccattcatattattttctcaaaaagcaaaacaatagggatggagaaaaaacttcagtggatgtcaggggttaaggttggaatgctccttgactacaaagtggtagcatgaggaatttgtcttaataattgaaattttccgtgtctttattgtagttacataagtatatgcatttgtcaaaacccataggcttgtacactaaaaaggatgaattttactgtgtgtaatttttttaaataaatgttatttttatggaggaaagaaaaa

SEQ ID NO: 421261 - DNA, 6859 bp, Homo sapiens
ggacttgaggtccgcggcctatttacccaagttggaggtaggggcctgtggaaacatgaagagggtaaacagctgtgtgaagagtgatgagcatgtcctggaggagctggaaacagaaggggagaggcagctgaaaagcctccttcagcatcaacttgatacttctgtctccattgaggaatgtatgtctaagaaagagagctttgctcctggtactatgtacaagccctttgggaaggaagcagctgggactatgactttgtcccaattccagacactgcatgagaaggaccaggaaactgcttctctcagggaattagggcttaatgaaacagaaatcttgatctggaagagccatgtttctggtgaaaagaagacaaaactgagggcaactcctgaagcaatacagaaccgtcttcaagatattgaagaaaggatctcggagcgtcagcgcattctttgcctgccacagagatttgcaaagagcaaacagctgacccggcgagaaatggaaatagaaaagtctttatttcagggagctgatcgtcactccttccttaaggctctttattaccaagcataccacaaaaagacaagtgcagacaagtacatgacctcaatgaagaggaagataaaattaggcacaaaagatgaaccccaaaagaagaacaaaggtgatcccatgaacaacctggaaagtttttaccaagagatgataatgaaaaaacgtcttgaagagtttcaacttatgagaggacttaccagttttcccagagaagacttccaaaatctttcttacgagggtactaccagcgttctaggagccaaatggcagaaaaggactgggaggacctcaacatttagtattctcttagtttccttgctttcagaaacagtgttcacatcttcagccatgtatggcattccccatcttctgacaatgagcctcaagttttctaccaggattggcaagttatcttttaccccatagcatattgtgagggagggtatttaaaaatcatattggcttttagacagccttcaactgatttgccttattttaaccccatcccttcacatttatttctgaaggtaagtgaaattatcagttcctgaactatttaaggattcttaagtggtgacaggtgtgttcttggctctctccactaccagtttaaaattcagctttcttcagtgtgctgagttggttcctgctcatccaattatttttcatcttccagattattattgctgttgtctccttttcttgttcctcctgaccttgttgatttgtgttttttttttttttttttaagtgcctatagttttagagagttttctggatggaatgaaattaaatgaatgtgttcaatccaccatttttatgtgaaactaattctaatcataatgaaagagttttcttacggctgagcatggtgtctcacgcctgtaatcccagcattttgggaggccaaggcgggtggatcacctgagtttgggagttcaagaccagcctggacaacatggtgaaaccccacgtctactaaaaatacaaaaattagccaggtgtggtggcacatgactgtaatcccagctactcgggaggctgaggcatgagaatcacttgagcctgggaggccaaggttgcagtgagcagagattgcgccactgcactccagcctgggtgacagagtgagactttgtctcaaaaagaaaaaaacaaagagtgccttacctcctttatatgatattttggttgatcctcaatttgttttaggtattatacctgaagaaccttagccctcgggtgactgaaagagatcttgtgtcattgttcgctcggttccaggagaaaaaaggacctccaattcaattccgaatgatgactggacgaatgaggggccaggcttttatcacctttcccaataaggagatagcatggcaagcattgcatctagtaaatggatacaaactacatgggaaaatattggtgatagagtttggaaagaacaaaaagcaacggtcaaatctccaagcgacttctctcatatcatgtgctacaggcatatgaattttagaagaggaacatacaagcaaagaatgccaaacggaaatggaaataaagcgttctctagaaaagaggatgccagtcacaaatcccccagttgtttgtttatggttgctggaaaataaaaaaacaatatacagagaggaagtagtacaaactggagtcagacctgtacagccacacttaacattctatgaccttggcaagtcacttaatctgagcctcacatttttcatctataaagtgaggataataatgctacttacctcactgggttgtgaagatgaactgagatattatccaggctgaagaacagaaaggaaaacaatgaataaaattgaacaagagtatagaacctgtgtgacaccattaagcattcctacatatttctaatgggagtacaggaaaaaaggaaaagaaatgaaggagcagaaaaatattctaagaaataatggctataaatacccccgatttgatgagagacattaacctatacatcccagaagaaaaagaaattacagacagatacatcataagaaaaatgctaaaacccaaaaacgaaaagaaaatcttaacagcaatacgagaaaaatgagccatcacttaccaaggaacccaaataaaattagtagttgacttcccctcagaaacaatggcagtggcagtggaataacacattcaaagtgttcaaagaaaataactgtcaaccaataatcctatatacaataaaactatttttcaaaaatgaacgtgaaataaaacatctcacataatcaaaaaccaagagaatttgttgctggcagacctgacttgctggaaatacaaaaggaagttcttcagcctgaaagcaagtgaccacagacagtaatctgaatctacacacatgcagaaaaagagcacaggcaaaaataattatgttgaagaagctgagtggaagcaaaactgtcttgtactaaagaactgactccagatggtaagacaaatccacaggaacaaatggagagaacgtgaaataggaaataagtttaatataaaaaaactataaacatatacttactcttctctcagcttcttttaaagatgtaaaattatattaagtaattataataatgtgtgttgggtttgtaatgtataggaataacatatataacaataataccacaaagcgggggatgggtttatataggaatagggttgttacattggaattaagttagtgtttatctgaagcctattctgtttagttaagatgtgtatggtaagccctagagcaaccactgaggaaataacttttaaaaaatcaaaaatattattaaatgtaaatatcacattatgaaataatgcaaaagaaggaatggagaagcaaaaagcttgaggcatatcaaaaacaataaaatggcagtcataagtcttcctatatcaaaataacaatgtgcatggattaagcaatactataaaaggcagagatgtcagaaacaagtctgattccacttcatgccatctatttgagacacactttagaagatagaaagagattaaaggtaaaaggatggaaaacaaatatatcacacagacaacagccataagaaagctggagtggctattctaataccagacaaaatagacttaaaaaaatgttactggagataaagagtaaaatgttacaatgataaaagggtcaatacatcaggaagatgtaacaactataaatatatatgcatctaacagtagagcccaaaatacatgaagcaaaaactgaaaggaaaggagaaacagataagtccataaaaagagttggaatattcaatacccctttttcaataatagagcacctagacagaagataaaccaggaaatagaagacttgaacaacattataaggcaaattgacctaaaagacatctatagaactttccacccaacatcagaatacatattcttctcgagtgcatatgaaacatctccaaaataggtcataagttaaagcataaaacaagccttaataaatataagtagactgaaatcatgcaaagcatgccctctgaccacatgggatgaagttagaaaacaatgaaaagttgggaaactcacaaatatgtggaaatcagacacacttgtaagtgactggctgggtgcagtagctcacgcctgaaatctcagcactttggtaggccgaagtgggaggattccttggatcccttgagaccaggaattcaagaccagcctgggcaacacagcaagaccctgtcattaccaaaaaaaaaaaaaaaatgtgtcaaagaaaaaaatcataagggaaattacaaaaccctttgagatgagtgataatgaagacacaacaaaccaaaacttacaagatgcagctaaagcagtgtttacagggaaatctataggtacaaatgcctgtacttaagaagaaaaaagaccaggcacagtggcttacgcctgtaatcccagcactttgggaggccggggcgggtggagatcatggggtcaggagatcgagaccattctgggtaacatggtgaaaccctgtctctactaaaaatacaaaaaattagccaggcgtggtcgtgggcacctgtagtcccagctactcgggaggctgaggcaggagaatggcgtgaacctgggaggcagagcttgcagtgagccaagattgcaccactgcactccagcctgggcagcagagcgagactccatctcaaaaaaaaaaaaaaaaagaaaagaaagaccatagcactaacctcactttacaccttaagaccctggaaaaagaagagcaaactaaacctagagccaggagaaagaaggaaatataaaagattagatgagaataaatgaaatagagtgaagaaaagtagagaaaaatcaatgcaaccaaaagttgattctataaaaagatcagtaaaactgacacaccttctgctagactgaccaggaaaaaaggagaatcaaattactaaaatcagaaatgaaggagggaacatttcaactgaacttgtagaaataaaaaagattatgaaggcatattatgaataattttatgtcaataaattatcaatgaagtggacaaattcctaggaagacacaaactaccaaaaccaactcagaagtagaaaacttgaataaacctatatcaagtaaataggttaaatgagtttttgaaaagatacccacaaagaagagcccaggctgaaatagcttcttaaatgaattctacaaaacttttaatgaaaaattaatacaaattcttcacaaactttttcaaaaagtagaagagtggtgaacacttctgacacatactacaacatggaagaactcagaatatgctcagtgcaagaagccagtcacaaaagactacatattatatgatactatttatatgaagtgtccagaattggcaaatatatagagatagaaagtggattagtggttgcttagggctagcacagagttggggggaatgggaagggctgggggtaacagttgaagtgtatgaagtttctttagaggttgatgaaagtgttctaaaattggtcgtggtggtgatttcacaactctgaatatactaaaaaccaggaattgtacacgttaaatgggtgaattgtgtggtgtatgaattatatctcaataaaactcacaaaagtaggggtgtccatcaataggaaaatgggtaaataacttatggtacatctatttagtacaatactatgcagccattaaaatagtgaagtgtatctatgaatatattatgacctatactcatgtccaaggttgtgtattaagttaataaacaagatgcagaaatatgtatagtatgaatacatttttatgcaaaagcattcatttatgtatagtatgtatgtatatagatatttctgaataaatttaagaaaaagctgggaaatagacatagaaagttataaacctttggaagtgggattgaataggctgaaggaggactttcactttgtaaaatttttaaagtggtgtgattttggggtgatttttacttttttcattttcttttttaactaaaaaattttttaaaaaatattctgccaatggcatggcttccagaatatttgtcaggcctactctggggatatcatctgactatactcaggacaaactcctattcctttgatatactgctcacttaggattaacactctaatttcagacatagttaagtgacaaggaataaattatcctgatatagcctctgatacatgttaccaggggcatacttctaagctggactttttagaaggaagtgcttcctgttaggtagaaaatttcacctctgctttttactagacctacagaccactgcaattgaggaacataaaaatgaaggatatccttcaactggtgcatagataaaccgtagtatatccatgcaatggaatcctactcagcaataaactaatgaaatacacatgcaaccacttggatgaatcttaaatgcattttactaagtaaaagaagccaaactcaaaaggctgcttactgtttgattccattcatattattttctcaaaaagcaaaacaatagggatggagaaaaaacttcagtggatgtcaggggttaaggttggaatgctccttgactacaaagtggtagcatgaggaatttgtcttaataattgaaattttccgtgtctttattgtagttacataagtatatgcatttgtcaaaacccataggcttgtacactaaaaaggatgaattttactgtgtgtaatttttttaaataaatgttatttttatggaggaaagaaaaa

SEQ ID NO: 421262 - DNA, 5159 bp, Homo sapiens
ggacttgaggtccgcggcctatttacccaagttggaggtaggggcctgtggaaacatgaagagggtaaacagctgtgtgaagagtgatgagcatgtcctggaggagctggaaacagaaggggagaggcagctgaaaagcctccttcagcatcaacttgatacttctgtctccattgaggaatgtatgtctaagaaagagagctttgctcctggtactatgtacaagccctttgggaaggaagcagctgggactatgactttgtcccaattccagacactgcatgagaaggaccaggaaactgcttctctcagggaattagggcttaatgaaacagaaatcttgatctggaagagccatgtttctggtgaaaagaagacaaaactgagggcaactcctgaagcaatacagaaccgtcttcaagatattgaagaaaggatctcggagcgtcagcgcattctttgcctgccacagagatttgcaaagagcaaacagctgacccggcgagaaatggaaatagaaaacataccacaaaaagacaagtgcagacaagtacatgacctcaatgaagaggaagataaaattaggcacaaaagatgaaccccaaaagaagaacaaaggtgatcccatgaacaacctggaaagtttttaccaagagatgataatgaaaaaacgtcttgaagagtttcaacttatgagaggtgaaccctttgcttcccactcactggtctcagctacatcagtgggtgatagtggcacagctgagagcccatcattactccaggacaagggaaaacaggcagcacagggtaaaggccccagtctccatgtggcaaatgttattgatttttcacctgagcagtgttggactgggcctaagaagctgacgcagccaatagaatttgtcccagaagatgaaatccagagaaatcgtttgtcagaggaagagatccgaaaaattcctatgttttcttcatataatccaggggaaccaaacaaggtattatacctgaagaaccttagccctcgggtgactgaaagagatcttgtgtcattgttcgctcggttccaggagaaaaaaggacctccaattcaattccgaatgatgactggacgaatgaggggccaggcttttatcacctttcccaataaggagatagcatggcaagcattgcatctagtaaatggatacaaactacatgggaaaatattggtgatagagtttggaaagaacaaaaagcaacggtcaaatctccaagcgacttctctcatatcatgtgctacaggttgaagaagctgagtggaagcaaaactgtcttgtactaaagaactgactccagatggtaagacaaatccacaggaacaaatggagagaacgtgaaataggaaataagtttaatataaaaaaactataaacatatacttactcttctctcagcttcttttaaagatgtaaaattatattaagtaattataataatgtgtgttgggtttgtaatgtataggaataacatatataacaataataccacaaagcgggggatgggtttatataggaatagggttgttacattggaattaagttagtgtttatctgaagcctattctgtttagttaagatgtgtatggtaagccctagagcaaccactgaggaaataacttttaaaaaatcaaaaatattattaaatgtaaatatcacattatgaaataatgcaaaagaaggaatggagaagcaaaaagcttgaggcatatcaaaaacaataaaatggcagtcataagtcttcctatatcaaaataacaatgtgcatggattaagcaatactataaaaggcagagatgtcagaaacaagtctgattccacttcatgccatctatttgagacacactttagaagatagaaagagattaaaggtaaaaggatggaaaacaaatatatcacacagacaacagccataagaaagctggagtggctattctaataccagacaaaatagacttaaaaaaatgttactggagataaagagtaaaatgttacaatgataaaagggtcaatacatcaggaagatgtaacaactataaatatatatgcatctaacagtagagcccaaaatacatgaagcaaaaactgaaaggaaaggagaaacagataagtccataaaaagagttggaatattcaatacccctttttcaataatagagcacctagacagaagataaaccaggaaatagaagacttgaacaacattataaggcaaattgacctaaaagacatctatagaactttccacccaacatcagaatacatattcttctcgagtgcatatgaaacatctccaaaataggtcataagttaaagcataaaacaagccttaataaatataagtagactgaaatcatgcaaagcatgccctctgaccacatgggatgaagttagaaaacaatgaaaagttgggaaactcacaaatatgtggaaatcagacacacttgtaagtgactggctgggtgcagtagctcacgcctgaaatctcagcactttggtaggccgaagtgggaggattccttggatcccttgagaccaggaattcaagaccagcctgggcaacacagcaagaccctgtcattaccaaaaaaaaaaaaaaaatgtgtcaaagaaaaaaatcataagggaaattacaaaaccctttgagatgagtgataatgaagacacaacaaaccaaaacttacaagatgcagctaaagcagtgtttacagggaaatctataggtacaaatgcctgtacttaagaagaaaaaagaccaggcacagtggcttacgcctgtaatcccagcactttgggaggccggggcgggtggagatcatggggtcaggagatcgagaccattctgggtaacatggtgaaaccctgtctctactaaaaatacaaaaaattagccaggcgtggtcgtgggcacctgtagtcccagctactcgggaggctgaggcaggagaatggcgtgaacctgggaggcagagcttgcagtgagccaagattgcaccactgcactccagcctgggcagcagagcgagactccatctcaaaaaaaaaaaaaaaaagaaaagaaagaccatagcactaacctcactttacaccttaagaccctggaaaaagaagagcaaactaaacctagagccaggagaaagaaggaaatataaaagattagatgagaataaatgaaatagagtgaagaaaagtagagaaaaatcaatgcaaccaaaagttgattctataaaaagatcagtaaaactgacacaccttctgctagactgaccaggaaaaaaggagaatcaaattactaaaatcagaaatgaaggagggaacatttcaactgaacttgtagaaataaaaaagattatgaaggcatattatgaataattttatgtcaataaattatcaatgaagtggacaaattcctaggaagacacaaactaccaaaaccaactcagaagtagaaaacttgaataaacctatatcaagtaaataggttaaatgagtttttgaaaagatacccacaaagaagagcccaggctgaaatagcttcttaaatgaattctacaaaacttttaatgaaaaattaatacaaattcttcacaaactttttcaaaaagtagaagagtggtgaacacttctgacacatactacaacatggaagaactcagaatatgctcagtgcaagaagccagtcacaaaagactacatattatatgatactatttatatgaagtgtccagaattggcaaatatatagagatagaaagtggattagtggttgcttagggctagcacagagttggggggaatgggaagggctgggggtaacagttgaagtgtatgaagtttctttagaggttgatgaaagtgttctaaaattggtcgtggtggtgatttcacaactctgaatatactaaaaaccaggaattgtacacgttaaatgggtgaattgtgtggtgtatgaattatatctcaataaaactcacaaaagtaggggtgtccatcaataggaaaatgggtaaataacttatggtacatctatttagtacaatactatgcagccattaaaatagtgaagtgtatctatgaatatattatgacctatactcatgtccaaggttgtgtattaagttaataaacaagatgcagaaatatgtatagtatgaatacatttttatgcaaaagcattcatttatgtatagtatgtatgtatatagatatttctgaataaatttaagaaaaagctgggaaatagacatagaaagttataaacctttggaagtgggattgaataggctgaaggaggactttcactttgtaaaatttttaaagtggtgtgattttggggtgatttttacttttttcattttcttttttaactaaaaaattttttaaaaaatattctgccaatggcatggcttccagaatatttgtcaggcctactctggggatatcatctgactatactcaggacaaactcctattcctttgatatactgctcacttaggattaacactctaatttcagacatagttaagtgacaaggaataaattatcctgatatagcctctgatacatgttaccaggggcatacttctaagctggactttttagaaggaagtgcttcctgttaggtagaaaatttcacctctgctttttactagacctacagaccactgcaattgaggaacataaaaatgaaggatatccttcaactggtgcatagataaaccgtagtatatccatgcaatggaatcctactcagcaataaactaatgaaatacacatgcaaccacttggatgaatcttaaatgcattttactaagtaaaagaagccaaactcaaaaggctgcttactgtttgattccattcatattattttctcaaaaagcaaaacaatagggatggagaaaaaacttcagtggatgtcaggggttaaggttggaatgctccttgactacaaagtggtagcatgaggaatttgtcttaataattgaaattttccgtgtctttattgtagttacataagtatatgcatttgtcaaaacccataggcttgtacactaaaaaggatgaattttactgtgtgtaatttttttaaataaatgttatttttatggaggaaagaaaaa

SEQ ID NO: 421263 - DNA, 4971 bp, Homo sapiens
aatgaatgcttcctccacaagttatcagtcttcaaaaagctatatatttttctagtgaaatattttagatcaaaatgttggtgttctcacagccatttaagctagcaaccattgagtatcattgaattcatagcaataaacattgattaagtgtctaatatatgttaaatattaggcatatgaattttagaagaggaacatacaagcaaagaatgccaaacggaaatggaaataaagcgttctctagaaaagaggatgccagtcacaaatcccccagttgtttgtttatggttgctggaaaataaaaaaacaatatacagagaggaagtagtacaaactggagtcagacctgtacagccacacttaacattctatgaccttggcaagtcacttaatctgagcctcacatttttcatctataaagtgaggataataatgctacttacctcactgggttgtgaagatgaactgagatattatccaggctgaagaacagaaaggaaaacaatgaataaaattgaacaagagtatagaacctgtgtgacaccattaagcattcctacatatttctaatgggagtacaggaaaaaaggaaaagaaatgaaggagcagaaaaatattctaagaaataatggctataaatacccccgatttgatgagagacattaacctatacatcccagaagaaaaagaaattacagacagatacatcataagaaaaatgctaaaacccaaaaacgaaaagaaaatcttaacagcaatacgagaaaaatgagccatcacttaccaaggaacccaaataaaattagtagttgacttcccctcagaaacaatggcagtggcagtggaataacacattcaaagtgttcaaagaaaataactgtcaaccaataatcctatatacaataaaactatttttcaaaaatgaacgtgaaataaaacatctcacataatcaaaaaccaagagaatttgttgctggcagacctgacttgctggaaatacaaaaggaagttcttcagcctgaaagcaagtgaccacagacagtaatctgaatctacacacatgcagaaaaagagcacaggcaaaaataattatgttgaagaagctgagtggaagcaaaactgtcttgtactaaagaactgactccagatggtaagacaaatccacaggaacaaatggagagaacgtgaaataggaaataagtttaatataaaaaaactataaacatatacttactcttctctcagcttcttttaaagatgtaaaattatattaagtaattataataatgtgtgttgggtttgtaatgtataggaataacatatataacaataataccacaaagcgggggatgggtttatataggaatagggttgttacattggaattaagttagtgtttatctgaagcctattctgtttagttaagatgtgtatggtaagccctagagcaaccactgaggaaataacttttaaaaaatcaaaaatattattaaatgtaaatatcacattatgaaataatgcaaaagaaggaatggagaagcaaaaagcttgaggcatatcaaaaacaataaaatggcagtcataagtcttcctatatcaaaataacaatgtgcatggattaagcaatactataaaaggcagagatgtcagaaacaagtctgattccacttcatgccatctatttgagacacactttagaagatagaaagagattaaaggtaaaaggatggaaaacaaatatatcacacagacaacagccataagaaagctggagtggctattctaataccagacaaaatagacttaaaaaaatgttactggagataaagagtaaaatgttacaatgataaaagggtcaatacatcaggaagatgtaacaactataaatatatatgcatctaacagtagagcccaaaatacatgaagcaaaaactgaaaggaaaggagaaacagataagtccataaaaagagttggaatattcaatacccctttttcaataatagagcacctagacagaagataaaccaggaaatagaagacttgaacaacattataaggcaaattgacctaaaagacatctatagaactttccacccaacatcagaatacatattcttctcgagtgcatatgaaacatctccaaaataggtcataagttaaagcataaaacaagccttaataaatataagtagactgaaatcatgcaaagcatgccctctgaccacatgggatgaagttagaaaacaatgaaaagttgggaaactcacaaatatgtggaaatcagacacacttgtaagtgactggctgggtgcagtagctcacgcctgaaatctcagcactttggtaggccgaagtgggaggattccttggatcccttgagaccaggaattcaagaccagcctgggcaacacagcaagaccctgtcattaccaaaaaaaaaaaaaaaatgtgtcaaagaaaaaaatcataagggaaattacaaaaccctttgagatgagtgataatgaagacacaacaaaccaaaacttacaagatgcagctaaagcagtgtttacagggaaatctataggtacaaatgcctgtacttaagaagaaaaaagaccaggcacagtggcttacgcctgtaatcccagcactttgggaggccggggcgggtggagatcatggggtcaggagatcgagaccattctgggtaacatggtgaaaccctgtctctactaaaaatacaaaaaattagccaggcgtggtcgtgggcacctgtagtcccagctactcgggaggctgaggcaggagaatggcgtgaacctgggaggcagagcttgcagtgagccaagattgcaccactgcactccagcctgggcagcagagcgagactccatctcaaaaaaaaaaaaaaaaagaaaagaaagaccatagcactaacctcactttacaccttaagaccctggaaaaagaagagcaaactaaacctagagccaggagaaagaaggaaatataaaagattagatgagaataaatgaaatagagtgaagaaaagtagagaaaaatcaatgcaaccaaaagttgattctataaaaagatcagtaaaactgacacaccttctgctagactgaccaggaaaaaaggagaatcaaattactaaaatcagaaatgaaggagggaacatttcaactgaacttgtagaaataaaaaagattatgaaggcatattatgaataattttatgtcaataaattatcaatgaagtggacaaattcctaggaagacacaaactaccaaaaccaactcagaagtagaaaacttgaataaacctatatcaagtaaataggttaaatgagtttttgaaaagatacccacaaagaagagcccaggctgaaatagcttcttaaatgaattctacaaaacttttaatgaaaaattaatacaaattcttcacaaactttttcaaaaagtagaagagtggtgaacacttctgacacatactacaacatggaagaactcagaatatgctcagtgcaagaagccagtcacaaaagactacatattatatgatactatttatatgaagtgtccagaattggcaaatatatagagatagaaagtggattagtggttgcttagggctagcacagagttggggggaatgggaagggctgggggtaacagttgaagtgtatgaagtttctttagaggttgatgaaagtgttctaaaattggtcgtggtggtgatttcacaactctgaatatactaaaaaccaggaattgtacacgttaaatgggtgaattgtgtggtgtatgaattatatctcaataaaactcacaaaagtaggggtgtccatcaataggaaaatgggtaaataacttatggtacatctatttagtacaatactatgcagccattaaaatagtgaagtgtatctatgaatatattatgacctatactcatgtccaaggttgtgtattaagttaataaacaagatgcagaaatatgtatagtatgaatacatttttatgcaaaagcattcatttatgtatagtatgtatgtatatagatatttctgaataaatttaagaaaaagctgggaaatagacatagaaagttataaacctttggaagtgggattgaataggctgaaggaggactttcactttgtaaaatttttaaagtggtgtgattttggggtgatttttacttttttcattttcttttttaactaaaaaattttttaaaaaatattctgccaatggcatggcttccagaatatttgtcaggcctactctggggatatcatctgactatactcaggacaaactcctattcctttgatatactgctcacttaggattaacactctaatttcagacatagttaagtgacaaggaataaattatcctgatatagcctctgatacatgttaccaggggcatacttctaagctggactttttagaaggaagtgcttcctgttaggtagaaaatttcacctctgctttttactagacctacagaccactgcaattgaggaacataaaaatgaaggatatccttcaactggtgcatagataaaccgtagtatatccatgcaatggaatcctactcagcaataaactaatgaaatacacatgcaaccacttggatgaatcttaaatgcattttactaagtaaaagaagccaaactcaaaaggctgcttactgtttgattccattcatattattttctcaaaaagcaaaacaatagggatggagaaaaaacttcagtggatgtcaggggttaaggttggaatgctccttgactacaaagtggtagcatgaggaatttgtcttaataattgaaattttccgtgtctttattgtagttacataagtatatgcatttgtcaaaacccataggcttgtacactaaaaaggatgaattttactgtgtgtaatttttttaaataaatgttatttttatggaggaaagaaaaa

SEQ ID NO: 421264 - DNA, 1758 bp, Homo sapiens
ggacttgaggtccgcggcctatttacccaagttggaggtaggggcctgtggaaacatgaagagggtaaacagctgtgtgaagagtgatgagcatgtcctggaggagctggaaacagaaggggagaggcagctgaaaagcctccttcagcatcaacttgatacttctgtctccattgaggaatgtatgtctaagaaagagagctttgctcctggtactatgtacaagccctttgggaaggaagcagctgggactatgactttgtcccaattccagacactgcatgagaaggaccaggaaactgcttctctcagggaattagggcttaatgaaacagaaatcttgatctggaagagccatgtttctggtgaaaagaagacaaaactgagggcaactcctgaagcaatacagaaccgtcttcaagatattgaagaaaggatctcggagcgtcagcgcattctttgcctgccacagagatttgcaaagagcaaacagctgacccggcgagaaatggaaatagaaaagtctttatttcagggagctgatcgtcactccttccttaaggctctttattaccaagatgaaccccaaaagaagaacaaaggtgatcccatgaacaacctggaaagtttttaccaagagatgataatgaaaaaacgtcttgaagagtttcaacttatgagaggtgaaccctttgcttcccactcactggtctcagctacatcagtgggtgatagtggcacagctgagagcccatcattactccaggacaagggaaaacaggcagcacagggtaaaggccccagtctccatgtggcaaatgttattgatttttcacctgagcagtgttggactgggcctaagaagctgacgcagccaatagaatttgtcccagaagatgaaatccagagaaatcgtttgtcagaggaagagatccgaaaaattcctatgttttcttcatataatccaggggaaccaaacaaggtattatacctgaagaaccttagccctcgggtgactgaaagagatcttgtgtcattgttcgctcggttccaggagaaaaaaggacctccaattcaattccgaatgatgactggacgaatgaggggccaggcttttatcacctttcccaataaggagatagcatggcaagcattgcatctagtaaatggatacaaactacatgggaaaatattggtgatagagtttggaaagaacaaaaagcaacggtcaaatctccaagcgacttctctcatatcatgtgctacaggtagcactacagaaattagtggtagctagaatatatataaattgtgggtcctggatggtctttcttgaattggaatcttggatctaggatttatgtatagacaccagtttgtttggagttgaagaggaaaaactaactgagggaggggaaaaaagtaatttcagcttttggagagaactggtagaaaacattttctattatataattgaagactatataggacagatgatatgctgagtatgaagggtaaagtgcaaagagtattattttctcaggatgaattacaacggattattcctaaggatttttaaaaatctttataatttttctggggtcctcaatatttgtctctagagataacattctttcttagactgcttcgtatacacagaaataaaaaactaattaaatgttgaaatatttctttactagagcccatttgccatatttcatccacctagtaaataaaagagtaggacccccaggccta

SEQ ID NO: 421265 - DNA, 856 bp, Homo sapiens
ggacttgaggtccgcggcctatttacccaagttggaggtaggggcctgtggaaacatgaagagggtaaacagctgtgtgaagagtgatgagcatgtcctggaggagctggaaacagaaggggagaggcagctgaaaagcctccttcagcatcaacttgatacttctgtctccattgaggaatgtatgtctaagaaagagagctttgctcctggtactatgtacaagccctttgggaaggaagcagctgggactatgactttgtcccaattccagacactgcatgagaaggaccaggaaactgcttctctcagggaattagggcttaatgaaacagaaatcttgatctggaagagccatgtttctggtgaaaagaagacaaaactgagggcaactcctgaagcaatacagaaccgtcttcaagatattgaagaaaggatctcggagcgtcagcgcattctttgcctgccacagagatttgcaaagagcaaacagctgacccggcgagaaatggaaatagaaaagtctttatttcagggagctgatcgtcactccttccttaaggctctttattaccaagagtccactgtgtcgcccaggctaaagtgcaggggcatgatttcagctcactgcaacctccacttcccaggttcgagcaattcccgtgcctcagccttccgagtagctgggattacagacgtttgccatcacccctggctaatttttatatttttagtacagactagaaatacaaaatattcaccagggacagtggcacacgccatgttggccaagctagtctggaactcctgacctccagtgatccactcacctcagcctcccaaagtgttgggattg

SEQ ID NO: 421266 - DNA, 403 bp, Homo sapiens
tgattgtgtttgtccttgaccttgactattcattctctgcatactatataagtagcatatttcctataaggttcttggtactttgctaaggtcctgaactatccttagcgttttaaagaaatcttgataagactctagtccatacccattagaagccccgaattgaaggaatagtaacatccaatttcctacagtgtaataatcaaatagtgttcataggaccaccatagctggtagccttggtgcctctggaattagccaataattgactgcctggtcgtgagttgggtatatgctaccacatgagtcttctcttcagaatgctctacctggctgtcatatgacatatgacttaaattgctgttggcaaagcagcaaagtgaaaaggtcctataagctttaa

SEQ ID NO: 421267 - DNA, 425 bp, Homo sapiens
taaaacacagttgtataaaacaatatgtatatagttgcatcgtttggcctataacgtataaaatataatatatttgccgataacaggttgaagaagctgagtggaagcaaaactgtcttgtactaaagaactgactccagatggtaagacaaatccacaggaacaaatggagagaacgtgaaataggaaataagtttaatataaaaaaactataaacatatacttactcttctctcagcttcttttaaagatgtaaaattatattaagtaattataataatgtgtgttgggtttgtaatgtataggaataacatatataacaataataccacaaagcgggggatgggtttatataggaatagggttgttacattggaattaagttagtgtttatctgaagcctattctgtttagttaagatgtgt

SEQ ID NO: 421268 - DNA, 451 bp, Homo sapiens
cataaaaagagttggaatattcaatacccctttttcaataatagagcacctagacagaagataaaccaggaaatagaagacttgaacaacattataaggcaaattgacctaaaagacatctatagaactttccacccaacatcagaatacatattcttctcgagtgcatatgaaacatctccaaaataggtcataagttaaagcataaaacaagccttaataaatataagtagactgaaatcatgcaaagcatgccctctgaccacatgggatgaagttagaaaacaatgaaaagttgggaaactcacaaatatgtggaaatcagacacacttgtaagtgactggctgggtgcagtagctcacgcctgaaatctcagcactttggtaggccgaagtgggaggattccttggatcccttgagaccaggaattcaagaccagcctgggcaaca

SEQ ID NO: 421269 - DNA, 2478 bp, Homo sapiens
ggacttgaggtccgcggcctatttacccaagttggaggtaggggcctgtggaaacatgaagagggtaaacagctgtgtgaagagtgatgagcatgtcctggaggagctggaaacagaaggggagaggcagctgaaaagcctccttcagcatcaacttgatacttctgtctccattgaggaatgtatgtctaagaaagagagctttgctcctggtactatgtacaagccctttgggaaggaagcagctgggactatgactttgtcccaattccagacactgcatgagaaggaccaggaaactgcttctctcagggaattagggcttaatgaaacagaaatcttgatctggaagagccatgtttctggtgaaaagaagacaaaactgagggcaactcctgaagcaatacagaaccgtcttcaagatattgaagaaaggatctcggagcgtcagcgcattctttgcctgccacagagatttgcaaagagcaaacagctgacccggcgagaaatggaaatagaaaagtctttatttcagggagctgatcgtcactccttccttaaggctctttattaccaagcataccacaaaaagacaagtgcagacaagtacatgacctcaatgaagaggaagataaaattaggcacaaaagatgaaccccaaaagaagaacaaaggtgatcccatgaacaacctggaaagtttttaccaagagatgataatgaaaaaacgtcttgaagagtttcaacttatgagaggacttaccagttttcccagagaagacttccaaaatctttcttacgagggtactaccagcgttctaggagccaaatggcagaaaaggactgggaggacctcaacatttagtattctcttagtttccttgctttcagaaacagtgttcacatcttcagccatgtatggcattccccatcttctgacaatgagcctcaagttttctaccaggattggcaagttatcttttaccccatagcatattgtgagggagggtatttaaaaatcatattggcttttagacagccttcaactgatttgccttattttaaccccatcccttcacatttatttctgaaggtaagtgaaattatcagttcctgaactatttaaggattcttaagtggtgacaggtgtgttcttggctctctccactaccagtttaaaattcagctttcttcagtgtgctgagttggttcctgctcatccaattatttttcatcttccagattattattgctgttgtctccttttcttgttcctcctgaccttgttgatttgtgttttttttttttttttttaagtgcctatagttttagagagttttctggatggaatgaaattaaatgaatgtgttcaatccaccatttttatgtgaaactaattctaatcataatgaaagagttttcttacggctgagcatggtgtctcacgcctgtaatcccagcattttgggaggccaaggcgggtggatcacctgagtttgggagttcaagaccagcctggacaacatggtgaaaccccacgtctactaaaaatacaaaaattagccaggtgtggtggcacatgactgtaatcccagctactcgggaggctgaggcatgagaatcacttgagcctgggaggccaaggttgcagtgagcagagattgcgccactgcactccagcctgggtgacagagtgagactttgtctcaaaaagaaaaaaacaaagagtgccttacctcctttatatgatattttggttgatcctcaatttgttttaggtattatacctgaagaaccttagccctcgggtgactgaaagagatcttgtgtcattgttcgctcggttccaggagaaaaaaggacctccaattcaattccgaatgatgactggacgaatgaggggccaggcttttatcacctttcccaataaggagatagcatggcaagcattgcatctagtaaatggatacaaactacatgggaaaatattggtgatagagtttggaaagaacaaaaagcaacggtcaaatctccaagcgacttctctcatatcatgtgctacaggtagcactacagaaattagtggtagctagaatatatataaattgtgggtcctggatggtctttcttgaattggaatcttggatctaggatttatgtatagacaccagtttgtttggagttgaagaggaaaaactaactgagggaggggaaaaaagtaatttcagcttttggagagaactggtagaaaacattttctattatataattgaagactatataggacagatgatatgctgagtatgaagggtaaagtgcaaagagtattattttctcaggatgaattacaacggattattcctaaggatttttaaaaatctttataatttttctggggtcctcaatatttgtctctagagataacattctttcttagactgcttcgtatacacagaaataaaaaactaattaaatgttg

SEQ ID NO: 421270 - DNA, 5088 bp, Homo sapiens
ggacttgaggtccgcggcctatttacccaagttggaggtaggggcctgtggaaacatgaagagggtaaacagctgtgtgaagagtgatgagcatgtcctggaggagctggaaacagaaggggagaggcagctgaaaagcctccttcagcatcaacttgatacttctgtctccattgaggaatgtatgtctaagaaagagagctttgctcctggtactatgtacaagccctttgggaaggaagcagctgggactatgactttgtcccaattccagacactgcatgagaaggaccaggaaactgcttctctcagggaattagggcttaatgaaacagaaatcttgatctggaagagccatgtttctggtgaaaagaagacaaaactgagggcaactcctgaagcaatacagaaccgtcttcaagatattgaagaaaggatctcggagcgtcagcgcattctttgcctgccacagagatttgcaaagagcaaacagctgacccggcgagaaatggaaatagaaaagtctttatttcagggagctgatcgtcactccttccttaaggctctttattaccaagatgaaccccaaaagaagaacaaaggtgatcccatgaacaacctggaaagtttttaccaagagatgataatgaaaaaacgtcttgaagagtttcaacttatgagaggtgaaccctttgcttcccactcactggtctcagctacatcagtgggtgatagtggcacagctgagagcccatcattactccaggacaagggaaaacaggcagcacagggtaaaggccccagtctccatgtggcaaatgttattgatttttcacctgagcagtgttggactgggcctaagaagctgacgcagccaatagaatttgtcccagaagatgaaatccagagaaatcgtttgtcagaggaagagatccgaaaaattcctatgttttcttcatataatccaggggaaccaaacaaggtattatacctgaagaaccttagccctcgggtgactgaaagagatcttgtgtcattgttcgctcggttccaggagaaaaaaggacctccaattcaattccgaatgatgactggacgaatgaggggccaggcttttatcacctttcccaataaggagatagcatggcaagcattgcatctagtaaatggatacaaactacatgggaaaatattggtgatagagtttggaaagaacaaaaagcaacggtcaaatctccaagcgacttctctcatatcatgtgctacaggttgaagaagctgagtggaagcaaaactgtcttgtactaaagaactgactccagatggtaagacaaatccacaggaacaaatggagagaacgtgaaataggaaataagtttaatataaaaaaactataaacatatacttactcttctctcagcttcttttaaagatgtaaaattatattaagtaattataataatgtgtgttgggtttgtaatgtataggaataacatatataacaataataccacaaagcgggggatgggtttatataggaatagggttgttacattggaattaagttagtgtttatctgaagcctattctgtttagttaagatgtgtatggtaagccctagagcaaccactgaggaaataacttttaaaaaatcaaaaatattattaaatgtaaatatcacattatgaaataatgcaaaagaaggaatggagaagcaaaaagcttgaggcatatcaaaaacaataaaatggcagtcataagtcttcctatatcaaaataacaatgtgcatggattaagcaatactataaaaggcagagatgtcagaaacaagtctgattccacttcatgccatctatttgagacacactttagaagatagaaagagattaaaggtaaaaggatggaaaacaaatatatcacacagacaacagccataagaaagctggagtggctattctaataccagacaaaatagacttaaaaaaatgttactggagataaagagtaaaatgttacaatgataaaagggtcaatacatcaggaagatgtaacaactataaatatatatgcatctaacagtagagcccaaaatacatgaagcaaaaactgaaaggaaaggagaaacagataagtccataaaaagagttggaatattcaatacccctttttcaataatagagcacctagacagaagataaaccaggaaatagaagacttgaacaacattataaggcaaattgacctaaaagacatctatagaactttccacccaacatcagaatacatattcttctcgagtgcatatgaaacatctccaaaataggtcataagttaaagcataaaacaagccttaataaatataagtagactgaaatcatgcaaagcatgccctctgaccacatgggatgaagttagaaaacaatgaaaagttgggaaactcacaaatatgtggaaatcagacacacttgtaagtgactggctgggtgcagtagctcacgcctgaaatctcagcactttggtaggccgaagtgggaggattccttggatcccttgagaccaggaattcaagaccagcctgggcaacacagcaagaccctgtcattaccaaaaaaaaaaaaaaaatgtgtcaaagaaaaaaatcataagggaaattacaaaaccctttgagatgagtgataatgaagacacaacaaaccaaaacttacaagatgcagctaaagcagtgtttacagggaaatctataggtacaaatgcctgtacttaagaagaaaaaagaccaggcacagtggcttacgcctgtaatcccagcactttgggaggccggggcgggtggagatcatggggtcaggagatcgagaccattctgggtaacatggtgaaaccctgtctctactaaaaatacaaaaaattagccaggcgtggtcgtgggcacctgtagtcccagctactcgggaggctgaggcaggagaatggcgtgaacctgggaggcagagcttgcagtgagccaagattgcaccactgcactccagcctgggcagcagagcgagactccatctcaaaaaaaaaaaaaaaaagaaaagaaagaccatagcactaacctcactttacaccttaagaccctggaaaaagaagagcaaactaaacctagagccaggagaaagaaggaaatataaaagattagatgagaataaatgaaatagagtgaagaaaagtagagaaaaatcaatgcaaccaaaagttgattctataaaaagatcagtaaaactgacacaccttctgctagactgaccaggaaaaaaggagaatcaaattactaaaatcagaaatgaaggagggaacatttcaactgaacttgtagaaataaaaaagattatgaaggcatattatgaataattttatgtcaataaattatcaatgaagtggacaaattcctaggaagacacaaactaccaaaaccaactcagaagtagaaaacttgaataaacctatatcaagtaaataggttaaatgagtttttgaaaagatacccacaaagaagagcccaggctgaaatagcttcttaaatgaattctacaaaacttttaatgaaaaattaatacaaattcttcacaaactttttcaaaaagtagaagagtggtgaacacttctgacacatactacaacatggaagaactcagaatatgctcagtgcaagaagccagtcacaaaagactacatattatatgatactatttatatgaagtgtccagaattggcaaatatatagagatagaaagtggattagtggttgcttagggctagcacagagttggttgatgaaagtgttctaaaattggtcgtggtggtgatttcacaactctgaatatactaaaaaccaggaattgtacacgttaaatgggtgaattgtgtggtgtatgaattatatctcaataaaactcacaaaagtaggggtgtccatcaataggaaaatgggtaaataacttatggtacatctatttagtacaatactatgcagccattaaaatagtgaagtgtatctatgaatatattatgacctatactcatgtccaaggttgtgtattaagttaataaacaagatgcagaaatatgtatagtatgaatacatttttatgcaaaagcattcatttatgtatagtatgtatgtatatagatatttctgaataaatttaagaaaaagctgggaaatagacatagaaagttataaacctttggaagtgggattgaataggctgaaggaggactttcactttgtaaaatttttaaagtggtgtgattttggggtgatttttacttttttcattttcttttttaactaaaaaattttttaaaaaatattctgccaatggcatggcttccagaatatttgtcaggcctactctggggatatcatctgactatactcaggacaaactcctattcctttgatatactgctcacttaggattaacactctaatttcagacatagttaagtgacaaggaataaattatcctgatatagcctctgatacatgttaccaggggcatacttctaagctggactttttagaaggaagtgcttcctgttaggtagaaaatttcacctctgctttttactagacctacagaccactgcaattgaggaacataaaaatgaaggatatccttcaactggtgcatagataaaccgtagtatatccatgcaatggaatcctactcagcaataaactaatgaaatacacatgcaaccacttggatgaatcttaaatgcattttactaagtaaaagaagccaaactcaaaaggctgcttactgtttgattccattcatattattttctcaaaaagcaaaacaatagggatggagaaaaaacttcagtggatgtcaggggttaaggttggaatgctccttgactacaaagtggtagcatgaggaatttgtcttaataattgaaattttccgtgtctttattgtagttacataagtatatgcatttgtcaaaacccataggcttgtacactaaaaaggatgaattttactgtgtgtaatttttttaaataaatgttatttttatggaggaaagaaaaa

SEQ ID NO: 421271 - DNA, 6064 bp, Homo sapiens
ggacttgaggtccgcggcctatttacccaagttggaggtaggggcctgtggaaacatgaagagggtaaacagctgtgtgaagagtgatgagcatgtcctggaggagctggaaacagaaggggagaggcagctgaaaagcctccttcagcatcaacttgatacttctgtctccattgaggaatgtatgtctaagaaagagagctttgctcctggtactatgtacaagccctttgggaaggaagcagctgggactatgactttgtcccaattccagacactgcatgagaaggaccaggaaactgcttctctcagggaattagggcttaatgaaacagaaatcttgatctggaagagccatgtttctggtgaaaagaagacaaaactgagggcaactcctgaagcaatacagaaccgtcttcaagatattgaagaaaggatctcggagcgtcagcgcattctttgcctgccacagagatttgcaaagagcaaacagctgacccggcgagaaatggaaatagaaaagtctttatttcagggagctgatcgtcactccttccttaaggctctttattaccaagatgaaccccaaaagaagaacaaaggtgatcccatgaacaacctggaaagtttttaccaagagatgataatgaaaaaacgtcttgaagagtttcaacttatgagaggtgaaccctttgcttcccactcactggtctcagctacatcagtgggtgatagtggcacagctgagagcccatcattactccaggacaagggaaaacaggcagcacagggtaaaggccccagtctccatgtggcaaatgttattgatttttcacctgagcagtgttggactgggcctaagaagctgacgcagccaatagaatttgtcccagaagatgaaatccagagaaatcgtttgtcagaggaagagatccgaaaaattcctatgttttcttcatataatccaggggaaccaaacaaggtattatacctgaagaaccttagccctcgggtgactgaaagagatcttgtgtcattgttcgctcggttccaggagaaaaaaggacctccaattcaattccgaatgatgactggacgaatgaggggccaggcttttatcacctttcccaataaggagatagcatggcaagcattgcatctagtaaatggatacaaactacatgggaaaatattggtgatagagtttggaaagaacaaaaagcaacggtcaaatctccaagcgacttctctcatatcatgtgctacaggcatatgaattttagaagaggaacatacaagcaaagaatgccaaacggaaatggaaataaagcgttctctagaaaagaggatgccagtcacaaatcccccagttgtttgtttatggttgctggaaaataaaaaaacaatatacagagaggaagtagtacaaactggagtcagacctgtacagccacacttaacattctatgaccttggcaagtcacttaatctgagcctcacatttttcatctataaagtgaggataataatgctacttacctcactgggttgtgaagatgaactgagatattatccaggctgaagaacagaaaggaaaacaatgaataaaattgaacaagagtatagaacctgtgtgacaccattaagcattcctacatatttctaatgggagtacaggaaaaaaggaaaagaaatgaaggagcagaaaaatattctaagaaataatggctataaatacccccgatttgatgagagacattaacctatacatcccagaagaaaaagaaattacagacagatacatcataagaaaaatgctaaaacccaaaaacgaaaagaaaatcttaacagcaatacgagaaaaatgagccatcacttaccaaggaacccaaataaaattagtagttgacttcccctcagaaacaatggcagtggcagtggaataacacattcaaagtgttcaaagaaaataactgtcaaccaataatcctatatacaataaaactatttttcaaaaatgaacgtgaaataaaacatctcacataatcaaaaaccaagagaatttgttgctggcagacctgacttgctggaaatacaaaaggaagttcttcagcctgaaagcaagtgaccacagacagtaatctgaatctacacacatgcagaaaaagagcacaggcaaaaataattatgttgaagaagctgagtggaagcaaaactgtcttgtactaaagaactgactccagatggtaagacaaatccacaggaacaaatggagagaacgtgaaataggaaataagtttaatataaaaaaactataaacatatacttactcttctctcagcttcttttaaagatgtaaaattatattaagtaattataataatgtgtgttgggtttgtaatgtataggaataacatatataacaataataccacaaagcgggggatgggtttatataggaatagggttgttacattggaattaagttagtgtttatctgaagcctattctgtttagttaagatgtgtatggtaagccctagagcaaccactgaggaaataacttttaaaaaatcaaaaatattattaaatgtaaatatcacattatgaaataatgcaaaagaaggaatggagaagcaaaaagcttgaggcatatcaaaaacaataaaatggcagtcataagtcttcctatatcaaaataacaatgtgcatggattaagcaatactataaaaggcagagatgtcagaaacaagtctgattccacttcatgccatctatttgagacacactttagaagatagaaagagattaaaggtaaaaggatggaaaacaaatatatcacacagacaacagccataagaaagctggagtggctattctaataccagacaaaatagacttaaaaaaatgttactggagataaagagtaaaatgttacaatgataaaagggtcaatacatcaggaagatgtaacaactataaatatatatgcatctaacagtagagcccaaaatacatgaagcaaaaactgaaaggaaaggagaaacagataagtccataaaaagagttggaatattcaatacccctttttcaataatagagcacctagacagaagataaaccaggaaatagaagacttgaacaacattataaggcaaattgacctaaaagacatctatagaactttccacccaacatcagaatacatattcttctcgagtgcatatgaaacatctccaaaataggtcataagttaaagcataaaacaagccttaataaatataagtagactgaaatcatgcaaagcatgccctctgaccacatgggatgaagttagaaaacaatgaaaagttgggaaactcacaaatatgtggaaatcagacacacttgtaagtgactggctgggtgcagtagctcacgcctgaaatctcagcactttggtaggccgaagtgggaggattccttggatcccttgagaccaggaattcaagaccagcctgggcaacacagcaagaccctgtcattaccaaaaaaaaaaaaaaaatgtgtcaaagaaaaaaatcataagggaaattacaaaaccctttgagatgagtgataatgaagacacaacaaaccaaaacttacaagatgcagctaaagcagtgtttacagggaaatctataggtacaaatgcctgtacttaagaagaaaaaagaccaggcacagtggcttacgcctgtaatcccagcactttgggaggccggggcgggtggagatcatggggtcaggagatcgagaccattctgggtaacatggtgaaaccctgtctctactaaaaatacaaaaaattagccaggcgtggtcgtgggcacctgtagtcccagctactcgggaggctgaggcaggagaatggcgtgaacctgggaggcagagcttgcagtgagccaagattgcaccactgcactccagcctgggcagcagagcgagactccatctcaaaaaaaaaaaaaaaaagaaaagaaagaccatagcactaacctcactttacaccttaagaccctggaaaaagaagagcaaactaaacctagagccaggagaaagaaggaaatataaaagattagatgagaataaatgaaatagagtgaagaaaagtagagaaaaatcaatgcaaccaaaagttgattctataaaaagatcagtaaaactgacacaccttctgctagactgaccaggaaaaaaggagaatcaaattactaaaatcagaaatgaaggagggaacatttcaactgaacttgtagaaataaaaaagattatgaaggcatattatgaataattttatgtcaataaattatcaatgaagtggacaaattcctaggaagacacaaactaccaaaaccaactcagaagtagaaaacttgaataaacctatatcaagtaaataggttaaatgagtttttgaaaagatacccacaaagaagagcccaggctgaaatagcttcttaaatgaattctacaaaacttttaatgaaaaattaatacaaattcttcacaaactttttcaaaaagtagaagagtggtgaacacttctgacacatactacaacatggaagaactcagaatatgctcagtgcaagaagccagtcacaaaagactacatattatatgatactatttatatgaagtgtccagaattggcaaatatatagagatagaaagtggattagtggttgcttagggctagcacagagttggggggaatgggaagggctgggggtaacagttgaagtgtatgaagtttctttagaggttgatgaaagtgttctaaaattggtcgtggtggtgatttcacaactctgaatatactaaaaaccaggaattgtacacgttaaatgggtgaattgtgtggtgtatgaattatatctcaataaaactcacaaaagtaggggtgtccatcaataggaaaatgggtaaataacttatggtacatctatttagtacaatactatgcagccattaaaatagtgaagtgtatctatgaatatattatgacctatactcatgtccaaggttgtgtattaagttaataaacaagatgcagaaatatgtatagtatgaatacatttttatgcaaaagcattcatttatgtatagtatgtatgtatatagatatttctgaataaatttaagaaaaagctgggaaatagacatagaaagttataaacctttggaagtgggattgaataggctgaaggaggactttcactttgtaaaatttttaaagtggtgtgattttggggtgatttttacttttttcattttcttttttaactaaaaaattttttaaaaaatattctgccaatggcatggcttccagaatatttgtcaggcctactctggggatatcatctgactatactcaggacaaactcctattcctttgatatactgctcacttaggattaacactctaatttcagacatagttaagtgacaaggaataaattatcctgatatagcctctgatacatgttaccaggggcatacttctaagctggactttttagaaggaagtgcttcctgttaggtagaaaatttcacctctgctttttactagacctacagaccactgcaattgaggaacataaaaatgaaggatatccttcaactggtgcatagataaaccgtagtatatccatgcaatggaatcctactcagcaataaactaatgaaatacacatgcaaccacttggatgaatcttaaatgcattttactaagtaaaagaagccaaactcaaaaggctgcttactgtttgattccattcatattattttctcaaaaagcaaaacaatagggatggagaaaaaacttcagtggatgtcaggggttaaggttggaatgctccttgactacaaagtggtagcatgaggaatttgtcttaataattgaaattttccgtgtctttattgtagttacataagtatatgcatttgtcaaaacccataggcttgtacactaaaaaggatgaattttactgtgtgtaatttttttaaataaatgttatttttatggaggaaagaaaaa

SEQ ID NO: 421272 - DNA, 7020 bp, Homo sapiens
ggacttgaggtccgcggcctatttacccaagttggaggtaggggcctgtggaaacatgaagagggtaaacagctgtgtgaagagtgatgagcatgtcctggaggagctggaaacagaaggggagaggcagctgaaaagcctccttcagcatcaacttgatacttctgtctccattgaggaatgtatgtctaagaaagagagctttgctcctggtactatgtacaagccctttgggaaggaagcagctgggactatgactttgtcccaattccagacactgcatgagaaggaccaggaaactgcttctctcagggaattagggcttaatgaaacagaaatcttgatctggaagagccatgtttctggtgaaaagaagacaaaactgagggcaactcctgaagcaatacagaaccgtcttcaagatattgaagaaaggatctcggagcgtcagcgcattctttgcctgccacagagatttgcaaagagcaaacagctgacccggcgagaaatggaaatagaaaagtctttatttcagggagctgatcgtcactccttccttaaggctctttattaccaagcataccacaaaaagacaagtgcagacaagtacatgacctcaatgaagaggaagataaaattaggcacaaaagatgaaccccaaaagaagaacaaaggtgatcccatgaacaacctggaaagtttttaccaagagatgataatgaaaaaacgtcttgaagagtttcaacttatgagagtgttggactgggcctaagaagctgacgcagccaatagaatttgtcccagaagatgaaatccagagaaatcgtttgtcagaggaagagatccgaaaaattcctatgttttcttcatataatccaggggaaccaaacaagtatttttatatctttcctcctaggacttaccagttttcccagagaagacttccaaaatctttcttacgagggtactaccagcgttctaggagccaaatggcagaaaaggactgggaggacctcaacatttagtattctcttagtttccttgctttcagaaacagtgttcacatcttcagccatgtatggcattccccatcttctgacaatgagcctcaagttttctaccaggattggcaagttatcttttaccccatagcatattgtgagggagggtatttaaaaatcatattggcttttagacagccttcaactgatttgccttattttaaccccatcccttcacatttatttctgaaggtaagtgaaattatcagttcctgaactatttaaggattcttaagtggtgacaggtgtgttcttggctctctccactaccagtttaaaattcagctttcttcagtgtgctgagttggttcctgctcatccaattatttttcatcttccagattattattgctgttgtctccttttcttgttcctcctgaccttgttgatttgtgttttttttttttttttttaagtgcctatagttttagagagttttctggatggaatgaaattaaatgaatgtgttcaatccaccatttttatgtgaaactaattctaatcataatgaaagagttttcttacggctgagcatggtgtctcacgcctgtaatcccagcattttgggaggccaaggcgggtggatcacctgagtttgggagttcaagaccagcctggacaacatggtgaaaccccacgtctactaaaaatacaaaaattagccaggtgtggtggcacatgactgtaatcccagctactcgggaggctgaggcatgagaatcacttgagcctgggaggccaaggttgcagtgagcagagattgcgccactgcactccagcctgggtgacagagtgagactttgtctcaaaaagaaaaaaacaaagagtgccttacctcctttatatgatattttggttgatcctcaatttgttttaggtattatacctgaagaaccttagccctcgggtgactgaaagagatcttgtgtcattgttcgctcggttccaggagaaaaaaggacctccaattcaattccgaatgatgactggacgaatgaggggccaggcttttatcacctttcccaataaggagatagcatggcaagcattgcatctagtaaatggatacaaactacatgggaaaatattggtgatagagtttggaaagaacaaaaagcaacggtcaaatctccaagcgacttctctcatatcatgtgctacaggcatatgaattttagaagaggaacatacaagcaaagaatgccaaacggaaatggaaataaagcgttctctagaaaagaggatgccagtcacaaatcccccagttgtttgtttatggttgctggaaaataaaaaaacaatatacagagaggaagtagtacaaactggagtcagacctgtacagccacacttaacattctatgaccttggcaagtcacttaatctgagcctcacatttttcatctataaagtgaggataataatgctacttacctcactgggttgtgaagatgaactgagatattatccaggctgaagaacagaaaggaaaacaatgaataaaattgaacaagagtatagaacctgtgtgacaccattaagcattcctacatatttctaatgggagtacaggaaaaaaggaaaagaaatgaaggagcagaaaaatattctaagaaataatggctataaatacccccgatttgatgagagacattaacctatacatcccagaagaaaaagaaattacagacagatacatcataagaaaaatgctaaaacccaaaaacgaaaagaaaatcttaacagcaatacgagaaaaatgagccatcacttaccaaggaacccaaataaaattagtagttgacttcccctcagaaacaatggcagtggcagtggaataacacattcaaagtgttcaaagaaaataactgtcaaccaataatcctatatacaataaaactatttttcaaaaatgaacgtgaaataaaacatctcacataatcaaaaaccaagagaatttgttgctggcagacctgacttgctggaaatacaaaaggaagttcttcagcctgaaagcaagtgaccacagacagtaatctgaatctacacacatgcagaaaaagagcacaggcaaaaataattatgttgaagaagctgagtggaagcaaaactgtcttgtactaaagaactgactccagatggtaagacaaatccacaggaacaaatggagagaacgtgaaataggaaataagtttaatataaaaaaactataaacatatacttactcttctctcagcttcttttaaagatgtaaaattatattaagtaattataataatgtgtgttgggtttgtaatgtataggaataacatatataacaataataccacaaagcgggggatgggtttatataggaatagggttgttacattggaattaagttagtgtttatctgaagcctattctgtttagttaagatgtgtatggtaagccctagagcaaccactgaggaaataacttttaaaaaatcaaaaatattattaaatgtaaatatcacattatgaaataatgcaaaagaaggaatggagaagcaaaaagcttgaggcatatcaaaaacaataaaatggcagtcataagtcttcctatatcaaaataacaatgtgcatggattaagcaatactataaaaggcagagatgtcagaaacaagtctgattccacttcatgccatctatttgagacacactttagaagatagaaagagattaaaggtaaaaggatggaaaacaaatatatcacacagacaacagccataagaaagctggagtggctattctaataccagacaaaatagacttaaaaaaatgttactggagataaagagtaaaatgttacaatgataaaagggtcaatacatcaggaagatgtaacaactataaatatatatgcatctaacagtagagcccaaaatacatgaagcaaaaactgaaaggaaaggagaaacagataagtccataaaaagagttggaatattcaatacccctttttcaataatagagcacctagacagaagataaaccaggaaatagaagacttgaacaacattataaggcaaattgacctaaaagacatctatagaactttccacccaacatcagaatacatattcttctcgagtgcatatgaaacatctccaaaataggtcataagttaaagcataaaacaagccttaataaatataagtagactgaaatcatgcaaagcatgccctctgaccacatgggatgaagttagaaaacaatgaaaagttgggaaactcacaaatatgtggaaatcagacacacttgtaagtgactggctgggtgcagtagctcacgcctgaaatctcagcactttggtaggccgaagtgggaggattccttggatcccttgagaccaggaattcaagaccagcctgggcaacacagcaagaccctgtcattaccaaaaaaaaaaaaaaaatgtgtcaaagaaaaaaatcataagggaaattacaaaaccctttgagatgagtgataatgaagacacaacaaaccaaaacttacaagatgcagctaaagcagtgtttacagggaaatctataggtacaaatgcctgtacttaagaagaaaaaagaccaggcacagtggcttacgcctgtaatcccagcactttgggaggccggggcgggtggagatcatggggtcaggagatcgagaccattctgggtaacatggtgaaaccctgtctctactaaaaatacaaaaaattagccaggcgtggtcgtgggcacctgtagtcccagctactcgggaggctgaggcaggagaatggcgtgaacctgggaggcagagcttgcagtgagccaagattgcaccactgcactccagcctgggcagcagagcgagactccatctcaaaaaaaaaaaaaaaaagaaaagaaagaccatagcactaacctcactttacaccttaagaccctggaaaaagaagagcaaactaaacctagagccaggagaaagaaggaaatataaaagattagatgagaataaatgaaatagagtgaagaaaagtagagaaaaatcaatgcaaccaaaagttgattctataaaaagatcagtaaaactgacacaccttctgctagactgaccaggaaaaaaggagaatcaaattactaaaatcagaaatgaaggagggaacatttcaactgaacttgtagaaataaaaaagattatgaaggcatattatgaataattttatgtcaataaattatcaatgaagtggacaaattcctaggaagacacaaactaccaaaaccaactcagaagtagaaaacttgaataaacctatatcaagtaaataggttaaatgagtttttgaaaagatacccacaaagaagagcccaggctgaaatagcttcttaaatgaattctacaaaacttttaatgaaaaattaatacaaattcttcacaaactttttcaaaaagtagaagagtggtgaacacttctgacacatactacaacatggaagaactcagaatatgctcagtgcaagaagccagtcacaaaagactacatattatatgatactatttatatgaagtgtccagaattggcaaatatatagagatagaaagtggattagtggttgcttagggctagcacagagttggggggaatgggaagggctgggggtaacagttgaagtgtatgaagtttctttagaggttgatgaaagtgttctaaaattggtcgtggtggtgatttcacaactctgaatatactaaaaaccaggaattgtacacgttaaatgggtgaattgtgtggtgtatgaattatatctcaataaaactcacaaaagtaggggtgtccatcaataggaaaatgggtaaataacttatggtacatctatttagtacaatactatgcagccattaaaatagtgaagtgtatctatgaatatattatgacctatactcatgtccaaggttgtgtattaagttaataaacaagatgcagaaatatgtatagtatgaatacatttttatgcaaaagcattcatttatgtatagtatgtatgtatatagatatttctgaataaatttaagaaaaagctgggaaatagacatagaaagttataaacctttggaagtgggattgaataggctgaaggaggactttcactttgtaaaatttttaaagtggtgtgattttggggtgatttttacttttttcattttcttttttaactaaaaaattttttaaaaaatattctgccaatggcatggcttccagaatatttgtcaggcctactctggggatatcatctgactatactcaggacaaactcctattcctttgatatactgctcacttaggattaacactctaatttcagacatagttaagtgacaaggaataaattatcctgatatagcctctgatacatgttaccaggggcatacttctaagctggactttttagaaggaagtgcttcctgttaggtagaaaatttcacctctgctttttactagacctacagaccactgcaattgaggaacataaaaatgaaggatatccttcaactggtgcatagataaaccgtagtatatccatgcaatggaatcctactcagcaataaactaatgaaatacacatgcaaccacttggatgaatcttaaatgcattttactaagtaaaagaagccaaactcaaaaggctgcttactgtttgattccattcatattattttctcaaaaagcaaaacaatagggatggagaaaaaacttcagtggatgtcaggggttaaggttggaatgctccttgactacaaagtggtagcatgaggaatttgtcttaataattgaaattttccgtgtctttattgtagttacataagtatatgcatttgtcaaaacccataggcttgtacactaaaaaggatgaattttactgtgtgtaatttttttaaataaatgttatttttatggaggaaagaaaaa

SEQ ID NO: 421273 - DNA, 2491 bp, Homo sapiens
  misc_feature (2491)..(2491): n is a, c, g, or t
ggacttgaggtccgcggcctatttacccaagttggaggtaggggcctgtggaaacatgaagagggtaaacagctgtgtgaagagtgatgagcatgtcctggaggagctggaaacagaaggggagaggcagctgaaaagcctccttcagcatcaacttgatacttctgtctccattgaggaatgtatgtctaagaaagagagctttgctcctggtactatgtacaagccctttgggaaggaagcagctgggactatgactttgtcccaattccagacactgcatgagaaggaccaggaaactgcttctctcagggaattagggcttaatgaaacagaaatcttgatctggaagagccatgtttctggtgaaaagaagacaaaactgagggcaactcctgaagcaatacagaaccgtcttcaagatattgaagaaaggatctcggagcgtcagcgcattctttgcctgccacagagatttgcaaagagcaaacagctgacccggcgagaaatggaaatagaaaagtctttatttcagggagctgatcgtcactccttccttaaggctctttattaccaagatgaaccccaaaagaagaacaaaggtgatcccatgaacaacctggaaagtttttaccaagagatgataatgaaaaaacgtcttgaagagtttcaacttatgagaggtgaaccctttgcttcccactcactggtctcagctacatcagtgggtgatagtggcacagctgagagcccatcattactccaggacaagggaaaacaggcagcacagggtaaaggccccagtctccatgtggcaaatgttattgatttttcacctgagcagtgttggactgggcctaagaagctgacgcagccaatagaatttgtcccagaagatgaaatccagagaaatcgtttgtcagaggaagagatccgaaaaattcctatgttttcttcatataatccaggggaaccaaacaaggtattatacctgaagaaccttagccctcgggtgactgaaagagatcttgtgtcattgttcgctcggttccaggagaaaaaaggacctccaattcaattccgaatgatgactggacgaatgaggggccaggcttttatcacctttcccaataaggagatagcatggcaagcattgcatctagtaaatggatacaaactacatgggaaaatattggtgatagagtttggaaagaacaaaaagcaacggtcaaatctccaagcgacttctctcatatcatgtgctacaggcatatgaattttagaagaggaacatacaagcaaagaatgccaaacggaaatggaaataaagcgttctctagaaaagaggatgccagtcacaaatcccccagttgtttgtttatggttgctggaaaataaaaaaacaatatacagagaggaagtagtacaaactggagtcagacctgtacagccacacttaacattctatgaccttggcaagtcacttaatctgagcctcacatttttcatctataaagtgaggataataatgctacttacctcactgggttgtgaagatgaactgagatattatccaggctgaagaacagaaaggaaaacaatgaataaaattgaacaagagtatagaacctgtgtgacaccattaagcattcctacatatttctaatgggagtacaggaaaaaaggaaaagaaatgaaggagcagaaaaatattctaagaaataatggctataaatacccccgatttgatgagagacattaacctatacatcccagaagaaaaagaaattacagacagatacatcataagaaaaatgctaaaacccaaaaacgaaaagaaaatcttaacagcaatacgagaaaaatgagccatcacttaccaaggaacccaaataaaattagtagttgacttcccctcagaaacaatggcagtggcagtggaataacacattcaaagtgttcaaagaaaataactgtcaaccaataatcctatatacaataaaactatttttcaaaaatgaacgtgaaataaaacatctcacataatcaaaaaccaagagaatttgttgctggcagacctgacttgctggaaatacaaaaggaagttcttcagcctgaaagcaagtgaccacagacagtaatctgaatctacacacatgcagaaaaagagcacaggcaaaaataattatgttgaagaagctgagtggaagcaaaactgtcttgtactaaagaactgactccagatggtaagacaaatccacaggaacaaatggagagaacgtgaaataggaaataagtttaatataaaaaaactataaacatatacttactcttctctcagcttcttttaaagatgtaaaattatattaagtaattataataatgtgtgttgggtttgtaatgtataggaataacttttaccatatatcccaagggggatggtaaatgggaaagggtggtcttgcataattggggtttgaaccattgtagn

SEQ ID NO: 421274 - DNA, 1264 bp, Homo sapiens
ggacttgaggtccgcggcctatttacccaagttggaggtaggggcctgtggaaacatgaagagggtaaacagctgtgtgaagagtgatgagcatgtcctggaggagctggaaacagaaggggagaggcagctgaaaagcctccttcagcatcaacttgatacttctgtctccattgaggaatgtatgtctaagaaagagagctttgctcctggtactatgtacaagccctttgggaaggaagcagctgggactatgactttgtcccaattccagacactgcatgagaaggaccaggaaactgcttctctcagggaattagggcttaatgaaacagaaatcttgatctggaagagccatgtttctggtgaaaagaagacaaaactgagggcaactcctgaagcaatacagaaccgtcttcaagatattgaagaaaggatctcggagcgtcagcgcattctttgcctgccacagagatttgcaaagagcaaacagctgacccggcgagaaatggaaatagaaaagtctttatttcagggagctgatcgtcactccttccttaaggctctttattaccaagatgaaccccaaaagaagaacaaaggtgatcccatgaacaacctggaaagtttttaccaagagatgataatgaaaaaacgtcttgaagagtttcaacttatgagaggtgaaccctttgcttcccactcactggtctcagctacatcagtgggtgatagtggcacagctgagagcccatcattactccaggacaagggaaaacaggcagcacagggtaaaggccccagtctccatgtggcaaatgttattgatttttcacctgagcagtgttggactgggcctaagaagctgacgcagccaatagaatttgtcccagaagatgaaatccagagaaatcgtttgtcagaggaagagatccgaaaaattcctatgttttcttcatataatccaggggaaccaaacaaggtataggccaaaccaagtaaaacaacctgggttgatttcgcttttatttacctctacctaaagtaatacttttaaattagctttgattataccaaagaatcatgatataggcacagtgattgtgtttgtccttgaccttgactattcattctctgcatactatataagtagcatatttcctataaggttcttggtactttgctaaggtcctgtagcaatccgttagtcgatggtcaaggactgtttgcctggattttaatcgacggcccagtgaatccgtag

SEQ ID NO: 421275 - DNA, 1873 bp, Homo sapiens
gggggtcggggcgctgggagcccgttgggccgcgaacgcagccgccacgccggggccgccgagatcgggtgcccgggatgagcctcatccggaaaaagggcttctacaagcaggacgtcaacaagaccgcctgggagctgcccaagacctacgtgtccccgacgcacgtcggcagcggggcctatggctccgtgtgctcggccatcgacaagcggtcaggggagaaggtggccatcaagaagctgagccgaccctttcagtccgagatcttcgccaagcgcgcctaccgggagctgctgctgctgaagcacatgcagcatgagaacgtcattgggctcctggatgtcttcaccccagcctcctccctgcgcaacttctatgacttctacctggtgatgcccttcatgcagacggatctgcagaagatcatggggatggagttcagtgaggagaagatccagtacctggtgtatcagatgctcaaaggccttaagtacatccactctgctggggtcgtgcacagggacctgaagccaggcaacctggctgtgaatgaggactgtgaactgaagattctggattttgggctggcgcgacatgcagacgccgagatgactggctacgtggtgacccgctggtaccgagcccccgaggtgatcctcagctggatgcactacaaccagacagtggacatctggtctgtgggctgtatcatggcagagatgctgacagggaaaactctgttcaaggggaaagattacctggaccagctgacccagatcctgaaagtgaccggggtgcctggcacggagtttgtgcagaagctgaacgacaaagcggccaaatcctacatccagtccctgccacagacccccaggaaggatttcactcagctgttcccacgggccagcccccaggctgcggacctgctggagaagatgctggagctagacgtggacaagcgcctgacggccgcgcaggccctcacccatcccttctttgaacccttccgggaccctgaggaagagacggaggcccagcagccgtttgatgattccttagaacacgagaaactcacagtggatgaatggaagcagcacatctacaaggagattgtgaacttcagccccattgcccggaaggactcacggcgccggagtggcatgaagctgtagggactcatcttgcatggcaccgccggccagacactgcccaaggaccagtatttgtcactaccaaactcagcccttcttggaatacagcctttcaagcagaggacagaagggtccttctccttatgtgggaaatgggcctagtagatgcagaattcaaagatgtcggttgggagaaactagctctgatcctaacaggccacgttaaactgcccatctggagaatcgcctgcaggtggggccctttccttcccgccagagtggggctgagtgggcgctgagccaggccgggggcctatggcagtgatgctgtgttggtttcctagggatgctctaacgaattaccacaaacctggtggattgaaacagcagaacttgattcccttacagttctggaggctggaaatctgggatggaggtgttggcagggctgtggtccctttgaaggctctggggaagaatccttccttggctctttttagcttgtggcggcagtgggcagtccgtggcattccccagcttattgctgcatcactccagtctctgtctcttctgttctctcctcttttaacaacagtcattggatttagggcccaccctaatcctgtgtgatcttatcttgatccttattaattaaacctgcaaatactctagttccaaataaagtcacattctcaggttccaggtggacatgaattcca

SEQ ID NO: 421276 - DNA, 941 bp, Homo sapiens
tggcttttgcttccttaaatttgaacaattccctaagatctaatgctgggaggctccccttccttcattacacagtgaactcatgtgctctatctgcattccccctaaatcctcctgagcttttaggtaagaggccgatgatttcacaatcggcagcagaggcctaaggccatttccatcaaactgaagatggcagcaagttgtcctcacttcttcattgagcacccatgggtgtgtactggagcaagggtggtgccagggattctcctgctctggttcctcctgcggggtccctgctcagctgggcagctgccctcactctgggcgggtggcatgtgagtgtcaacagggcccctctcagtcaggggctcttggccattttttgtggccatggatcgcttctcaaaatcatattttcttttcttttcttttgagatggggtctcactccattacccaggctggagtgcagtggtgcaatcacagctcactgtagcctcgacctccctgggttcaggtgatcctcccacctcagcctcccaagtagctgggactataggcatgcaccaccatgcctggctaatttcagaataatattttcatacacataaaatatgtaggattacaaagtaagctagttatatttatatacagttgtcaaaatatttttaaaatgtataacgtgatactatgtgtataggtttctttattaacatattgaataaaaagatcgagggtaggcctattaaacaatggtaaactgaagagagatgagtgtaaacaatattttaagatacctgtggcaaactgtaaagggatatgaaaaactctgtaatttctattggcactgctgatacaactgcactttgctacctttgttcataaccaaggaaatagaaatgactgaaaataaagttgtattctattccaatccaaaaaaaa

SEQ ID NO: 421277 - DNA, 1195 bp, Homo sapiens
tgcatgcctgtaatcccaaactactcgggaggctgaggcagaattgcttgaacctgggaggtggaggttgcagtgagctgagatcacaccactgcactccagcctgggtgacagagtgagactccatctcaaaaaaacaaaaaaaacaaataccctgaggacacagagacattgggtcagacacccacagctaggaagtggtggagtcagattggaacccaagtaggcttgagcactgtacccagcttggattcaagggttgcccagccttccctcttcacgccagtctgagacccttactgctgactgtgtccatggtctctgttttctctcccacagaatggccctgctgtcaaggagctggggagtccttgactgggactggctagtcttgccacagccctggcctcgctggttactaaaactgccccaggttccctgagtctacatccctctaagcctcctgagaattctcactgccccaaggaaaaagtctagccttccttcttggcctggcattcaaaaccccttgtgttctctctaatctcatcagctcccactgccctcccctagctagtccttaggtcaagtgtgggacaccaagtcctgggatcccaccgtaaggttcattctgcattcacaggttaaaggtcttgacaagtcctgcagtaaagagatccgttcctcatttaatccagaacttcccagatgtacttaaccgcaggacccattttctcccaacagcatgacacacatagccttttttgcccagtgcagcccagtgcacaggtcccgatattgcctctccccaagtaggcttggccttcttttagtgcccgtgcgtggaaggccctccattctcctctccattctccttggccttcaaggctctaccttaggcctccctccaggcagctgttctccatcatcccccctgggctgcaggccctctgtgggcagcatttagtgtgtggtttggcctccccttcccattgcccactgtgagcaaatacctgtgcgtgaatgaataatgagtgaaagatgtcccaggggcctgtcggtcacttctttgccccgaccaggccaatgtcatatggaaggtggcagagagcccagcaggaagcagaagtgggcggccctgggctgtacctttgagctgctctcctgaaaatctctattatttcagactcccaga

SEQ ID NO: 421278 - DNA, 882 bp, Homo sapiens
tgcatgcctgtaatcccaaactactcgggaggctgaggcagaattgcttgaacctgggaggtggaggttgcagtgagctgagatcacaccactgcactccagcctgggtgacagagtgagactccatctcaaaaaaacaaaaaaaacaaataccctgaggacacagagacattgggtcagacacccacagctaggaagtggtggagtcagattggaacccaagtaggcttgagcactgtacccagcttggattcaagggttgcccagccttccctcttcacgccagtctgagacccttactgctgactgtgtccatggtctctgttttctctcccacagaatggccctgctgtcaaggagctggggagtccttgactgggactggctagtcttgccacagccctggcctcgctggttactaaaactgccccaggttccctgagtctacatccctctaagcctcctgagaattctcactgccccaaggaaaaagtctagccttccttcttggctgcctggctaatttcagaataatattttcatacacataaaatatgtaggattacaaagtaagctagttatatttatatacagttgtcaaaatatttttaaaatgtataacgtgatactatgtgtataggtttctttattaacatattgaataaaaagatcgagggtaggcctattaaacaatggtaaactgaagagagatgagtgtaaacaatattttaagatacctgtggcaaactgtaaagggatatgaaaaactctgtaatttctattggcactgctgatacaactgcactttgctacctttgttcataaccaaggaaatagaaatgactgaaaataaagttgtattctattccaatccaaaaaaaa

SEQ ID NO: 421279 - DNA, 585 bp, Homo sapiens
ttcctaagagcaagtgtaccctccattccctcttttgaggaacaaagagtatctttgctggggcctgagtcatccatgaaaacagacagcagcggtgtcccagggcagggcttgcctggcgtggattggggtggtgctgcccccagtgaggggcagcacaaggggagacagaaatggaggaatagcccccgtaagggcaagcccagtgtgcaccatgcctggctaatttcagaataatattttcatacacataaaatatgtaggattacaaagtaagctagttatatttatatacagttgtcaaaatatttttaaaatgtataacgtgatactatgtgtataggtttctttattaacatattgaataaaaagatcgagggtaggcctattaaacaatggtaaactgaagagagatgagtgtaaacaatattttaagatacctgtggcaaactgtaaagggatatgaaaaactctgtaatttctattggcactgctgatacaactgcactttgctacctttgttcataaccaaggaaatagaaatgactgaaaataaagttgtattctattccaatccaaaaaaaa

SEQ ID NO: 421280 - DNA, 1076 bp, Homo sapiens
tctgtttttatctgagaaactttggcagaacaaatttccatgtgcacaagctgtcgggcacagtgggtctcaaatttccttgtgcaccaggggacttgttaaaatgcagattcctgggccccaccccagggcttgtgactcagcaggtctgcagttgagaccttagaatgtgcatttgaatgaggacctctcgccctgacccaagcctagtgattctgatggatatcagaccatagttcgagacatttagtggatttcagtcatacttgatttgttgggaggcctaaatcaaaaacctataggaggagactggggggcttcagatggagtttcacactcatcttacaggtgttaaaactgaggctcagaaagcttttttttgtttgtttgtttgagacagggtctggctctgtcacccgggctggagttcagtggcacaattacatcttactgcaacctcagcctcctgggctcaagccatcctcccacctcagcctcctaagtagctgggactacaggtctgtgccacccaggtgcaccaggactgcaggtggctaattaaaacattttttttcttttttgtataggcggggtttctctatgttgcccaggctgatcttgaacttctggactcaagtgatcctcccactttggcctcccaaagtgctgggattataggcatgagccaccctgcaggcccagacagcatttttaaggccttgaaactcttctgtataatactgtaatggtggatacctattgtgcatttgttaccatctgtaggactggataacacagagtgaaccctcaagtaaactatggacttcagttaataataatgtatcagtattggttcataaattgtaacaattgtgccacactaatgcaagatgttactcatcaagaaaactgaggagagagaaggggaggaagtaggtgggaacctctatactttctaccaacctaaaactgctctaaaaaataaaccacaggccggtcgcagtagctcacgcctgtaatcccagcaccttgggaggctgaggtgggcggatcacttgaggtcaggagttcaagac

SEQ ID NO: 421281 - DNA, 349 bp, Homo sapiens
ttcctaagagcaagtgtaccctccattccctcttttgaggaacaaagagtatctttgctggggcctgagtcatccatgaaaacagacagcagcggtgtcccagggcagggcttgcctggcgtggattggggtggtgctgcccccagtgaggggcagcacaaggggagacagaaatggaggaatagcccccgtaagggcaagcccagtgtgcaccagtgcccagagctgcctgatggaggaacagctccgtaagggtgaacccagtgtgcacgggtgcccggagctgcctgcgtgaggctgggggctagtttggatgagggcatggctcaactttcacttggcacattga

SEQ ID NO: 421282 - DNA, 1856 bp, Homo sapiens
gcatcgttcagtgtgaagcccccatggtacccggatcttcgccgagatcgggtgcccgggatgagcctcatccggaaaaagggcttctacaagcaggacgtcaacaagaccgcctgggagctgcccaagacctacgtgtccccgacgcacgtcggcagcggggcctatggctccgtgtgctcggccatcgacaagcggtcaggggagaaggtggccatcaagaagctgagccgaccctttcagtccgagatcttcgccaagcgcgcctaccgggagctgctgctgctgaagcacatgcagcatgagaacgtcattgggctcctggatgtcttcaccccagcctcctccctgcgcaacttctatgacttctacctggtgatgcccttcatgcagacggatctgcagaagatcatggggatggagttcagtgaggagaagatccagtacctggtgtatcagatgctcaaaggccttaagtacatccactctgctggggtcgtgcacagggacctgaagccaggcaacctggctgtgaatgaggactgtgaactgaagattctggattttgggctggcgcgacatgcagacgccgagatgactggctacgtggtgacccgctggtaccgagcccccgaggtgatcctcagctggatgcactacaaccagacagtggacatctggtctgtgggctgtatcatggcagagatgctgacagggaaaactctgttcaaggggaaagattacctggaccagctgacccagatcctgaaagtgaccggggtgcctggcacggagtttgtgcagaagctgaacgacaaagcggccaaatcctacatccagtccctgccacagacccccaggaaggatttcactcagctgttcccacgggccagcccccaggctgcggacctgctggagaagatgctggagctagacgtggacaagcgcctgacggccgcgcaggccctcacccatcccttctttgaacccttccgggaccctgaggaagagacggaggcccagcagccgtttgatgattccttagaacacgagaaactcacagtggatgaatggaagcagcacatctacaaggagattgtgaacttcagccccattgcccggaaggactcacggcgccggagtggcatgaagctgtagggactcatcttgcatggcaccgccggccagacactgcccaaggaccagtatttgtcactaccaaactcagcccttcttggaatacagcctttcaagcagaggacagaagggtccttctccttatgtgggaaatgggcctagtagatgcagaattcaaagatgtcggttgggagaaactagctctgatcctaacaggccacgttaaactgcccatctggagaatcgcctgcaggtggggccctttccttcccgccagagtggggctgagtgggcgctgagccaggccgggggcctatggcagtgatgctgtgttggtttcctagggatgctctaacgaattaccacaaacctggtggattgaaacagcagaacttgattcccttacagttctggaggctggaaatctgggatggaggtgttggcagggctgtggtccctttgaaggctctggggaagaatccttccttggctctttttagcttgtggcggcagtgggcagtccgtggcattccccagcttattgctgcatcactccagtctctgtctcttctgttctctcctcttttaacaacagtcattggatttagggcccaccctaatcctgtgtgatcttatcttgatccttattaattaaacctgcaaatactctagttccaaataaagtcacattctcaggttccaggtggacatgaattcca

SEQ ID NO: 421283 - DNA, 1896 bp, Homo sapiens
gggggtcggggcgctgggagcccgttgggccgcgaacgcagccgccacgccggggccgccgagatcgggtgcccgggatgagcctcatccggaaaaagggcttctacaagcaggacgtcaacaagaccgcctgggagctgcccaagacctacgtgtccccgacgcacgtcggcagcggggcctatggctccgtgtgctcggccatcgacaagcggtcaggggagaaggtggccatcaagaagctgagccgaccctttcagtccgagatcttcgccaagcgcgcctaccgggagctgctgctgctgaagcacatgcagcatgagaacgtcattgggctcctggatgtcttcaccccagcctcctccctgcgcaacttctatgacttctacctggtgatgcccttcatgcagacggatctgcagaagatcatggggatggagttcagtgaggagaagatccagtacctggtgtatcagatgctcaaaggccttaagtacatccactctgctggggtcgtgcacagggacctgaagccaggcaacctggctgtgaatgaggactgtgaactgaagattctggattttgggctggcgcgacatgcagacgccgagatgactggctacgtggtgacccgctggtaccgagcccccgaggtgatcctcagctggatgcactacaaccagacagtggacatctggtctgtgggctgtatcatggcagagatgctgacagggaaaactctgttcaaggggaaagattacctggaccagctgacccagatcctgaaagtgaccggggtgcctggcacggagtttgtgcagaagctgaacgacaaagcggccaaatcctacatccagtccctgccacagacccccaggaaggatttcactcagctgttcccacgggccagcccccaggctgcggacctgctggagaagatgctggagctagacgtggacaagcgcctgacggccgcgcaggccctcacccatcccttctttgaacccttccgggaccctgaggaagagacggaggcccagcagccgtttgatgattccttagaacacgagaaactcacagtggatgaatggaagcagcacatctacaaggagattgtgaacttcagccccattgcccggaaggactcacggcgccggagtggcatgaagctgtagggactcatcttgcatggcaccgccggccagacactgcccaaggaccagtatttgtcactaccaaactcagcccttcttggaatacagcctttcaagcagaggacagaagggtccttctccttatgtgggaaatgggcctagtagatgcagaattcaaagatgtcggttgggagaaactagctctgatcctaacaggccacgttaaactgcccatctggagaatcgcctgcaggcggggtttctctatgttgcccaggctgatcttgaacttctggactcaagtgatcctcccactttggcctcccaaagtgctgggattataggcatgagccaccctgcaggcccagacagcatttttaaggccttgaaactcttctgtataatactgtaatggtggatacctattgtgcatttgttaccatctgtaggactggataacacagagtgaaccctcaagtaaactatggacttcagttaataataatgtatcagtattggttcataaattgtaacaattgtgccacactaatgcaagatgttactcatcaagaaaactgaggagagagaaggggaggaagtaggtgggaacctctatactttctaccaacctaaaactgctctaaaaaataaaccacaggccggtcgcagtagctcacgcctgtaatcccagcaccttgggaggctgaggtgggcggatcacttgaggtcaggagttcaagac

SEQ ID NO: 421284 - DNA, 1569 bp, Homo sapiens
gggggtcggggcgctgggagcccgttgggccgcgaacgcagccgccacgccggggccgccgagatcgggtgcccgggatgagcctcatccggaaaaagggcttctacaagcaggacgtcaacaagaccgcctgggagctgcccaagacctacgtgtccccgacgcacgtcggcagcggggcctatggctccgtgtgctcggccatcgacaagcggtcaggggagaaggtggccatcaagaagctgagccgaccctttcagtccgagatcttcgccaagcgcgcctaccgggagctgctgctgctgaagcacatgcagcatgagaacgtcattgggctcctggatgtcttcaccccagcctcctccctgcgcaacttctatgacttctacctggtgatgcccttcatgcagacggatctgcagaagatcatggggatggagttcagtgaggagaagatccagtacctggtgtatcagatgctcaaaggccttaagtacatccactctgctggggtcgtgcacagggacctgaagccaggcaacctggctgtgaatgaggactgtgaactgaagattctggattttgggctggcgcgacatgcagacgccgagatgactggctacgtggtgacccgctggtaccgagcccccgaggtgatcctcagctggatgcactacaaccagacagtggacatctggtctgtgggctgtatcatggcagagatgctgacagggaaaactctgttcaaggggaaagattacctggaccagctgacccagatcctgaaagtgaccggggtgcctggcacggagtttgtgcagaagctgaacgacaaagcggccaaatcctacatccagtccctgccacagacccccaggaaggatttcactcagctgttcccacgggccagcccccaggctgcggacctgctggagaagatgctggagctagacgtggacaagcgcctgacggccgcgcaggccctcacccatcccttctttgaacccttccgggaccctgaggaagagacggaggcccagcagccgtttgatgattccttagaacacgagaaactcacagtggatgaatggaagcagcacatctacaaggagattgtgaacttcagccccattgcccggaaggactcacggcgccggagtggcatgaagctgtagggactcatcttgcatggcaccgccggccagacactgcccaaggaccagtatttgtcactaccaaactcagcccttcttggaatacagcctttcaagcagaggacagaagggtccttctccttatgtgggaaatgggcctagtagatgcagaattcaaagatgtcggttgggagaaactagctctgatcctaacagtccgtggcattccccagcttattgctgcatcactccagtctctgtctcttctgttctctcctcttttaacaacagtcattggatttagggcccaccctaatcctgtgtgatcttatcttgatccttattaattaaacctgcaaatactctagttccaaataaagtcacattctcaggttccaggtggacatgaattcca

SEQ ID NO: 421285 - DNA, 1909 bp, Homo sapiens
tccttggtatccccaccttcctgggctcacctctgccccactcaggtgtttaagacgtgcagcagagaggcgccatcctgacctggtgccacatcctagcccctttccttactggatcctcaaaccagaagaaaacctgaatctctgaggacgtcaacaagaccgcctgggagctgcccaagacctacgtgtccccgacgcacgtcggcagcggggcctatggctccgtgtgctcggccatcgacaagcggtcaggggagaaggtggccatcaagaagctgagccgaccctttcagtccgagatcttcgccaagcgcgcctaccgggagctgctgctgctgaagcacatgcagcatgagaacgtcattgggctcctggatgtcttcaccccagcctcctccctgcgcaacttctatgacttctacctggtgatgcccttcatgcagacggatctgcagaagatcatggggatggagttcagtgaggagaagatccagtacctggtgtatcagatgctcaaaggccttaagtacatccactctgctggggtcgtgcacagggacctgaagccaggcaacctggctgtgaatgaggactgtgaactgaagattctggattttgggctggcgcgacatgcagacgccgagatgactggctacgtggtgacccgctggtaccgagcccccgaggtgatcctcagctggatgcactacaaccagacagtggacatctggtctgtgggctgtatcatggcagagatgctgacagggaaaactctgttcaaggggaaagattacctggaccagctgacccagatcctgaaagtgaccggggtgcctggcacggagtttgtgcagaagctgaacgacaaagcggccaaatcctacatccagtccctgccacagacccccaggaaggatttcactcagctgttcccacgggccagcccccaggctgcggacctgctggagaagatgctggagctagacgtggacaagcgcctgacggccgcgcaggccctcacccatcccttctttgaacccttccgggaccctgaggaagagacggaggcccagcagccgtttgatgattccttagaacacgagaaactcacagtggatgaatggaagcagcacatctacaaggagattgtgaacttcagccccattgcccggaaggactcacggcgccggagtggcatgaagctgtagggactcatcttgcatggcaccgccggccagacactgcccaaggaccagtatttgtcactaccaaactcagcccttcttggaatacagcctttcaagcagaggacagaagggtccttctccttatgtgggaaatgggcctagtagatgcagaattcaaagatgtcggttgggagaaactagctctgatcctaacaggccacgttaaactgcccatctggagaatcgcctgcaggtggggccctttccttcccgccagagtggggctgagtgggcgctgagccaggccgggggcctatggcagtgatgctgtgttggtttcctagggatgctctaacgaattaccacaaacctggtggattgaaacagcagaacttgattcccttacagttctggaggctggaaatctgggatggaggtgttggcagggctgtggtccctttgaaggctctggggaagaatccttccttggctctttttagcttgtggcggcagtgggcagtccgtggcattccccagcttattgctgcatcactccagtctctgtctcttctgttctctcctcttttaacaacagtcattggatttagggcccaccctaatcctgtgtgatcttatcttgatccttattaattaaacctgcaaatactctagttccaaataaagtcacattctcaggttccaggtggacatgaattcca

SEQ ID NO: 421286 - DNA, 1966 bp, Homo sapiens
ggctgagtgaggtctctgggggttgagttgggactgggcctggttctccaggactgtacacttgcaagaccccagagttcatcgggcagatcctcactgttacagacgagtacaccgaggccccaagagggggaggtggctcgccaagttgcagacagagtgagactcccgccctgccgtggatcccgtcgcaatgagacgttgctgcccctggcgctgtgcccctctctcagctcctgcctggcttcctactccctgccctgcgtcccgcggctcccccatattctagctcggccatcgacaagcggtcaggggagaaggtggccatcaagaagctgagccgaccctttcagtccgagatcttcgccaagcgcgcctaccgggagctgctgctgctgaagcacatgcagcatgagaacgtcattgggctcctggatgtcttcaccccagcctcctccctgcgcaacttctatgacttctacctggtgatgcccttcatgcagacggatctgcagaagatcatggggatggagttcagtgaggagaagatccagtacctggtgtatcagatgctcaaaggccttaagtacatccactctgctggggtcgtgcacagggacctgaagccaggcaacctggctgtgaatgaggactgtgaactgaagattctggattttgggctggcgcgacatgcagacgccgagatgactggctacgtggtgacccgctggtaccgagcccccgaggtgatcctcagctggatgcactacaaccagacagtggacatctggtctgtgggctgtatcatggcagagatgctgacagggaaaactctgttcaaggggaaagattacctggaccagctgacccagatcctgaaagtgaccggggtgcctggcacggagtttgtgcagaagctgaacgacaaagcggccaaatcctacatccagtccctgccacagacccccaggaaggatttcactcagctgttcccacgggccagcccccaggctgcggacctgctggagaagatgctggagctagacgtggacaagcgcctgacggccgcgcaggccctcacccatcccttctttgaacccttccgggaccctgaggaagagacggaggcccagcagccgtttgatgattccttagaacacgagaaactcacagtggatgaatggaagcagcacatctacaaggagattgtgaacttcagccccattgcccggaaggactcacggcgccggagtggcatgaagctgtagggactcatcttgcatggcaccgccggccagacactgcccaaggaccagtatttgtcactaccaaactcagcccttcttggaatacagcctttcaagcagaggacagaagggtccttctccttatgtgggaaatgggcctagtagatgcagaattcaaagatgtcggttgggagaaactagctctgatcctaacaggccacgttaaactgcccatctggagaatcgcctgcaggtggggccctttccttcccgccagagtggggctgagtgggcgctgagccaggccgggggcctatggcagtgatgctgtgttggtttcctagggatgctctaacgaattaccacaaacctggtggattgaaacagcagaacttgattcccttacagttctggaggctggaaatctgggatggaggtgttggcagggctgtggtccctttgaaggctctggggaagaatccttccttggctctttttagcttgtggcggcagtgggcagtccgtggcattccccagcttattgctgcatcactccagtctctgtctcttctgttctctcctcttttaacaacagtcattggatttagggcccaccctaatcctgtgtgatcttatcttgatccttattaattaaacctgcaaatactctagttccaaataaagtcacattctcaggttccaggtggacatgaattcca

SEQ ID NO: 421287 - DNA, 1795 bp, Homo sapiens
gggggtcggggcgctgggagcccgttgggccgcgaacgcagccgccacgccggggccgccgagatcgggtgcccgggatgagcctcatccggaaaaagggcttctacaagcaggacgtcaacaagaccgcctgggagctgcccaagacctacgtgtccccgacgcacgtcggcagcggggcctatggctccgtgtgctcggccatcgacaagcggtcaggggagaaggtggccatcaagaagctgagccgaccctttcagtccgagatcttcgccaagcgcgcctaccgggagctgctgctgctgaagcacatgcagcatgagaacgtcattgggctcctggatgtcttcaccccagcctcctccctgcgcaacttctatgacttctacctggtgatgcccttcatgcagacggatctgcagaagatcatggggatggagttcagtgaggagaagatccagtacctggtgtatcagatgctcaaaggccttaagattctggattttgggctggcgcgacatgcagacgccgagatgactggctacgtggtgacccgctggtaccgagcccccgaggtgatcctcagctggatgcactacaaccagacagtggacatctggtctgtgggctgtatcatggcagagatgctgacagggaaaactctgttcaaggggaaagattacctggaccagctgacccagatcctgaaagtgaccggggtgcctggcacggagtttgtgcagaagctgaacgacaaagcggccaaatcctacatccagtccctgccacagacccccaggaaggatttcactcagctgttcccacgggccagcccccaggctgcggacctgctggagaagatgctggagctagacgtggacaagcgcctgacggccgcgcaggccctcacccatcccttctttgaacccttccgggaccctgaggaagagacggaggcccagcagccgtttgatgattccttagaacacgagaaactcacagtggatgaatggaagcagcacatctacaaggagattgtgaacttcagccccattgcccggaaggactcacggcgccggagtggcatgaagctgtagggactcatcttgcatggcaccgccggccagacactgcccaaggaccagtatttgtcactaccaaactcagcccttcttggaatacagcctttcaagcagaggacagaagggtccttctccttatgtgggaaatgggcctagtagatgcagaattcaaagatgtcggttgggagaaactagctctgatcctaacaggccacgttaaactgcccatctggagaatcgcctgcaggtggggccctttccttcccgccagagtggggctgagtgggcgctgagccaggccgggggcctatggcagtgatgctgtgttggtttcctagggatgctctaacgaattaccacaaacctggtggattgaaacagcagaacttgattcccttacagttctggaggctggaaatctgggatggaggtgttggcagggctgtggtccctttgaaggctctggggaagaatccttccttggctctttttagcttgtggcggcagtgggcagtccgtggcattccccagcttattgctgcatcactccagtctctgtctcttctgttctctcctcttttaacaacagtcattggatttagggcccaccctaatcctgtgtgatcttatcttgatccttattaattaaacctgcaaatactctagttccaaataaagtcacattctcaggttccaggtggacatgaattcca

SEQ ID NO: 421288 - DNA, 1277 bp, Homo sapiens
gggggtcggggcgctgggagcccgttgggccgcgaacgcagccgccacgccggggccgccgagatcgggtgcccgggatgagcctcatccggaaaaagggcttctacaagcaggacgtcaacaagaccgcctgggagctgcccaagacctacgtgtccccgacgcacgtcggcagcggggcctatggctccgtgtgctcggccatcgacaagcggtcaggggagaaggtggccatcaagaagctgagccgaccctttcagtccgagatcttcgccaagcgcgcctaccgggagctgctgctgctgaagcacatgcagcatgagaacgtcattgggctcctggatgtcttcaccccagcctcctccctgcgcaacttctatgacttctacctggtgatgcccttcatgcagacggatctgcagaagatcatggggatggagttcagtgaggagaagatccagtacctggtgtatcagatgctcaaaggccttaagtacatccactctgctggggtcgtgcacagggacctgaagccaggcaacctggctgtgaatgaggactgtgaactgaagattctggattttgggctggcgcgacatgcagacgccgagatgactggctacgtggtgacccgctggtaccgagcccccgaggtgatcctcagctggatgcactacaaccagacagtggacatctggtctgtgggctgtatcatggcagagatgctgacagggaaaactctgttcaaggggaaagattacctggaccagctgacccagatcctgaaagtgaccggggtgcctggcacggagtttgtgcagaagctgaacgacaaagcggccaaatcctacatccagtccctgccacagacccccaggaaggatttcactcagctgttcccacgggccagcccccaggctgcggacctgctggagaagatgctggagctagacgtggacaagcgcctgacggccgcgcaggccctcacccatcccttctttgaacccttccgggaccctgaggaagagacggaggcccagcagccgtttgatgattccttagaacacgagaaactcacagtggatgaatggaagcagcacatctacaaggagattgtgaacttcagccccattgcccggaaggactcacggcgccggagtggcatgaagctgtagggactcatcttgcatggcaccgccggccagacactgcccaaggaccagtatttgtcactaccaaactcagcccttcttggaatacagcctttcaagcagagg

SEQ ID NO: 421289 - DNA, 2041 bp, Homo sapiens
gggggtcggggcgctgggagcccgttgggccgcgaacgcagccgccacgccggggccgccgagatcgggtgcccgggatgagcctcatccggaaaaagggcttctacaagcaggacgtcaacaagaccgcctgggagctgcccaagacctacgtgtccccgacgcacgtcggcagcggggcctatggctccgtgtgctcggccatcgacaagcggtcaggggagaaggtggccatcaagaagctgagccgaccctttcagtccgagatcttcgccaagcgcgcctaccgggagctgctgctgctgaagcacatgcagcatgagaacgtcattgggctcctggatgtcttcaccccagcctcctccctgcgcaacttctatgacttctacctggtgatgcccttcatgcagacggatctgcagaagatcatggggatggagttcagtgaggagaagatccagtacctggtgtatcagatgctcaaaggccttaagtacatccactctgctggggtcgtgcacagggacctgaagccaggcaacctggctgtgaatgaggactgtgaactgaagattctggattttgggctggcgcgacatgcagacgccgagatgactggctacgtggtgacccgctggtaccgagcccccgaggtgatcctcagctggatgcactacaaccagacagtggacatctggtctgtgggctgtatcatggcagagatgctgacagggaaaactctgttcaaggggaaagattacctggaccagctgacccagatcctgaaagtgaccggggtgcctggcacggagtttgtgcagaagctgaacgacaaagcggccaaatcctacatccagtccctgccacagacccccaggaaggatttcactcagctgttcccacgggccagcccccaggccatcccttctttgaacccttccgggaccctgaggaagagacggaggcccagcagccgtttgatgattccttagaacacgagaaactcacagtggatgaatggaagcgtaagagctggggcctcgggcttcctcgcctccgcctgcagcctctcttccttgcttcctccatctttgtgcctggcctctgccagccctacctgccacctccttcttggtgggcattgtctcctgggtgcttctttctccttgagctgacttcgctctccatgctgtctctgaaggggggtggactttctcgccacagcacctctttacgcaccttaaaccatgctgcctttctcagagcacatctacaaggagattgtgaacttcagccccattgcccggaaggactcacggcgccggagtggcatgaagctgtagggactcatcttgcatggcaccgccggccagacactgcccaaggaccagtatttgtcactaccaaactcagcccttcttggaatacagcctttcaagcagaggacagaagggtccttctccttatgtgggaaatgggcctagtagatgcagaattcaaagatgtcggttgggagaaactagctctgatcctaacaggccacgttaaactgcccatctggagaatcgcctgcaggtggggccctttccttcccgccagagtggggctgagtgggcgctgagccaggccgggggcctatggcagtgatgctgtgttggtttcctagggatgctctaacgaattaccacaaacctggtggattgaaacagcagaacttgattcccttacagttctggaggctggaaatctgggatggaggtgttggcagggctgtggtccctttgaaggctctggggaagaatccttccttggctctttttagcttgtggcggcagtgggcagtccgtggcattccccagcttattgctgcatcactccagtctctgtctcttctgttctctcctcttttaacaacagtcattggatttagggcccaccctaatcctgtgtgatcttatcttgatccttattaattaaacctgcaaatactctagttccaaataaagtcacattctcaggttccaggtggacatgaattcca

SEQ ID NO: 421290 - DNA, 1721 bp, Homo sapiens
gggggtcggggcgctgggagcccgttgggccgcgaacgcagccgccacgccggggccgccgagatcgggtgcccgggatgagcctcatccggaaaaagggcttctacaagcaggacgtcaacaagaccgcctgggagctgcccaagacctacgtgtccccgacgcacgtcggcagcggggcctatggctccgtgtgctcggccatcgacaagcggtcaggggagaaggtggccatcaagaagctgagccgaccctttcagtccgagatcttcgccaagcgcgcctaccgggagctgctgctgctgaagcacatgcagcatgagaacgtcattgggctcctggatgtcttcaccccagcctcctccctgcgcaacttctatgacttctacctggtgatgcccttcatgcagacggatctgcagaagatcatggggatggagttcagtgaggagaagatccagtacctggtgtatcagatgctcaaaggccttaagtacatccactctgctggggtcgtgcacagggacctgaagccaggcaacctggctgtgaatgaggactgtgaactgaagattctggattttgggctggcgcgacatgcagacgccgagatgactggctacgtggtgacccgctggtaccgagcccccgaggtgatcctcagctggatgcactacaaccagacaggccaaatcctacatccagtccctgccacagacccccaggaaggatttcactcagctgttcccacgggccagcccccaggctgcggacctgctggagaagatgctggagctagacgtggacaagcgcctgacggccgcgcaggccctcacccatcccttctttgaacccttccgggaccctgaggaagagacggaggcccagcagccgtttgatgattccttagaacacgagaaactcacagtggatgaatggaagcagcacatctacaaggagattgtgaacttcagccccattgcccggaaggactcacggcgccggagtggcatgaagctgtagggactcatcttgcatggcaccgccggccagacactgcccaaggaccagtatttgtcactaccaaactcagcccttcttggaatacagcctttcaagcagaggacagaagggtccttctccttatgtgggaaatgggcctagtagatgcagaattcaaagatgtcggttgggagaaactagctctgatcctaacaggccacgttaaactgcccatctggagaatcgcctgcaggtggggccctttccttcccgccagagtggggctgagtgggcgctgagccaggccgggggcctatggcagtgatgctgtgttggtttcctagggatgctctaacgaattaccacaaacctggtggattgaaacagcagaacttgattcccttacagttctggaggctggaaatctgggatggaggtgttggcagggctgtggtccctttgaaggctctggggaagaatccttccttggctctttttagcttgtggcggcagtgggcagtccgtggcattccccagcttattgctgcatcactccagtctctgtctcttctgttctctcctcttttaacaacagtcattggatttagggcccaccctaatcctgtgtgatcttatcttgatccttattaattaaacctgcaaatactctagttccaaataaagtcacattctcaggttccaggtggacatgaattcca

SEQ ID NO: 421291 - DNA, 2314 bp, Homo sapiens
gcagaagggaagcaactccgggcgcctttcttttgcgcaggcgtcgcgccctggggccggggccgggcggcaccgcggtgcgcaagcgcaaccgtcggtgggtcggggatcggtcgcctgagaggtatcacctcttctgggctcaagatggacaacaagaagcgcctggcctacgccatcatccagttcctgcatgaccagctccggcacgggggcctctcgtccgatgctcaggagagcttggaagtcgccatccagtgcctggagactgcgtttggggtgacggtagaagacagtgaccttgcgctccctcagactctgccggagatatttgaagcggctgccacgggcaaggagatgccgcaggacctgaggagccccgcgcgaaccccgccttccgaggaggactcagcagaggcagagcgcctcaaaaccgaaggaaacgagcagatgaaagtggaaaactttgaagctgccgtgcatttctacggaaaagccatcgagctcaacccagccaacgccgtctatttctgcaacagagccgcagcctacagcaaactcggcaactacgcaggcgcggtgcaggactgtgagcgggccatctgcattgacccggcctacagcaaggcctacggcaggatgggcctggcgctctccagcctcaacaagcacgtggaggccgtggcttactacaagaaggctctggagctggaccccgacaacgagacatacaagtccaacctcaagatagcggagctgaagctgcgggaggcccccagccccacgggaggcgtgggcagcttcgacatcgccggcctgctgaacaaccctggcttcatgagcatggcttcgaacctaatgaacaatccccagattcagcagctcatgtccggcatgatttcgggtggcaacaaccccttgggaactcccggcaccagcccctcgcagaacgacctggccagcctcatccaggcgggccagcagtttgcccagcagatgcagcagcagaacccagagttgatagagcagctcaggagccagatccggagtcggacgcccagcgccagcaacgacgaccagcaggagtgacgctgcctgctcccggtgtgaccgcgtccttccctggccgacccgaaggaagccttctggttgtctgccacttcctcctgttggactgcctgagagaggggaagagagagacctcggacctgcatgtcaagatggattttccccttttatctctgccctcctccactccctttttgtaactcccttacagcccccagacccttcttgaaacgagagccagcaagctgagcacagaccagcagcgacctcccttccagcccccagaaagctcggtcacttgagtgttttctagaatcctggggtgctcccgggccgctctcagagaagtggcaggtttcacgttcagccgtgtggcggatcgtgtggcttccaaagccttttacagcccccgccccccatcccgtggtctgtctgcaggaactctcccgtctgtgagaagcctctttccgagtcgacctcccggccaccccggccctgtgcctgctcggaagagctcactgccagctgcggcctgggcaccgcgggccatgtgtgtttgcatgaggaactctttagtggcagacacctaagagacggctgcggtcaccccacgcctccgcggctcaggagccgtcctgggtgcataggaccagtttctgtgacttttctccagttgggcatgttgacagacatgtttcccctcctcccaccctcattttctggtcctcgcgactgagagccaggggcgacatcatgaccttctgtcccggccgccttagccccgggcacagggaaggcagctgggccgtttctgtctgtgtcccatcctgctgtccttctgtcctggatgtttcatgggcccggggccccccagggaagcttacccctcctgtgctgggtggaggccacgggacacctcaggtgccacccaccttggccctaaaacagccaccaggaaagcagccggagagccggacagcaggcagcctgtctgggttcctgaggcctgggggtggcagacgagcccacggcgccgtggtcccagcagcagggttgtcagtcggagcatcctggggctccctggctcctggccgtctgtgaggtaggcgcagtaccgtgtatcgtaggtagcagtaggaacgggggccgccgcggccctgcagccgctcatggcggtgaggtgtgtgccaagcccacccggggtgcagggcgtgacgtgtggggaataaataggcgttgtgacctc

SEQ ID NO: 421292 - DNA, 2385 bp, Homo sapiens
gcagaagggaagcaactccgggcgcctttcttttgcgcaggcgtcgcgccctggggccggggccgggcggcaccgcggtgcgcaagcgcaaccgtcggtgggtcggggatcggtcgcctgagaggtatcacctcttctgggctcaagatggacaacaagaagcgcctggcctacgccatcatccagttcctgcatgaccagctccggcacgggggcctctcgtccgatgctcaggagagcttggaagtcgccatccagtgcctggagactgcgtttggggtgacggtagaagacagtgaccttgcgctccctcagactctgccggagatatttgaagcggctgccacgggcaaggagatgccgcaggacctgaggagccccgcgcgaaccccgccttccgaggaggactcagcagaggcagagcgcctcaaaaccgaaggaaacgagcagatgaaagtggaaaactttgaagctgccgtgcatttctacggaaaagccatcgagctcaacccagccaacgccgtctatttctgcaacagagccgcagcctacagcaaactcggcaactacgcaggcgcggtgcaggactgtgagcgggccatctgcattgacccggcctacagcaaggcctacggcaggatgggcctggcgctctccagcctcaacaagcacgtggaggccgtggcttactacaagaaggctctggagctggaccccgacaacgagacatacaagtccaacctcaagatagcggagctgaagctgcgggaggcccccagccccacgggaggcgtgggcagcttcgacatcgccggcctgctgaacaaccctggcttcatgagcatggcttcgaacctaatgaacaatccccagattcagcagctcatgtccggcatgatttcgggtggcaacaaccccttgggaactcccggcaccagcccctcgcagaacgacctggccagcctcatccaggcgggccagcagtttgcccagcagatgcagcagcagaacccagagttgatagagcagctcaggagccagatccggagtcggacgcccagcgccagcaacgacgaccagcaggagtgacgctgcctgctcccggtgtgaccgcgtccttccctggccgacccgaaggaagccttctggttgtctgccacttcctcctgttggactgcctgagagaggggaagagagagacctcggacctgcatgtcaagatggattttccccttttatctctgccctcctccactccctttttgtaactcccttacagcccccagacccttcttgaaacgagagccagcaagctgagcacagaccagcagcgacctcccttccagcccccagaaagctcggtcacttgagtgttttctagaatcctggggtgctcccgggccgctctcagagaagtggcaggtttcacgttcagccgtgtggcggatcgtgtggcttccaaagccttttacagcccccgccccccatcccgtggtctgtctgcaggaactctcccgtctgtgagaagcctctttccgagtcgacctcccggccaccccggccctgtgcctgctcggaagagctcactgccagctgcggcctgggcaccgcgggccatgtgtgtttgcatgaggaactctttagtggcagacacctaagagacggctgcggtcaccccacgcctccgcggctcaggagccgtcctgggtgcataggaccagtttctgtgacttttctccagttgggcatgttgacagacatgtttcccctcctcccaccctcattttctggtcctcgcgactgagagccaggggcgacatcatgaccttctgtcccggccgccttagccccgggcacagggaaggcagctgggccgtttctgtctgtgtcccatcctgctgtccttctgtcctggatgtttcatgggcccggggccccccagggaagcttacccctcctgtgctgggtggaggccacgggacacctcaggtgccacccaccttggccctaaaacagccaccaggaaagcagccggagagccggacagcaggcagcctgtctgggttcctgaggcctgggggtggcagacgagcccacggcgccgtggtcccagcagcagggttgtcagtcggagcatcctggggctccctggctcctggccgtctgtgaggtaggcgcagtaccgtgtatcgtaggtagcagtaggaacgggggccgccgcggccctgcagccgctcatggcggtgaggtgtgtgccaagcccacccggggtgcagggcgtgacgtgtggggaataaataggcgttgtgacctcaaaaaaaaaaagaaaaaaacaaaaaaaaagaaaaaaaaacaaaaaaaaaaaaaaaaaaaaagaggggggcg

SEQ ID NO: 421293 - DNA, 643 bp, Homo sapiens
gcagaagggaagcaactccgggcgcctttcttttgcgcaggcgtcgcgccctggggccggggccgggcggcaccgcggtgcgcaagcgcaaccgtcggtgggtcggggatcggtcgcctgagaggtatcacctcttctgggctcaagatggacaacaagaagcgcctggcctacgccatcatccagttcctgcatgaccagctccggcacgggggcctctcgtccgatgctcaggagagcttggaagtcgccatccagtgcctggagactgcgtttggggtgacggtagaagacagtgaccttgcgctccctcagactctgccggagatatttgaagcggctgccacgggcaaggagatgccgcaggacctgaggagccccgcgcgaaccccgccttccgaggaggactcagcagaggcagagcgcctcaaaaccgaaggaaacgagcagatgaaagtggaaaactttgaagctgccgtgcatttctacggaaaagccatcgagctcaacccagccaacgccgtctatttctgcaacagaagccgcagcctacagcaaaactcggggaactacttcaagccgccggtgcaaggaacttttaaacggggcccattcttggtattttgaccccccgcccctacca

SEQ ID NO: 421294 - DNA, 342 bp, Homo sapiens
  misc_feature (34)..(34): n is a, c, g, or t
tcagctcgcccctattaactcagggcgagctgcnggaggcccccagccccacgggaggcgtgggcagcttcgacatcgccggcctgctgaacaaccctggcttcatgagcatggcttcgaacctaatgaacaatccccagattcagcagctcatgtccggcatgatttcgggtggcaacaaccccttgggaactcccggcaccagcccctcgcagaacgacctggccagcctcatccaggcgggccagcagtttgcccagcagatgcagcagctcgcccctgagttgcagctcgcccctgagttagcagctcgcccctgagttagcagctcgcccctgagtt

SEQ ID NO: 421295 - DNA, 2280 bp, Homo sapiens
  misc_feature (1950)..(1950): n is a, c, g, or t
  misc_feature (1952)..(1952): n is a, c, g, or t
gcagaagggaagcaactccgggcgcctttcttttgcgcaggcgtcgcgccctggggccggggccgggcggcaccgcggtgcgcaagcgcaaccgtcggtgggtcggggatcggtcgcctgagaggtatcacctcttctgggctcaagatggacaacaagaagcgcctggcctacgccatcatccagttcctgcatgaccagctccggcacgggggcctctcgtccgatgctcaggagagcttggaagtcgccatccagtgcctggagactgcgtttggggtgacggtagaagacagtgaccttgcgctccctcagactctgccggagatatttgaagcggctgccacgggcaaggagatgccgcaggacctgaggagccccgcgcgaaccccgccttccgaggaggactcagcagaggcagagcgcctcaaaaccgaaggaaacgagcagatgaaagtggaaaactttgaagctgccgtgcatttctacggaaaagccatcgagctcaacccagccaacgccgtctatttctgcaacagagccgcagcctacagcaaactcggcaactacgcaggcgcggtgcaggactgtgagcgggccatctgcattgacccggcctacagcaaggcctacggcaggatgggcctggcgctctccagcctcaacaagcacgtggaggccgtggcttactacaagaaggctctggagctggaccccgacaacgagacatacaagtccaacctcaagatagcggagctgaagctgcgggaggcccccagccccacgggaggcgtgggcagcttcgacatcgccggcctgctgaacaaccctggcttcatgagcatggcttcgaacctaatgaacaatccccagattcagcagctcatgtccggcatgatttcgggtggcaacaaccccttgggaactcccggcaccagcccctcgcagaacgacctggccagcctcatccaggcgggccagcagtttgcccagcagatgcagcagcagaacccagagttgatagagcagctcaggagccagatccggagtcggacgcccagcgccagcaacgacgaccagcaggagtgacgctgcctgctcccggtgtgaccgcgtccttccctggccgacccgaaggaagccttctggttgtctgccacttcctcctgttggactgcctgagagaggggaagagagagacctcggacctgcatgtcaagatggattttccccttttatctctgccctcctccactccctttttgtaactcccttacagcccccagacccttcttgaaacgagagccagcaagctgagcacagaccagcagcgacctcccttccagcccccagaaagctcggtcacttgagtgttttctagaatcctggggtgctcccgggccgctctcagagaagtggcaggtttcacgttcagccgtgtggcggatcgtgtggcttccaaagccttttacagcccccgccccccatcccgtggtctgtctgcaggaactctcccgtctgtgagaagcctctttccgagtcgacctcccggccaccccggccctgtgcctgctcggaagagctcactgccagctgcggcctgggcaccgcgggccatgtgtgtttgcatgaggaactctttagtggcagacacctaagagacggctgcggtcaccccacgcctccgcggctcaggagccgtcctgggtgcataggaccagtttctgtgacttttctccagttgggcatgttgacagacatgtttcccctcctcccaccctcattttctggtcctcgcgactgagagccaggggcgacatcatgaccttctgtcccggccgccttagccccgggcacagggaaggcagctgggccgtttctgtctgtgtcccatcctgctgttccatatccctgtccatgggcaaattggctatctaccaattggcgcgncncacggtggacccccccagggaagcttacccctcctgtgctgggtgcgaggccacgagtacagccttcaaaggggggttttgggccccaccccaaaaaaccctcccaaccctaagaatataccccgccccccaggttttattttgggcacggggcactctacccccgccccacactgtttaacacccaggcgaactcaaacgccccccaacaatacctgggggtgtgaacagctcccgcttcacccccgaaaggcaccaaaggagggggggggccgcccacacaacacaacgcaaagggcctcaggcgctggggcagtaggcctgcgag

SEQ ID NO: 421296 - DNA, 1878 bp, Homo sapiens
gcagaagggaagcaactccgggcgcctttcttttgcgcaggcgtcgcgccctggggccggggccgggcggcaccgcggtgcgcaagcgcaaccgtcggtgggtcggggatcggtcgcctgagaggtatcacctcttctgggctcaagatggacaacaagaagcgcctggcctacgccatcatccagttcctgcatgaccagctccggcacgggggcctctcgtccgatgctcaggagagcttggaagtcgccatccagtgcctggagactgcgtttggggtgacggtagaagacagtgaccttgcgctccctcagactctgccggagatatttgaagcggctgccacgggcaaggagatgccgcaggacctgaggagccccgcgcgaaccccgccttccgaggaggactcagcagaggcagagcgcctcaaaaccgaaggaaacgagcagatgaaagtggaaaactttgaagctgccgtgcatttctacggaaaagccatcgagctcaacccagccaacgccgtctatttctgcaacagagccgcagcctacagcaaactcggcaactacgcaggcgcggtgcaggactgtgagcgggccatctgcattgacccggcctacagcaaggcctacggcaggatgggcctggcgctctccagcctcaacaagcacgtggaggccgtggcttactacaagaaggctctggagctggaccccgacaacgagacatacaagtccaacctcaagatagcggagctgaagctgcgggaggcccccagccccacgggaggcgtgggcagcttcgacatcgccggcctgctgaacaaccctggcttcatgagcatggcttcgaacctaatgaacaatccccagattcagcagctcatgtccggcatgatttcgggtggcaacaaccccttgggaactcccggcaccagcccctcgcagaacgacctggccagcctcatccaggcgggccagcagtttgcccagcagatgcagcagcagaacccagagttgatagagcagctcaggagccagatccggagtcggacgcccagcgccagcaacgacgaccagcaggagtgacgctgcctgctcccggtgtgaccgcgtccttccctggccgacccgaaggaagccttctggttgtctgccacttcctcctgttggactgcctgagagaggggaagagagagacctcggacctgcatgtcaagatggattttccccttttatctctgccctcctccactccctttttgtaactcccttacagcccccagacccttcttgaaacgagagccagcaagctgagcacagaccagcagcgacctcccttccagcccccagaaagctcggtcacttgagtgttttctagaatcctggggtgctcccgggccgctctcagagaagtggcaggtttcacgttcagccgtgtggcggatcgtgtggcttccaaagccttttacagcccccgccccccatcccgtggtctgtctgcaggaactctcccgtctgtgagaagcctctttccgagtcgacctcccggccaccccggccctgtgcctgctcggaagagctcactgccagctgcggcctgggcaccgcgggccatgtgtgtttgcatgaggaactctttagtggcagacacctaagagacggctgcggtcaccccacgcctccgcggctcaggagcatcctggggctccctggctcctggccgtctgtgaggtaggcgcagtaccgtgtatcgtaggtagcagtaggaacgggggccgccgcggccctgcagccgctcatggcggtgaggtgtgtgccaagcccacccggggtgcagggcgtgacgtgtggggaataaataggcgttgtgacctc

SEQ ID NO: 421297 - DNA, 2221 bp, Homo sapiens
  misc_feature (13)..(13): n is a, c, g, or t
gacccacgcgtcnggatcggtcgcctgagaggtatcacctcttctgggctcaagatggacaacaagaagcgcctggcctacgccatcatccagttcctgcatgaccagctccggcacgggggcctctcgtccgatgctcaggagagcttggaagtcgccatccagtgcctggagactgcgtttggggtgacggtagaagacagtgaccttgcgctccctcagactctgccggagatatttgaagcggctgccacgggcaaggagatgccgcaggacctgaggagccccgcgcgaaccccgccttccgaggaggactcagcagaggcagagcgcctcaaaaccgaaggaaacgagcagatgaaagtggaaaactttgaagctgccgtgcatttctacggaaaagccatcgagctcaacccagccaacgccgtctatttctgcaacagagccgcagcctacagcaaactcggcaactacgcaggcgcggtgcaggactgtgagcgggccatctgcattgacccggcctacagcaaggcctacggcaggatgggcctggcgctctccagcctcaacaagcacgtggaggccgtggcttactacaagaaggctctggagctggaccccgacaacgagacatacaagtccaacctcaagatagcggagctgaagctgcgggaggcccccagccccacgggaggcgtgggcagcttcgacatcgccggcctgctgaacaaccctggcttcatgagcatggcttcgaacctaatgaacaatccccagattcagcagctcatgtccggcatgatttcgggtggcaacaaccccttgggaactcccggcaccagcccctcgcagaacgacctggccagcctcatccaggcgggccagcagtttgcccagcagatgcagcagcagaacccagagttgatagagcagctcaggagccagatccggagtcggacgcccagcgccagcaacgacgaccagcaggagtgacgctgcctgctcccggtgtgaccgcgtccttccctggccgacccgaaggaagccttctggttgtctgccacttcctcctgttggactgcctgagagaggggaagagagagacctcggacctgcatgtcaagatggattttccccttttatctctgccctcctccactccctttttgtaactcccttacagcccccagacccttcttgaaacgagagccagcaagctgagcacagaccagcagcgacctcccttccagcccccagaaagctcggtcacttgagtgttttctagaatcctggggtgctcccgggccgctctcagagaagtggcaggtttcacgttcagccgtgtggcggatcgtgtggcttccaaagccttttacagcccccgccccccatcccgtggtctgtctgcaggaactctcccgtctgtgagaagcctctttccgagtcgacctcccggccaccccggccctgtgcctgctcggaagagctcactgccagctgcggcctgggcaccgcgggccatgtgtgtttgcatgaggaactctttagtggcagacacctaagagacggctgcggtcaccccacgcctccgcggctcaggagccgtcctgggtgcataggaccagtttctgtgacttttctccagttgggcatgttgacagacatgtttcccctcctcccaccctcattttctggtcctcgcgactgagagccaggggcgacatcatgaccttctgtcccggccgccttagccccgggcacagggaaggcagctgggccgtttctgtctgtgtcccatcctgctgtccttctgtcctggatgtttcatgggcccggggccccccagggaagcttacccctcctgtgctgggtggaggccacgggacacctcaggtgccacccaccttggccctaaaacagccaccaggaaagcagccggagagccggacagcaggcagcctgtctgggttcctgaggcctgggggtggcagacgagcccacggcgccgtggtcccagcagcagggttgtcagtcggagcatcctggggctccctggctcctggccgtctgtgaggtaggcgcagtaccgtgtatcgtaggtagcagtaggaacgggggccgccgcggccctgcagccgctcatggcggtgaggtgtgtgccaagcccacccggggtgcagggcgtgacgtgtggggaataaataggcgttgtgacctc

SEQ ID NO: 421298 - DNA, 2221 bp, Homo sapiens
gtcggtgggtcggggatcggtcgcctgagaggtatcacctcttctgggctcaagatggacaacaagaagcgcctggcctacgccatcatccagttcctgcatgaccagctccggcacgggggcctctcgtccgatgctcaggagagcttggaagtcgccatccagtgcctggagactgcgtttggggtgacggtagaagacagtgaccttgcgctccctcagactctgccggagatatttgaagcggctgccacgggcaaggagatgccgcaggacctgaggagccccgcgcgaaccccgccttccgaggaggactcagcagaggcagagcgcctcaaaaccgaaggaaacgagcagatgaaagtggaaaactttgaagctgccgtgcatttctacggaaaagccatcgagctcaacccagccaacgccgtctatttctgcaacagagccgcagcctacagcaaactcggcaactacgcaggcgcggtgcaggactgtgagcgggccatctgcattgacccggcctacagcaaggcctacggcaggatgggcctggcgctctccagcctcaacaagcacgtggaggccgtggcttactacaagaaggctctggagctggaccccgacaacgagacatacaagtccaacctcaagatagcggagctgaagctgcgggaggcccccagccccacgggaggcgtgggcagcttcgacatcgccggcctgctgaacaaccctggcttcatgagcatggcttcgaacctaatgaacaatccccagattcagcagctcatgtccggcatgatttcgggtggcaacaaccccttgggaactcccggcaccagcccctcgcagaacgacctggccagcctcatccaggcgggccagcagtttgcccagcagatgcagcagcagaacccagagttgatagagcagctcaggagccagatccggagtcggacgcccagcgccagcaacgacgaccagcaggagtgacgctgcctgctcccggtgtgaccgcgtccttccctggccgacccgaaggaagccttctggttgtctgccacttcctcctgttggactgcctgagagaggggaagagagagacctcggacctgcatgtcaagatggattttccccttttatctctgccctcctccactccctttttgtaactcccttacagcccccagacccttcttgaaacgagagccagcaagctgagcacagaccagcagcgacctcccttccagcccccagaaagctcggtcacttgagtgttttctagaatcctggggtgctcccgggccgctctcagagaagtggcaggtttcacgttcagccgtgtggcggatcgtgtggcttccaaagccttttacagcccccgccccccatcccgtggtctgtctgcaggaactctcccgtctgtgagaagcctctttccgagtcgacctcccggccaccccggccctgtgcctgctcggaagagctcactgccagctgcggcctgggcaccgcgggccatgtgtgtttgcatgaggaactctttagtggcagacacctaagagacggctgcggtcaccccacgcctccgcggctcaggagccgtcctgggtgcataggaccagtttctgtgacttttctccagttgggcatgttgacagacatgtttcccctcctcccaccctcattttctggtcctcgcgactgagagccaggggcgacatcatgaccttctgtcccggccgccttagccccgggcacagggaaggcagctgggccgtttctgtctgtgtcccatcctgctgtccttctgtcctggatgtttcatgggcccggggccccccagggaagcttacccctcctgtgctgggtggaggccacgggacacctcaggtgccacccaccttggccctaaaacagccaccaggaaagcagccggagagccggacagcaggcagcctgtctgggttcctgaggcctgggggtggcagacgagcccacggcgccgtggtcccagcagcagggttgtcagtcggagcatcctggggctccctggctcctggccgtctgtgaggtaggcgcagtaccgtgtatcgtaggtagcagtaggaacgggggccgccgcggccctgcagccgctcatggcggtgaggtgtgtgccaagcccacccggggtgcagggcgtgacgtgtggggaataaataggcgttgtgacctc

SEQ ID NO: 421299 - DNA, 2310 bp, Homo sapiens
gtcggtgggtcggggatcggtcgcctgagagagtcttcttctgcatatcgtgctagaggtgggggaaatctgggattcaggaccgtccaccaccacctcccacccgctgtgtaaacctgggtatcacctcttctgggctcaagatggacaacaagaagcgcctggcctacgccatcatccagttcctgcatgaccagctccggcacgggggcctctcgtccgatgctcaggagagcttggaagtcgccatccagtgcctggagactgcgtttggggtgacggtagaagacagtgaccttgcgctccctcagactctgccggagatatttgaagcggctgccacgggcaaggagatgccgcaggacctgaggagccccgcgcgaaccccgccttccgaggaggactcagcagaggcagagcgcctcaaaaccgaaggaaacgagcagatgaaagtggaaaactttgaagctgccgtgcatttctacggaaaagccatcgagctcaacccagccaacgccgtctatttctgcaacagagccgcagcctacagcaaactcggcaactacgcaggcgcggtgcaggactgtgagcgggccatctgcattgacccggcctacagcaaggcctacggcaggatgggcctggcgctctccagcctcaacaagcacgtggaggccgtggcttactacaagaaggctctggagctggaccccgacaacgagacatacaagtccaacctcaagatagcggagctgaagctgcgggaggcccccagccccacgggaggcgtgggcagcttcgacatcgccggcctgctgaacaaccctggcttcatgagcatggcttcgaacctaatgaacaatccccagattcagcagctcatgtccggcatgatttcgggtggcaacaaccccttgggaactcccggcaccagcccctcgcagaacgacctggccagcctcatccaggcgggccagcagtttgcccagcagatgcagcagcagaacccagagttgatagagcagctcaggagccagatccggagtcggacgcccagcgccagcaacgacgaccagcaggagtgacgctgcctgctcccggtgtgaccgcgtccttccctggccgacccgaaggaagccttctggttgtctgccacttcctcctgttggactgcctgagagaggggaagagagagacctcggacctgcatgtcaagatggattttccccttttatctctgccctcctccactccctttttgtaactcccttacagcccccagacccttcttgaaacgagagccagcaagctgagcacagaccagcagcgacctcccttccagcccccagaaagctcggtcacttgagtgttttctagaatcctggggtgctcccgggccgctctcagagaagtggcaggtttcacgttcagccgtgtggcggatcgtgtggcttccaaagccttttacagcccccgccccccatcccgtggtctgtctgcaggaactctcccgtctgtgagaagcctctttccgagtcgacctcccggccaccccggccctgtgcctgctcggaagagctcactgccagctgcggcctgggcaccgcgggccatgtgtgtttgcatgaggaactctttagtggcagacacctaagagacggctgcggtcaccccacgcctccgcggctcaggagccgtcctgggtgcataggaccagtttctgtgacttttctccagttgggcatgttgacagacatgtttcccctcctcccaccctcattttctggtcctcgcgactgagagccaggggcgacatcatgaccttctgtcccggccgccttagccccgggcacagggaaggcagctgggccgtttctgtctgtgtcccatcctgctgtccttctgtcctggatgtttcatgggcccggggccccccagggaagcttacccctcctgtgctgggtggaggccacgggacacctcaggtgccacccaccttggccctaaaacagccaccaggaaagcagccggagagccggacagcaggcagcctgtctgggttcctgaggcctgggggtggcagacgagcccacggcgccgtggtcccagcagcagggttgtcagtcggagcatcctggggctccctggctcctggccgtctgtgaggtaggcgcagtaccgtgtatcgtaggtagcagtaggaacgggggccgccgcggccctgcagccgctcatggcggtgaggtgtgtgccaagcccacccggggtgcagggcgtgacgtgtggggaataaataggcgttgtgacctc

SEQ ID NO: 421300 - DNA, 3135 bp, Homo sapiens
  misc_feature (39)..(40): n is a, c, g, or t
  misc_feature (45)..(45): n is a, c, g, or t
tcacacttttctggggtacacccattattgaaacaccgnntgggnttttaaaaacagtgtcgtccgatccggattcggatcgtcgctgaaactgagcgagctcaggccgaacaacccgtccgagctcacaggctttgcaggccacgatccgggaaccgcctggcctctccctcacaacccggctggcttaaaacaaccaagattgatttccctcgcagttctggaggccagaagtctgagatgaaggtgcaggctgggccacgttccctctgaaggccccaagggaggctccgtcctgcctcttccagctgctgggggccagcgagcctcacctctcttcgtgtggccacatggcctcagcctctgcctccgtcttcacgcggccgtctccgtgcggccatgttcaatccctgcattagggccaccacagcgacctcatctccacttgtttccatctgcaaagacacagacaaggtcccgtgctcaggtcccaggtggacgtgactagcccagaacttggctgctccagcggcgggggcgggggcggctgcttctccacgcagcttgttacatctgaatgtttagagtcaccatcgccagccttcgggggaaatggaggcacagtgaggccaagccttcctgagctggcgcctcaaggcagccggccagcctgccccgggggaagctcacgtcggggcttcctgctcagagccgtgaaggtcactgtggccgaggcccctccaagttggcccaggcacccaggaaacctgtgtgaaaggtcttgtactaaaaaaagacctgtccatagactacagctccagattccagaacagcctctcctgatgtcaccatctggcaccctttagagctttggcaggaaactgcagggaccacagacatgagcagaagcagctgtcaagtcctgggaatgaggaacaagacagggtatcacctcttctgggctcaagatggacaacaagaagcgcctggcctacgccatcatccagttcctgcatgaccagctccggcacgggggcctctcgtccgatgctcaggagagcttggaagtcgccatccagtgcctggagactgcgtttggggtgacggtagaagacagtgaccttgcgctccctcagactctgccggagatatttgaagcggctgccacgggcaaggagatgccgcaggacctgaggagccccgcgcgaaccccgccttccgaggaggactcagcagaggcagagcgcctcaaaaccgaaggaaacgagcagatgaaagtggaaaactttgaagctgccgtgcatttctacggaaaagccatcgagctcaacccagccaacgccgtctatttctgcaacagagccgcagcctacagcaaactcggcaactacgcaggcgcggtgcaggactgtgagcgggccatctgcattgacccggcctacagcaaggcctacggcaggatgggcctggcgctctccagcctcaacaagcacgtggaggccgtggcttactacaagaaggctctggagctggaccccgacaacgagacatacaagtccaacctcaagatagcggagctgaagctgcgggaggcccccagccccacgggaggcgtgggcagcttcgacatcgccggcctgctgaacaaccctggcttcatgagcatggcttcgaacctaatgaacaatccccagattcagcagctcatgtccggcatgatttcgggtggcaacaaccccttgggaactcccggcaccagcccctcgcagaacgacctggccagcctcatccaggcgggccagcagtttgcccagcagatgcagcagcagaacccagagttgatagagcagctcaggagccagatccggagtcggacgcccagcgccagcaacgacgaccagcaggagtgacgctgcctgctcccggtgtgaccgcgtccttccctggccgacccgaaggaagccttctggttgtctgccacttcctcctgttggactgcctgagagaggggaagagagagacctcggacctgcatgtcaagatggattttccccttttatctctgccctcctccactccctttttgtaactcccttacagcccccagacccttcttgaaacgagagccagcaagctgagcacagaccagcagcgacctcccttccagcccccagaaagctcggtcacttgagtgttttctagaatcctggggtgctcccgggccgctctcagagaagtggcaggtttcacgttcagccgtgtggcggatcgtgtggcttccaaagccttttacagcccccgccccccatcccgtggtctgtctgcaggaactctcccgtctgtgagaagcctctttccgagtcgacctcccggccaccccggccctgtgcctgctcggaagagctcactgccagctgcggcctgggcaccgcgggccatgtgtgtttgcatgaggaactctttagtggcagacacctaagagacggctgcggtcaccccacgcctccgcggctcaggagccgtcctgggtgcataggaccagtttctgtgacttttctccagttgggcatgttgacagacatgtttcccctcctcccaccctcattttctggtcctcgcgactgagagccaggggcgacatcatgaccttctgtcccggccgccttagccccgggcacagggaaggcagctgggccgtttctgtctgtgtcccatcctgctgtccttctgtcctggatgtttcatgggcccggggccccccagggaagcttacccctcctgtgctgggtggaggccacgggacacctcaggtgccacccaccttggccctaaaacagccaccaggaaagcagccggagagccggacagcaggcagcctgtctgggttcctgaggcctgggggtggcagacgagcccacggcgccgtggtcccagcagcagggttgtcagtcggagcatcctggggctccctggctcctggccgtctgtgaggtaggcgcagtaccgtgtatcgtaggtagcagtaggaacgggggccgccgcggccctgcagccgctcatggcggtgaggtgtgtgccaagcccacccggggtgcagggcgtgacgtgtggggaataaataggcgttgtgacctc

SEQ ID NO: 421301 - DNA, 1434 bp, Homo sapiens
gcagaagggaagcaactccgggcgcctttcttttgcgcaggcgtcgcgccctggggccggggccgggcggcaccgcggtgcgcaagcgcaaccgtcggtgggtcggggatcggtcgcctgagaggtatcacctcttctgggctcaagatggacaacaagaagcgcctggcctacgccatcatccagttcctgcatgaccagctccggcacgggggcctctcgtccgatgctcaggagagcttggaagtcgccatccagtgcctggagactgcgtttggggtgacggtagaagacagtgaccttgcgctccctcagactctgccggagatatttgaagcggctgccacgggcaaggagatgccgcaggacctgaggagccccgcgcgaaccccgccttccgaggaggactcagcagaggcagagcgcctcaaaaccgaaggaaacgagcagatgaaagtggaaaactttgaagctgccgtgcatttctacggaaaagccatcgagctcaacccagccaacgccgtctatttctgcaacagagccgcagcctacagcaaactcggcaactacgcaggcgcggtgcaggactgtgagcgggccatctgcattgacccggcctacagcaaggcctacggcaggatgggcctggcgctctccagcctcaacaagcacgtggaggccgtggcttactacaagaaggctctggagctggaccccgacaacgagacatacaagtccaacctcaagatagcggagctgaagctgcgggaggcccccagccccacgggaggcgtgggcagcttcgacatcgccggcctgctgaacaaccctggcttcatgagcatggcttcgaacctaatgaacaatccccagattcagcagctcatgtccggcatgatttcgggtggcaacaaccccttgggaactcccggcaccagcccctcgcagaacgacctggccagcctcatccaggcgggccagcagtttgcccagcagatgcagcagcagaacccagagttgatagagcagctcaggagccagatccggagtcggacgcccagcgccagcaacgacgaccagcaggagtgacgctgcctgctcccggtgtgaccgcgtccttccctggccgacccgaaggaagccttctggttgtctgccacttcctcctgttggactgcctgagagaggggaagagagagacctcggacctgcatgtcaagatatcaagcctggaatccaggcttgattgcaggcagaggcttactagaagtgtgaaaacgtaggcttggattaaggcgacagcgatttctaggatagtcagtagaactagaattgtgaagatgataagtgtagagggaaggttaatggttgatattgctagggtggcgcttccaattaggtgcatgagtaggtggcctgcaatcaagcctggaa

SEQ ID NO: 421302 - DNA, 1281 bp, Homo sapiens
gcagaagggaagcaactccgggcgcctttcttttgcgcaggcgtcgcgccctggggccggggccgggcggcaccgcggtgcgcaagcgcaaccgtcggtgggtcggggatcggtcgcctgagaggtatcacctcttctgggctcaagatggacaacaagaagcgcctggcctacgccatcatccagttcctgcatgaccagctccggcacgggggcctctcgtccgatgctcaggagagcttggaagtcgccatccagtgcctggagactgcgtttggggtgacggtagaagacagtgaccttgcgctccctcagactctgccggagatatttgaagcggctgccacgggcaaggagatgccgcaggacctgaggagccccgcgcgaaccccgccttccgaggaggactcagcagaggcagagcgcctcaaaaccgaaggaaacgagcagatgaaagtggaaaactttgaagctgccgtgcatttctacggaaaagccatcgagctcaacccagccaacgccgtctatttctgcaacagagccgcagcctacagcaaactcggcaactacgcaggcgcggtgcaggactgtgagcgggccatctgcattgacccggcctacagcaaggcctacggcaggatgggcctggcgctctccagcctcaacaagcacgtggaggccgtggcttactacaagaaggctctggagctggaccccgacaacgagacatacaagtccaacctcaagatagcggagctgaagctgcgggaggcccccagccccacgggaggcgtgggcagcttcgacatcgccggcctgctgaacaaccctggcttcatgagcatggcttcgaacctaatgaacaatccccagattcagcagctcatgtccggcatgatttcgggtggcaacaaccccttgggaactcccggcaccagcccctcgcagaacgacctggccagcctcatccaggcgggccagcagtttgcccagcagatgcagcagcagaacccagagttgatagagcagctcaggagccagatccggagtcggacgcccagcgccagcaacgacgaccagcaggagtgacgctgcctgctcccggtgtgaccgcgtccttccctggccgtctgtgaggtaggcgcagtaccgtgtatcgtaggtagcagtaggaacgggggccgccgcggccctgcagccgctcatggcggtgaggtgtgtgccaagcccacccggggtgcagggcgtgacgtgtggggaataaataggcgttgtgacctc

SEQ ID NO: 421303 - DNA, 2276 bp, Homo sapiens
gcagaagggaagcaactccgggcgcctttcttttgcgcaggcgtcgcgccctggggccggggccgggcggcaccgcggtgcgcaagcgcaaccgtcggtgggtcggggatcggtcgcctgagaggtatcacctcttctgggctcaagatggacaacaagaagcgcctggcctacgccatcatccagttcctgcatgaccagctccggcacgggggcctctcgtccgatgctcaggagagcttggaagtcgccatccagtgcctggagactgcgtttggggtgacggtagaagacagtgaccttgcgctccctcagactctgccggagatatttgaagcggctgccacgggcaaggagatgccgcaggacctgaggagccccgcgcgaaccccgccttccgaggaggactcagcagaggcagagcgcctcaaaaccgaaggaaacgagcagatgaaagtggaaaactttgaagctgccgtgcatttctacggaaaagccatcgagctcaacccagccaacgccgtctatttctgcaacagagccgcagcctacagcaaactcggcaactacgcaggcgcggtgcaggactgtgagcgggccatctgcattgacccggcctacagcaaggcctacggcaggatgggcctggcgctctccagcctcaacaagcacgtggaggccgtggcttactacaagaaggctctggagctggaccccgacaacgagacatacaagtccaacctcaagatagcggagctgaagctgcgggaggcccccagccccacgggaggcgtgggcagcttcgacatcgccggcctgctgaacaaccctggcttcatgagcatgcatgtccggcatgatttcgggtggcaacaaccccttgggaactcccggcaccagcccctcgcagaacgacctggccagcctcatccaggcgggccagcagtttgcccagcagatgcagcagcagaacccagagttgatagagcagctcaggagccagatccggagtcggacgcccagcgccagcaacgacgaccagcaggagtgacgctgcctgctcccggtgtgaccgcgtccttccctggccgacccgaaggaagccttctggttgtctgccacttcctcctgttggactgcctgagagaggggaagagagagacctcggacctgcatgtcaagatggattttccccttttatctctgccctcctccactccctttttgtaactcccttacagcccccagacccttcttgaaacgagagccagcaagctgagcacagaccagcagcgacctcccttccagcccccagaaagctcggtcacttgagtgttttctagaatcctggggtgctcccgggccgctctcagagaagtggcaggtttcacgttcagccgtgtggcggatcgtgtggcttccaaagccttttacagcccccgccccccatcccgtggtctgtctgcaggaactctcccgtctgtgagaagcctctttccgagtcgacctcccggccaccccggccctgtgcctgctcggaagagctcactgccagctgcggcctgggcaccgcgggccatgtgtgtttgcatgaggaactctttagtggcagacacctaagagacggctgcggtcaccccacgcctccgcggctcaggagccgtcctgggtgcataggaccagtttctgtgacttttctccagttgggcatgttgacagacatgtttcccctcctcccaccctcattttctggtcctcgcgactgagagccaggggcgacatcatgaccttctgtcccggccgccttagccccgggcacagggaaggcagctgggccgtttctgtctgtgtcccatcctgctgtccttctgtcctggatgtttcatgggcccggggccccccagggaagcttacccctcctgtgctgggtggaggccacgggacacctcaggtgccacccaccttggccctaaaacagccaccaggaaagcagccggagagccggacagcaggcagcctgtctgggttcctgaggcctgggggtggcagacgagcccacggcgccgtggtcccagcagcagggttgtcagtcggagcatcctggggctccctggctcctggccgtctgtgaggtaggcgcagtaccgtgtatcgtaggtagcagtaggaacgggggccgccgcggccctgcagccgctcatggcggtgaggtgtgtgccaagcccacccggggtgcagggcgtgacgtgtggggaataaataggcgttgtgacctc

SEQ ID NO: 421304 - DNA, 3028 bp, Homo sapiens
  misc_feature (39)..(40): n is a, c, g, or t
  misc_feature (45)..(45): n is a, c, g, or t
tcacacttttctggggtacacccattattgaaacaccgnntgggnttttaaaaacagtgtcgtccgatccggattcggatcgtcgctgaaactgagcgagctcaggccgaacaacccgtccgagctcacaggctttgcaggccacgatccgggaaccgcctggcctctccctcacaacccggctggcttaaaacaaccaagattgatttccctcgcagttctggaggccagaagtctgagatgaaggtgcaggctgggccacgttccctctgaaggccccaagggaggctccgtcctgcctcttccagctgctgggggccagcgagcctcacctctcttcgtgtggccacatggcctcagcctctgcctccgtcttcacgcggccgtctccgtgcggccatgttcaatccctgcattagggccaccacagcgacctcatctccacttgtttccatctgcaaagacacagacaaggtcccgtgctcaggtcccaggtggacgtgactagcccagaacttggctgctccagcggcgggggcgggggcggctgcttctccacgcagcttgttacatctgaatgtttagagtcaccatcgccagccttcgggggaaatggaggcacagtgaggccaagccttcctgagctggcgcctcaaggcagccggccagcctgccccgggggaagctcacgtcggggcttcctgctcagagccgtgaaggtcactgtggccgaggcccctccaagttggcccaggcacccaggaaacctgtgtgaaaggtcttgtactaaaaaaagacctgtccatagactacagctccagattccagaacagcctctcctgatgtcaccatctggcaccctttagagctttggcaggaaactgcagggaccacagacatgagcagaagcagctgtcaagtcctgggaatgaggaacaagacagggtatcacctcttctgggctcaagatggacaacaagaagcgcctggcctacgccatcatccagttcctgcatgaccagctccggcacgggggcctctcgtccgatgctcaggagagcttggaaggagatgccgcaggacctgaggagccccgcgcgaaccccgccttccgaggaggactcagcagaggcagagcgcctcaaaaccgaaggaaacgagcagatgaaagtggaaaactttgaagctgccgtgcatttctacggaaaagccatcgagctcaacccagccaacgccgtctatttctgcaacagagccgcagcctacagcaaactcggcaactacgcaggcgcggtgcaggactgtgagcgggccatctgcattgacccggcctacagcaaggcctacggcaggatgggcctggcgctctccagcctcaacaagcacgtggaggccgtggcttactacaagaaggctctggagctggaccccgacaacgagacatacaagtccaacctcaagatagcggagctgaagctgcgggaggcccccagccccacgggaggcgtgggcagcttcgacatcgccggcctgctgaacaaccctggcttcatgagcatggcttcgaacctaatgaacaatccccagattcagcagctcatgtccggcatgatttcgggtggcaacaaccccttgggaactcccggcaccagcccctcgcagaacgacctggccagcctcatccaggcgggccagcagtttgcccagcagatgcagcagcagaacccagagttgatagagcagctcaggagccagatccggagtcggacgcccagcgccagcaacgacgaccagcaggagtgacgctgcctgctcccggtgtgaccgcgtccttccctggccgacccgaaggaagccttctggttgtctgccacttcctcctgttggactgcctgagagaggggaagagagagacctcggacctgcatgtcaagatggattttccccttttatctctgccctcctccactccctttttgtaactcccttacagcccccagacccttcttgaaacgagagccagcaagctgagcacagaccagcagcgacctcccttccagcccccagaaagctcggtcacttgagtgttttctagaatcctggggtgctcccgggccgctctcagagaagtggcaggtttcacgttcagccgtgtggcggatcgtgtggcttccaaagccttttacagcccccgccccccatcccgtggtctgtctgcaggaactctcccgtctgtgagaagcctctttccgagtcgacctcccggccaccccggccctgtgcctgctcggaagagctcactgccagctgcggcctgggcaccgcgggccatgtgtgtttgcatgaggaactctttagtggcagacacctaagagacggctgcggtcaccccacgcctccgcggctcaggagccgtcctgggtgcataggaccagtttctgtgacttttctccagttgggcatgttgacagacatgtttcccctcctcccaccctcattttctggtcctcgcgactgagagccaggggcgacatcatgaccttctgtcccggccgccttagccccgggcacagggaaggcagctgggccgtttctgtctgtgtcccatcctgctgtccttctgtcctggatgtttcatgggcccggggccccccagggaagcttacccctcctgtgctgggtggaggccacgggacacctcaggtgccacccaccttggccctaaaacagccaccaggaaagcagccggagagccggacagcaggcagcctgtctgggttcctgaggcctgggggtggcagacgagcccacggcgccgtggtcccagcagcagggttgtcagtcggagcatcctggggctccctggctcctggccgtctgtgaggtaggcgcagtaccgtgtatcgtaggtagcagtaggaacgggggccgccgcggccctgcagccgctcatggcggtgaggtgtgtgccaagcccacccggggtgcagggcgtgacgtgtggggaataaataggcgttgtgacctc

SEQ ID NO: 421305 - DNA, 2371 bp, Homo sapiens
ggtcctgatgctgactactatcgggatcgcggttgtcagtctcactctgtgggttggatcggtgggatcggtcgtctgagatgtatcacgctgcattcgtggtgttcatacaatggacacacgaatcaatacgcgcgatgcgtaccagcgcatcagtccagattccatgtcatggaccaggctccggtgctcgggtgacctgtctggatcgcgaatgcgtcaggaagatgacgttgggaaagctcagctcatccatgatgtccatgggagtaactggcgtttatggagatgtcacggtacggaacgacatgatggacgctttgcgtcatcgcgcttctagacttcctggccggagagtaattttgacagagctaggcgtcgcctacggtgggcacatggaggattgccggccaggacccttgaagtgaagccccagagcagaaacgcccgccttccgaggaggactcagcagaggcagagcgcctcaaaaccgaaggaaacgagcagatgaaagtggaaaactttgaagctgccgtgcatttctacggaaaagccatcgagctcaacccagccaacgccgtctatttctgcaacagagccgcagcctacagcaaactcggcaactacgcaggcgcggtgcaggactgtgagcgggccatctgcattgacccggcctacagcaaggcctacggcaggatgggcctggcgctctccagcctcaacaagcacgtggaggccgtggcttactacaagaaggctctggagctggaccccgacaacgagacatacaagtccaacctcaagatagcggagctgaagctgcgggaggcccccagccccacgggaggcgtgggcagcttcgacatcgccggcctgctgaacaaccctggcttcatgagcatggcttcgaacctaatgaacaatccccagattcagcagctcatgtccggcatgatttcgggtggcaacaaccccttgggaactcccggcaccagcccctcgcagaacgacctggccagcctcatccaggcgggccagcagtttgcccagcagatgcagcagcagaacccagagttgatagagcagctcaggagccagatccggagtcggacgcccagcgccagcaacgacgaccagcaggagtgacgctgcctgctcccggtgtgaccgcgtccttccctggccgacccgaaggaagccttctggttgtctgccacttcctcctgttggactgcctgagagaggggaagagagagacctcggacctgcatgtcaagatggattttccccttttatctctgccctcctccactccctttttgtaactcccttacagcccccagacccttcttgaaacgagagccagcaagctgagcacagaccagcagcgacctcccttccagcccccagaaagctcggtcacttgagtgttttctagaatcctggggtgctcccgggccgctctcagagaagtggcaggtttcacgttcagccgtgtggcggatcgtgtggcttccaaagccttttacagcccccgccccccatcccgtggtctgtctgcaggaactctcccgtctgtgagaagcctctttccgagtcgacctcccggccaccccggccctgtgcctgctcggaagagctcactgccagctgcggcctgggcaccgcgggccatgtgtgtttgcatgaggaactctttagtggcagacacctaagagacggctgcggtcaccccacgcctccgcggctcaggagccgtcctgggtgcataggaccagtttctgtgacttttctccagttgggcatgttgacagacatgtttcccctcctcccaccctcattttctggtcctcgcgactgagagccaggggcgacatcatgaccttctgtcccggccgccttagccccgggcacagggaaggcagctgggccgtttctgtctgtgtcccatcctgctgtccttctgtcctggatgtttcatgggcccggggccccccagggaagcttacccctcctgtgctgggtggaggccacgggacacctcaggtgccacccaccttggccctaaaacagccaccaggaaagcagccggagagccggacagcaggcagcctgtctgggttcctgaggcctgggggtggcagacgagcccacggcgccgtggtcccagcagcagggttgtcagtcggagcatcctggggctccctggctcctggccgtctgtgaggtaggcgcagtaccgtgtatcgtaggtagcagtaggaacgggggccgccgcggccctgcagccgctcatggcggtgaggtgtgtgccaagcccacccggggtgcagggcgtgacgtgtggggaataaataggcgttgtgacctc

SEQ ID NO: 421306 - DNA, 1228 bp, Homo sapiens
gcagaagggaagcaactccgggcgcctttcttttgcgcaggcgtcgcgccctggggccggggccgggcggcaccgcggtgcgcaagcgcaaccgtcggtgggtcggggatcggtcgcctgagaggtatcacctcttctgggctcaagatggacaacaagaagcgcctggcctacgccatcatccagttcctgcatgaccagctccggcacgggggcctctcgtccgatgctcaggagagcttggaagtcgccatccagtgcctggagactgcgtttggggtgacggtagaagacagtgaccttgcgctccctcagactctgccggagatatttgaagcggctgccacgggcaaggagatgccgcaggacctgaggagccccgcgcgaaccccgccttccgaggaggactcagcagaggcagagcgcctcaaaaccgaaggaaacgagcagatgaaagtggaaaactttgaagctgccgtgcatttctacggaaaagccatcgagctcaacccagccaacgccgtctatttctgcaacagagccgcagcctacagcaaactcggcaactacgcaggcgcggtgcaggactgtgagcgggccatctgcattgacccggcctacagcaaggcctacggcaggatgggcctggcgctctccagcctcaacaagcacgtggaggccgtggcttactacaagaaggctctggagctggaccccgacaacgagacatacaagtccaacctcaagatagcggagctgaagctgcgggaggcccccagccccacgggaggcgtgggcagcttcgacatcgccggcctgctgaacaaccctggcttcatgagcatggcttcgaacctaatgaacaatccccagattcagcagctcatgtccggcatgatttcgggtggcaacaaccccttgggaactcccggcaccagcccctcgcagaacgacctggccagcctcatccaggcgggccagcagtttgcccagcagatgcagcagcagaacccagagttgatagagcagctcaggagccagatccggacatcctggggctccctggctcctggccgtctgtgaggtaggcgcagtaccgtgtatcgtaggtagcagtaggaacgggggccgccgcggccctgcagccgctcatggcggtgaggtgtgtgccaagcccacccggggtgcagggcgtgacgtgtggggaataaataggcgttgtgacctc

SEQ ID NO: 421307 - DNA, 1075 bp, Homo sapiens
gcagaagggaagcaactccgggcgcctttcttttgcgcaggcgtcgcgccctggggccggggccgggcggcaccgcggtgcgcaagcgcaaccgtcggtgggtcggggatcggtcgcctgagaggtatcacctcttctgggctcaagatggacaacaagaagcgcctggcctacgccatcatccagttcctgcatgaccagctccggcacgggggcctctcgtccgatgctcaggagagcttggaagtcgccatccagtgcctggagactgcgtttggggtgacggtagaagacagtgaccttgcgctccctcagactctgccggagatatttgaagcggctgccacgggcaaggagatgccgcaggacctgaggagccccgcgcgaaccccgccttccgaggaggactcagcagaggcagagcgcctcaaaaccgaaggaaacgagcagatgaaagtggaaaactttgaagctgccgtgcatttctacggaaaagccatcgagctcaacccagccaacgccgtctatttctgcaacagagccgcagcctacagcaaactcggcaactacgcaggcgcggtgcaggactgtgagcgggccatctgcattgacccggcctacagcaaggcctacggcaggatgggcctggcgctctccagcctcaacaagcacgtggaggccgtggcttactacaagaaggctctggagctggaccccgacaacgagacatacaagtccaacctcaagatagcggagctgaagctgcgggaggcccccagccccacgggaggcgtgggcagcttcgacatcgccggcctgctgaacaaccctggcttcatgagcatggcttcgaacctaatgaacaatccccagattcagcagctcatgtccggcatgatttcgggtggcaacaaccccttgggaactcccggcaccagcccctcgcagaacgacctggccagcctcatccaggcgggccagcagtttgcccagcagatgcagcagctcgcccctgagttgcagctcgcccctgagttagcagctcgcccctgagttagcagctcgcccctgagtt

SEQ ID NO: 421308 - DNA, 1716 bp, Homo sapiens
ggcgctgcgagatcgctcctgaagcaggaacccaaaacaggatttaagtcacaatgtggaggtcacagctcgtgggtgggggggcgaaaatgtagggaaaagggtatgaaagaccgaatgcccggctcttactgttggttggcgtgctggagtccagaaccaaggctggttaagatggaaagtgtctgatgaaagagaatgatgcgctgggagctttgtcttcctgacaaatttgttctgttcttcaggcttcgaacctaatgaacaatccccagattcagcagctcatgtccggcatgatttcgggtggcaacaaccccttgggaactcccggcaccagcccctcgcagaacgacctggccagcctcatccaggcgggccagcagtttgcccagcagatgcagcagcagaacccagagttgatagagcagctcaggagccagatccggagtcggacgcccagcgccagcaacgacgaccagcaggagtgacgctgcctgctcccggtgtgaccgcgtccttccctggccgacccgaaggaagccttctggttgtctgccacttcctcctgttggactgcctgagagaggggaagagagagacctcggacctgcatgtcaagatggattttccccttttatctctgccctcctccactccctttttgtaactcccttacagcccccagacccttcttgaaacgagagccagcaagctgagcacagaccagcagcgacctcccttccagcccccagaaagctcggtcacttgagtgttttctagaatcctggggtgctcccgggccgctctcagagaagtggcaggtttcacgttcagccgtgtggcggatcgtgtggcttccaaagccttttacagcccccgccccccatcccgtggtctgtctgcaggaactctcccgtctgtgagaagcctctttccgagtcgacctcccggccaccccggccctgtgcctgctcggaagagctcactgccagctgcggcctgggcaccgcgggccatgtgtgtttgcatgaggaactctttagtggcagacacctaagagacggctgcggtcaccccacgcctccgcggctcaggagccgtcctgggtgcataggaccagtttctgtgacttttctccagttgggcatgttgacagacatgtttcccctcctcccaccctcattttctggtcctcgcgactgagagccaggggcgacatcatgaccttctgtcccggccgccttagccccgggcacagggaaggcagctgggccgtttctgtctgtgtcccatcctgctgtccttctgtcctggatgtttcatgggcccggggccccccagggaagcttacccctcctgtgctgggtggaggccacgggacacctcaggtgccacccaccttggccctaaaacagccaccaggaaagcagccggagagccggacagcaggcagcctgtctgggttcctgaggcctgggggtggcagacgagcccacggcgccgtggtcccagcagcagggttgtcagtcggagcatcctggggctccctggctcctggccgtctgtgaggtaggcgcagtaccgtgtatcgtaggtagcagtaggaacgggggccgccgcggccctgcagccgctcatggcggtgaggtgtgtgccaagcccacccggggtgcagggcgtgacgtgtggggaataaataggcgttgtgacctc

SEQ ID NO: 421309 - DNA, 1144 bp, Homo sapiens
gcagaagggaagcaactccgggcgcctttcttttgcgcaggcgtcgcgccctggggccggggccgggcggcaccgcggtgcgcaagcgcaaccgtcggtgggtcggggatcggtcgcctgagaggtatcacctcttctgggctcaagatggacaacaagaagcgcctggcctacgccatcatccagttcctgcatgaccagctccggcacgggggcctctcgtccgatgctcaggagagcttggaagtcgccatccagtgcctggagactgcgtttggggtgacggtagaagacagtgaccttgcgctccctcagactctgccggagatatttgaagcggctgccacgggcaaggagatgccgcaggacctgaggagccccgcgcgaaccccgccttccgaggaggactcagcagaggcagagcgcctcaaaaccgaaggaaacgagcagatgaaagtggaaaactttgaagctgccgtgcatttctacggaaaagccatcgagctcaacccagccaacgccgtctatttctgcaacagagccgcagcctacagcaaactcggcaactacgcaggcgcggtgcaggactgtgagcgggccatctgcattgacccggcctacagcaaggcctacggcaggatgggcctggcgctctccagcctcaacaagcacgtggaggccgtggcttactacaagaaggctctggagctggaccccgacaacgagacatacaagtccaacctcaagatagcggagctgaagctgcgggaggcccccagccccacgggaggcgtgggcagcttcgacatcgccggcctgctgaacaaccctggcttcatgagcatggcttcgaacctaatgaacaatccccagattcagcagctcctgtctgggttcctgaggcctgggggtggcagacgagcccacggcgccgtggtcccagcagcagggttgtcagtcggagcatcctggggctccctggctcctggccgtctgtgaggtaggcgcagtaccgtgtatcgtaggtagcagtaggaacgggggccgccgcggccctgcagccgctcatggcggtgaggtgtgtgccaagcccacccggggtgcagggcgtgacgtgtggggaataaataggcgttgtgacctc

SEQ ID NO: 421310 - DNA, 1200 bp, Homo sapiens
  misc_feature (39)..(40): n is a, c, g, or t
  misc_feature (45)..(45): n is a, c, g, or t
tcacacttttctggggtacacccattattgaaacaccgnntgggnttttaaaaacagtgtcgtccgatccggattcggatcgtcgctgaaactgagcgagctcaggccgaacaacccgtccgagctcacaggctttgcaggccacgatccgggaaccgcctggcctctccctcacaacccggctggcttaaaacaaccaagattgatttccctcgcagttctggaggccagaagtctgagatgaaggtgcaggctgggccacgttccctctgaaggccccaagggaggctccgtcctgcctcttccagctgctgggggccagcgagcctcacctctcttcgtgtggccacatggcctcagcctctgcctccgtcttcacgcggccgtctccgtgcggccatgttcaatccctgcattagggccaccacagcgacctcatctccacttgtttccatctgcaaagacacagacaaggtcccgtgctcaggtcccaggtggacgtgactagcccagaacttggctgctccagcggcgggggcgggggcggctgcttctccacgcagcttgttacatctgaatgtttagagtcaccatcgccagccttcgggggaaatggaggcacagtgaggccaagccttcctgagctggcgcctcaaggcagccggccagcctgccccgggggaagctcacgtcggggcttcctgctcagagccgtgaaggtcactgtggccgaggcccctccaagttggcccaggcacccaggaaacctgtgtgaaaggtcttgtactaaaaaaagacctgtccatagactacagctccagattccagaacagcctctcctgatgtcaccatctggcaccctttagagctttggcaggaaactgcagggaccacagacatgagcagaagcagctgtcaagtcctgggaatgaggaacaagacagggtatcacctcttctgggctcaagatggacaacaagaagcgcctggcctacgccatcatccagttcctgcatgaccagctccggcacgggggcctctcgtccgatgctcaggagagcttggaagtcgccatccagtgcctggagactgcgtttggggtgacggtagaagacagtgaccttgcgctccctcagactctgccggagatatttgaagcggctgccacgggcaaggtgagcctcgatgcttccccagcca

SEQ ID NO: 421311 - DNA, 256 bp, Homo sapiens
tgttctgggaaagcaggtgaaagtcacagggtgggtttgggccctggaggcccaccaggtggtgagagagaatcctctcctgcaggggaaggtgaagggctgagagggattctctcccgggccactgcgagggcctgcagtgggggtggcggtcaggctgtcccggctgcgagtcacgcgctctctcctgcagcatgtccggcatgatttcgggtggcaacaaccccttgggaactcccggcaccagcccctcgca

SEQ ID NO: 421312 - DNA, 4902 bp, Homo sapiens
  misc_feature (956)..(956): n is a, c, g, or t
  misc_feature (1178)..(1178): n is a, c, g, or t
gttgctgtcgccgttgctgtcggccgaggccaccaagaggcaacgggcggcaggttgcagtggaggggcctccgctcccctcggtggtgtgtgggtcctgggggtgcctgccggcccagccgaggaggcccacgcccaccatggtcccctgctggaaccatggcaacatcacccgctccaaggcggaggagctgctttccaggacaggcaaggacgggagcttcctcgtgcgtgccagcgagtccatctcccgggcatacgcgctctgcgtgctgtatcggaattgcgtttacacttacagaattctgcccaatgaagatgataaattcactgttcaggcatccgaaggcgtctccatgaggttcttcaccaagctggaccagctcatcgagttttacaagaaggaaaacatggggctggtgacccatctgcaataccctgtgccgctggaggaagaggacacaggcgacgaccctgaggaggacacagaaagtgtcgtgtctccacccgagctgcccccaagaaacatcccgctgactgccagctcctgtgaggccaaggaggttcctttttcaaacgagaatccccgagcgaccgagaccagccggccgagcctctccgagacattgttccagcgactgcaaagcatggacaccagtgggcttccagaagagcatcttaaggccatccaagattatttaagcactcagctcgcccaggactctgaatttgtgaagacagggtccagcagtcttcctcacctgaagaaactgaccacactgctctgcaaggagctctatggagaagtcatccggaccctcccatccctggagtctctgcagaggttatttgaccagcagctctccccgggcctccgtccacgtcctcaggttcctggtgaggccaatcccatcaacatggtgtccaagctcagccaactgacaagcctgttgtcntccattgaagacaaggtcaaggccttgctgcacgagggtcctgagtctccgcaccggccctcccttatccctccagtcacctttgaggtgaaggcagagtctctggggattcctcagaaaatgcagctcaaagtcgacgttgagtctgggaaactgatcattaagaagtccaaggatggttctgaggacaagttctacagccacaagaaaatcctgcagctnattaagtcacagaaatttctgaataagttggtgatcttggtggaaacagagaaggagaagatcctgcggaaggaatatgtttttgctgactccaaaaagagagaaggcttctgccagctcctgcagcagatgaagaacaagcactcagagcagccggagcccgacatgatcaccatcttcatcggcacctggaacatgggtaacgccccccctcccaagaagatcacgtcctggtttctctccaaggggcagggaaagacgcgggacgactctgcggactacatcccccatgacatttacgtgatcggcacccaagaggaccccctgagtgagaaggagtggctggagatcctcaaacactccctgcaagaaatcaccagtgtgacttttaaaacagtcgccatccacacgctctggaacatccgcatcgtggtgctggccaagcctgagcacgagaaccggatcagccacatctgtactgacaacgtgaagacaggcattgcaaacacactggggaacaagggagccgtgggggtgtcgttcatgttcaatggaacctccttagggttcgtcaacagccacttgacttcaggaagtgaaaagaaactcaggcgaaaccaaaactatatgaacattctccggttcctggccctgggcgacaagaagctgagtccctttaacatcactcaccgcttcacgcacctcttctggtttggggatcttaactaccgtgtggatctgcctacctgggaggcagaaaccatcatccagaaaatcaagcagcagcagtacgcagacctcctgtcccacgaccagctgctcacagagaggagggagcagaaggtcttcctacacttcgaggaggaagaaatcacgtttgccccaacctaccgttttgagagactgactcgggacaaatacgcctacaccaagcagaaagcgacagggatgaagtacaacttgccttcctggtgtgaccgagtcctctggaagtcttatcccctggtgcacgtggtgtgtcagtcttatggcagtaccagcgacatcatgacgagtgaccacagccctgtctttgccacatttgaggcaggagtcacttcccagtttgtctccaagaacggtcccgggactgttgacagccaaggacagattgagtttctcaggtgctatgccacattgaagaccaagtcccagaccaaattctacctggagttccactcgagctgcttggagagttttgtcaagagtcaggaaggagaaaatgaagaaggaagtgagggggagctggtggtgaagtttggtgagactcttccaaagctgaagcccattatctctgaccctgagtacctgctagaccagcacatcctcatcagcatcaagtcctctgacagcgacgaatcctatggcgagggctgcattgcccttcggttagaggccacagaaacgcagctgcccatctacacgcctctcacccaccatggggagttgacaggccacttccagggggagatcaagctgcagacctctcagggcaagacgagggagaagctctatgactttgtgaagacggagcgtgatgaatccagtgggccaaagaccctgaagagcctcaccagccacgaccccatgaagcagtgggaagtcactagcagggcccctccgtgcagtggctccagcatcactgaaatcatcaaccccaactacatgggagtggggccctttgggccaccaatgcccctgcacgtgaagcagaccttgtcccctgaccagcagcccacagcctggagctacgaccagccgcccaaggactccccgctggggccctgcaggggagaaagtcctccgacacctcccggccagccgcccatatcacccaagaagtttttaccctcaacagcaaaccggggtctccctcccaggacacaggagtcaaggcccagtgacctggggaagaacgcaggggacacgctgcctcaggaggacctgccgctgacgaagcccgagatgtttgagaaccccctgtatgggtccctgagttccttccctaagcctgctcccaggaaggaccaggaatcccccaaaatgccgcggaaggaacccccgccctgcccggaacccggcatcttgtcgcccagcatcgtgctcaccaaagcccaggaggctgatcgcggcgaggggcccggcaagcaggtgcccgcgccccggctgcgctccttcacgtgctcatcctctgccgagggcagggcggccggcggggacaagagccaagggaagcccaagaccccggtcagctcccaggccccggtgccggccaagaggcccatcaagccttccagatcggaaatcaaccagcagaccccgcccaccccgacgccgcggccgccgctgccagtcaagagcccggcggtgctgcacctccagcactccaagggccgcgactaccgcgacaacaccgagctcccgcatcacggcaagcaccggccggaggaggggccaccagggcctctaggcaggactgccatgcagtgaagccctcagtgagctgccactgagtcgggagcccagaggaacggcgtgaagccactggaccctctcccgggacctcctgctggctcctcctgcccagcttcctatgcaaggctttgtgttttcaggaaagggcctagcttctgtgtggcccacagagttcactgcctgtgagacttagcaccaagtgctgaggctggaagaaaaacgcacaccagacgggcaacaaacagtctgggtccccagctcgctcttggtacttgggaccccagtgcctcgttgagggcgccattctgaagaaaggaactgcagcgccgatttgagggtggagatatagataataataatattaataataataatggccacatggatcgaacactcatgatgtgccaagtgctgtgctaagtgctttacgaacattcgtcatatcaggatgacctcgagagctgaggctctagccacctaaaaccacgtgcccaaacccaccagtttaaaacggtgtgtgttcggaggggtgaaagcattaagaagcccagtgccctcctggagtgagacaagggctcggccttaaggagctgaagagtctgggtagcttgtttagggtacaagaagcctgttctgtccagcttcagtgacacaagctgctttagctaaagtcccgcgggttccggcatggctaggctgagagcagggatctacctggcttctcagttctttggttggaaggagcaggaaatcagctcctattctccagtggagagatctggcctcagcttgggctagagatgccaaggcctgtgccaggttccctgtgccctcctcgaggtgggcagccatcaccagccacagttaagccaagccccccaacatgtattccatcgtgctggtagaagagtctttgctgttgctcccgaaagccgtgctctccagcctggctgccagggagggtgggcctcttggttccaggctcttgaaatagtgcagccttttcttcctatctctgtggctttcagctctgcttccttggttattaggagaatagatgggtgatgtctttccttatgttgctttttcaacatagcagaattaatgtagggagctaaatccagtggtgtgtgtgaatgcagaagggaatgcaccccacattcccatgatggaagtctgcgtaaccaataaattgtgcctttctcactca

SEQ ID NO: 421313 - DNA, 5274 bp, Homo sapiens
  misc_feature (1328)..(1328): n is a, c, g, or t
  misc_feature (1550)..(1550): n is a, c, g, or t
ctagggcatggcatcccacgtgggtgtcagcacggccgcagaagaaccacttctctggcccacccatgcctgctaggccatgcttcttcagaagtggccacaactctcctgacgtctccagagccggtcattccacccagggggacttcagctgccactggacacttcaattgtacgctgcgaccagttgccaggaaggagagggctggcaagaaagccgcggcagccgtggcagggtgtatgggacggtggacggccagggcccccccctctctctctttctctctctctctcttgcttggtttctgtaatgaggaagttctccgcagctcagtttcctttccctcactgagcgcctgaaacaggaagtcagtcagttaagctggtggcagcagccgaggccaccaagaggcaacgggcggcaggttgcagtggaggggcctccgctcccctcggtggtgtgtgggtcctgggggtgcctgccggcccagccgaggaggcccacgcccaccatggtcccctgctggaaccatggcaacatcacccgctccaaggcggaggagctgctttccaggacaggcaaggacgggagcttcctcgtgcgtgccagcgagtccatctcccgggcatacgcgctctgcgtgctgtatcggaattgcgtttacacttacagaattctgcccaatgaagatgataaattcactgttcaggcatccgaaggcgtctccatgaggttcttcaccaagctggaccagctcatcgagttttacaagaaggaaaacatggggctggtgacccatctgcaataccctgtgccgctggaggaagaggacacaggcgacgaccctgaggaggacacagaaagtgtcgtgtctccacccgagctgcccccaagaaacatcccgctgactgccagctcctgtgaggccaaggaggttcctttttcaaacgagaatccccgagcgaccgagaccagccggccgagcctctccgagacattgttccagcgactgcaaagcatggacaccagtgggcttccagaagagcatcttaaggccatccaagattatttaagcactcagctcgcccaggactctgaatttgtgaagacagggtccagcagtcttcctcacctgaagaaactgaccacactgctctgcaaggagctctatggagaagtcatccggaccctcccatccctggagtctctgcagaggttatttgaccagcagctctccccgggcctccgtccacgtcctcaggttcctggtgaggccaatcccatcaacatggtgtccaagctcagccaactgacaagcctgttgtcntccattgaagacaaggtcaaggccttgctgcacgagggtcctgagtctccgcaccggccctcccttatccctccagtcacctttgaggtgaaggcagagtctctggggattcctcagaaaatgcagctcaaagtcgacgttgagtctgggaaactgatcattaagaagtccaaggatggttctgaggacaagttctacagccacaagaaaatcctgcagctnattaagtcacagaaatttctgaataagttggtgatcttggtggaaacagagaaggagaagatcctgcggaaggaatatgtttttgctgactccaaaaagagagaaggcttctgccagctcctgcagcagatgaagaacaagcactcagagcagccggagcccgacatgatcaccatcttcatcggcacctggaacatgggtaacgccccccctcccaagaagatcacgtcctggtttctctccaaggggcagggaaagacgcgggacgactctgcggactacatcccccatgacatttacgtgatcggcacccaagaggaccccctgagtgagaaggagtggctggagatcctcaaacactccctgcaagaaatcaccagtgtgacttttaaaacagtcgccatccacacgctctggaacatccgcatcgtggtgctggccaagcctgagcacgagaaccggatcagccacatctgtactgacaacgtgaagacaggcattgcaaacacactggggaacaagggagccgtgggggtgtcgttcatgttcaatggaacctccttagggttcgtcaacagccacttgacttcaggaagtgaaaagaaactcaggcgaaaccaaaactatatgaacattctccggttcctggccctgggcgacaagaagctgagtccctttaacatcactcaccgcttcacgcacctcttctggtttggggatcttaactaccgtgtggatctgcctacctgggaggcagaaaccatcatccagaaaatcaagcagcagcagtacgcagacctcctgtcccacgaccagctgctcacagagaggagggagcagaaggtcttcctacacttcgaggaggaagaaatcacgtttgccccaacctaccgttttgagagactgactcgggacaaatacgcctacaccaagcagaaagcgacagggatgaagtacaacttgccttcctggtgtgaccgagtcctctggaagtcttatcccctggtgcacgtggtgtgtcagtcttatggcagtaccagcgacatcatgacgagtgaccacagccctgtctttgccacatttgaggcaggagtcacttcccagtttgtctccaagaacggtcccgggactgttgacagccaaggacagattgagtttctcaggtgctatgccacattgaagaccaagtcccagaccaaattctacctggagttccactcgagctgcttggagagttttgtcaagagtcaggaaggagaaaatgaagaaggaagtgagggggagctggtggtgaagtttggtgagactcttccaaagctgaagcccattatctctgaccctgagtacctgctagaccagcacatcctcatcagcatcaagtcctctgacagcgacgaatcctatggcgagggctgcattgcccttcggttagaggccacagaaacgcagctgcccatctacacgcctctcacccaccatggggagttgacaggccacttccagggggagatcaagctgcagacctctcagggcaagacgagggagaagctctatgactttgtgaagacggagcgtgatgaatccagtgggccaaagaccctgaagagcctcaccagccacgaccccatgaagcagtgggaagtcactagcagggcccctccgtgcagtggctccagcatcactgaaatcatcaaccccaactacatgggagtggggccctttgggccaccaatgcccctgcacgtgaagcagaccttgtcccctgaccagcagcccacagcctggagctacgaccagccgcccaaggactccccgctggggccctgcaggggagaaagtcctccgacacctcccggccagccgcccatatcacccaagaagtttttaccctcaacagcaaaccggggtctccctcccaggacacaggagtcaaggcccagtgacctggggaagaacgcaggggacacgctgcctcaggaggacctgccgctgacgaagcccgagatgtttgagaaccccctgtatgggtccctgagttccttccctaagcctgctcccaggaaggaccaggaatcccccaaaatgccgcggaaggaacccccgccctgcccggaacccggcatcttgtcgcccagcatcgtgctcaccaaagcccaggaggctgatcgcggcgaggggcccggcaagcaggtgcccgcgccccggctgcgctccttcacgtgctcatcctctgccgagggcagggcggccggcggggacaagagccaagggaagcccaagaccccggtcagctcccaggccccggtgccggccaagaggcccatcaagccttccagatcggaaatcaaccagcagaccccgcccaccccgacgccgcggccgccgctgccagtcaagagcccggcggtgctgcacctccagcactccaagggccgcgactaccgcgacaacaccgagctcccgcatcacggcaagcaccggccggaggaggggccaccagggcctctaggcaggactgccatgcagtgaagccctcagtgagctgccactgagtcgggagcccagaggaacggcgtgaagccactggaccctctcccgggacctcctgctggctcctcctgcccagcttcctatgcaaggctttgtgttttcaggaaagggcctagcttctgtgtggcccacagagttcactgcctgtgagacttagcaccaagtgctgaggctggaagaaaaacgcacaccagacgggcaacaaacagtctgggtccccagctcgctcttggtacttgggaccccagtgcctcgttgagggcgccattctgaagaaaggaactgcagcgccgatttgagggtggagatatagataataataatattaataataataatggccacatggatcgaacactcatgatgtgccaagtgctgtgctaagtgctttacgaacattcgtcatatcaggatgacctcgagagctgaggctctagccacctaaaaccacgtgcccaaacccaccagtttaaaacggtgtgtgttcggaggggtgaaagcattaagaagcccagtgccctcctggagtgagacaagggctcggccttaaggagctgaagagtctgggtagcttgtttagggtacaagaagcctgttctgtccagcttcagtgacacaagctgctttagctaaagtcccgcgggttccggcatggctaggctgagagcagggatctacctggcttctcagttctttggttggaaggagcaggaaatcagctcctattctccagtggagagatctggcctcagcttgggctagagatgccaaggcctgtgccaggttccctgtgccctcctcgaggtgggcagccatcaccagccacagttaagccaagccccccaacatgtattccatcgtgctggtagaagagtctttgctgttgctcccgaaagccgtgctctccagcctggctgccagggagggtgggcctcttggttccaggctcttgaaatagtgcagccttttcttcctatctctgtggctttcagctctgcttccttggttattaggagaatagatgggtgatgtctttccttatgttgctttttcaacatagcagaattaatgtagggagctaaatccagtggtgtgtgtgaatgcagaagggaatgcaccccacattcccatgatggaagtctgcgtaaccaataaattgtgcctttctcactca

SEQ ID NO: 421314 - DNA, 4142 bp, Homo sapiens
  misc_feature (196)..(196): n is a, c, g, or t
  misc_feature (418)..(418): n is a, c, g, or t
cgcccactaatccttgatgttcaccttgtcccctgcccccagagaagtcatccggaccctcccatccctggagtctctgcagaggttatttgaccagcagctctccccgggcctccgtccacgtcctcaggttcctggtgaggccaatcccatcaacatggtgtccaagctcagccaactgacaagcctgttgtcntccattgaagacaaggtcaaggccttgctgcacgagggtcctgagtctccgcaccggccctcccttatccctccagtcacctttgaggtgaaggcagagtctctggggattcctcagaaaatgcagctcaaagtcgacgttgagtctgggaaactgatcattaagaagtccaaggatggttctgaggacaagttctacagccacaagaaaatcctgcagctnattaagtcacagaaatttctgaataagttggtgatcttggtggaaacagagaaggagaagatcctgcggaaggaatatgtttttgctgactccaaaaagagagaaggcttctgccagctcctgcagcagatgaagaacaagcactcagagcagccggagcccgacatgatcaccatcttcatcggcacctggaacatgggtaacgccccccctcccaagaagatcacgtcctggtttctctccaaggggcagggaaagacgcgggacgactctgcggactacatcccccatgacatttacgtgatcggcacccaagaggaccccctgagtgagaaggagtggctggagatcctcaaacactccctgcaagaaatcaccagtgtgacttttaaaacagtcgccatccacacgctctggaacatccgcatcgtggtgctggccaagcctgagcacgagaaccggatcagccacatctgtactgacaacgtgaagacaggcattgcaaacacactggggaacaagggagccgtgggggtgtcgttcatgttcaatggaacctccttagggttcgtcaacagccacttgacttcaggaagtgaaaagaaactcaggcgaaaccaaaactatatgaacattctccggttcctggccctgggcgacaagaagctgagtccctttaacatcactcaccgcttcacgcacctcttctggtttggggatcttaactaccgtgtggatctgcctacctgggaggcagaaaccatcatccagaaaatcaagcagcagcagtacgcagacctcctgtcccacgaccagctgctcacagagaggagggagcagaaggtcttcctacacttcgaggaggaagaaatcacgtttgccccaacctaccgttttgagagactgactcgggacaaatacgcctacaccaagcagaaagcgacagggatgaagtacaacttgccttcctggtgtgaccgagtcctctggaagtcttatcccctggtgcacgtggtgtgtcagtcttatggcagtaccagcgacatcatgacgagtgaccacagccctgtctttgccacatttgaggcaggagtcacttcccagtttgtctccaagaacggtcccgggactgttgacagccaaggacagattgagtttctcaggtgctatgccacattgaagaccaagtcccagaccaaattctacctggagttccactcgagctgcttggagagttttgtcaagagtcaggaaggagaaaatgaagaaggaagtgagggggagctggtggtgaagtttggtgagactcttccaaagctgaagcccattatctctgaccctgagtacctgctagaccagcacatcctcatcagcatcaagtcctctgacagcgacgaatcctatggcgagggctgcattgcccttcggttagaggccacagaaacgcagctgcccatctacacgcctctcacccaccatggggagttgacaggccacttccagggggagatcaagctgcagacctctcagggcaagacgagggagaagctctatgactttgtgaagacggagcgtgatgaatccagtgggccaaagaccctgaagagcctcaccagccacgaccccatgaagcagtgggaagtcactagcagggcccctccgtgcagtggctccagcatcactgaaatcatcaaccccaactacatgggagtggggccctttgggccaccaatgcccctgcacgtgaagcagaccttgtcccctgaccagcagcccacagcctggagctacgaccagccgcccaaggactccccgctggggccctgcaggggagaaagtcctccgacacctcccggccagccgcccatatcacccaagaagtttttaccctcaacagcaaaccggggtctccctcccaggacacaggagtcaaggcccagtgacctggggaagaacgcaggggacacgctgcctcaggaggacctgccgctgacgaagcccgagatgtttgagaaccccctgtatgggtccctgagttccttccctaagcctgctcccaggaaggaccaggaatcccccaaaatgccgcggaaggaacccccgccctgcccggaacccggcatcttgtcgcccagcatcgtgctcaccaaagcccaggaggctgatcgcggcgaggggcccggcaagcaggtgcccgcgccccggctgcgctccttcacgtgctcatcctctgccgagggcagggcggccggcggggacaagagccaagggaagcccaagaccccggtcagctcccaggccccggtgccggccaagaggcccatcaagccttccagatcggaaatcaaccagcagaccccgcccaccccgacgccgcggccgccgctgccagtcaagagcccggcggtgctgcacctccagcactccaagggccgcgactaccgcgacaacaccgagctcccgcatcacggcaagcaccggccggaggaggggccaccagggcctctaggcaggactgccatgcagtgaagccctcagtgagctgccactgagtcgggagcccagaggaacggcgtgaagccactggaccctctcccgggacctcctgctggctcctcctgcccagcttcctatgcaaggctttgtgttttcaggaaagggcctagcttctgtgtggcccacagagttcactgcctgtgagacttagcaccaagtgctgaggctggaagaaaaacgcacaccagacgggcaacaaacagtctgggtccccagctcgctcttggtacttgggaccccagtgcctcgttgagggcgccattctgaagaaaggaactgcagcgccgatttgagggtggagatatagataataataatattaataataataatggccacatggatcgaacactcatgatgtgccaagtgctgtgctaagtgctttacgaacattcgtcatatcaggatgacctcgagagctgaggctctagccacctaaaaccacgtgcccaaacccaccagtttaaaacggtgtgtgttcggaggggtgaaagcattaagaagcccagtgccctcctggagtgagacaagggctcggccttaaggagctgaagagtctgggtagcttgtttagggtacaagaagcctgttctgtccagcttcagtgacacaagctgctttagctaaagtcccgcgggttccggcatggctaggctgagagcagggatctacctggcttctcagttctttggttggaaggagcaggaaatcagctcctattctccagtggagagatctggcctcagcttgggctagagatgccaaggcctgtgccaggttccctgtgccctcctcgaggtgggcagccatcaccagccacagttaagccaagccccccaacatgtattccatcgtgctggtagaagagtctttgctgttgctcccgaaagccgtgctctccagcctggctgccagggagggtgggcctcttggttccaggctcttgaaatagtgcagccttttcttcctatctctgtggctttcagctctgcttccttggttattaggagaatagatgggtgatgtctttccttatgttgctttttcaacatagcagaattaatgtagggagctaaatccagtggtgtgtgtgaatgcagaagggaatgcaccccacattcccatgatggaagtctgcgtaaccaataaattgtgcctttctcactca

SEQ ID NO: 421315 - DNA, 4310 bp, Homo sapiens
  misc_feature (956)..(956): n is a, c, g, or t
  misc_feature (1178)..(1178): n is a, c, g, or t
gttgctgtcgccgttgctgtcggccgaggccaccaagaggcaacgggcggcaggttgcagtggaggggcctccgctcccctcggtggtgtgtgggtcctgggggtgcctgccggcccagccgaggaggcccacgcccaccatggtcccctgctggaaccatggcaacatcacccgctccaaggcggaggagctgctttccaggacaggcaaggacgggagcttcctcgtgcgtgccagcgagtccatctcccgggcatacgcgctctgcgtgctgtatcggaattgcgtttacacttacagaattctgcccaatgaagatgataaattcactgttcaggcatccgaaggcgtctccatgaggttcttcaccaagctggaccagctcatcgagttttacaagaaggaaaacatggggctggtgacccatctgcaataccctgtgccgctggaggaagaggacacaggcgacgaccctgaggaggacacagaaagtgtcgtgtctccacccgagctgcccccaagaaacatcccgctgactgccagctcctgtgaggccaaggaggttcctttttcaaacgagaatccccgagcgaccgagaccagccggccgagcctctccgagacattgttccagcgactgcaaagcatggacaccagtgggcttccagaagagcatcttaaggccatccaagattatttaagcactcagctcgcccaggactctgaatttgtgaagacagggtccagcagtcttcctcacctgaagaaactgaccacactgctctgcaaggagctctatggagaagtcatccggaccctcccatccctggagtctctgcagaggttatttgaccagcagctctccccgggcctccgtccacgtcctcaggttcctggtgaggccaatcccatcaacatggtgtccaagctcagccaactgacaagcctgttgtcntccattgaagacaaggtcaaggccttgctgcacgagggtcctgagtctccgcaccggccctcccttatccctccagtcacctttgaggtgaaggcagagtctctggggattcctcagaaaatgcagctcaaagtcgacgttgagtctgggaaactgatcattaagaagtccaaggatggttctgaggacaagttctacagccacaagaaaatcctgcagctnattaagtcacagaaatttctgaataagttggtgatcttggtggaaacagagaaggagaagatcctgcggaaggaatatgtttttgctgactccaaaaagagagaaggcttctgccagctcctgcagcagatgaagaacaagcactcagagcagccggagcccgacatgatcaccatcttcatcggcacctggaacatgggtaacgccccccctcccaagaagatcacgtcctggtttctctccaaggggcagggaaagacgcgggacgactctgcggactacatcccccatgacatttacgtgatcggcacccaagaggaccccctgagtgagaaggagtggctggagatcctcaaacactccctgcaagaaatcaccagtgtgacttttaaaacagtcgccatccacacgctctggaacatccgcatcgtggtgctggccaagcctgagcacgagaaccggatcagccacatctgtactgacaacgtgaagacaggcattgcaaacacactggggaacaagggagccgtgggggtgtcgttcatgttcaatggaacctccttagggttcgtcaacagccacttgacttcaggaagtgaaaagaaactcaggcgaaaccaaaactatatgaacattctccggttcctggccctgggcgacaagaagctgagtccctttaacatcactcaccgcttcacgcacctcttctggtttggggatcttaactaccgtgtggatctgcctacctgggaggcagaaaccatcatccagaaaatcaagcagcagcagtacgcagacctcctgtcccacgaccagctgctcacagagaggagggagcagaaggtcttcctacacttcgaggaggaagaaatcacgtttgccccaacctaccgttttgagagactgactcgggacaaatacgcctacaccaagcagaaagcgacagggatgaagtacaacttgccttcctggtgtgaccgagtcctctggaagtcttatcccctggtgcacgtggtgtgtcagtcttatggcagtaccagcgacatcatgacgagtgaccacagccctgtctttgccacatttgaggcaggagtcacttcccagtttgtctccaagaacggtcccgggactgttgacagccaaggacagattgagtttctcaggtgctatgccacattgaagaccaagtcccagaccaaattctacctggagttccactcgagctgcttggagagttttgtcaagagtcaggaaggagaaaatgaagaaggaagtgagggggagctggtggtgaagtttggtgagactcttccaaagctgaagcccattatctctgaccctgagtacctgctagaccagcacatcctcatcagcatcaagtcctctgacagcgacgaatcctatggcgagggctgcattgcccttcggttagaggccacagaaacgcagctgcccatctacacgcctctcacccaccatggggagttgacaggccacttccagggggagatcaagctgcagacctctcagggcaagacgagggagaagctctatgactttgtgaagacggagcgtgatgaatccagtgggccaaagaccctgaagagcctcaccagccacgaccccatgaagcagtgggaagtcactagcagggcccctccgtgcagtggctccagcatcactgaaatcatcaaccccaactacatgggagtggggccctttgggccaccaatgcccctgcacgtgaagcagaccttgtcccctgaccagcagcccacagcctggagctacgaccagccgcccaaggactccccgctggggccctgcaggggagaaagtcctccgacacctcccggccagccgcccatatcacccaagaagtttttaccctcaacagcaaaccggggtctccctcccaggacacaggagtcaagtgaagccctcagtgagctgccactgagtcgggagcccagaggaacggcgtgaagccactggaccctctcccgggacctcctgctggctcctcctgcccagcttcctatgcaaggctttgtgttttcaggaaagggcctagcttctgtgtggcccacagagttcactgcctgtgagacttagcaccaagtgctgaggctggaagaaaaacgcacaccagacgggcaacaaacagtctgggtccccagctcgctcttggtacttgggaccccagtgcctcgttgagggcgccattctgaagaaaggaactgcagcgccgatttgagggtggagatatagataataataatattaataataataatggccacatggatcgaacactcatgatgtgccaagtgctgtgctaagtgctttacgaacattcgtcatatcaggatgacctcgagagctgaggctctagccacctaaaaccacgtgcccaaacccaccagtttaaaacggtgtgtgttcggaggggtgaaagcattaagaagcccagtgccctcctggagtgagacaagggctcggccttaaggagctgaagagtctgggtagcttgtttagggtacaagaagcctgttctgtccagcttcagtgacacaagctgctttagctaaagtcccgcgggttccggcatggctaggctgagagcagggatctacctggcttctcagttctttggttggaaggagcaggaaatcagctcctattctccagtggagagatctggcctcagcttgggctagagatgccaaggcctgtgccaggttccctgtgccctcctcgaggtgggcagccatcaccagccacagttaagccaagccccccaacatgtattccatcgtgctggtagaagagtctttgctgttgctcccgaaagccgtgctctccagcctggctgccagggagggtgggcctcttggttccaggctcttgaaatagtgcagccttttcttcctatctctgtggctttcagctctgcttccttggttattaggagaatagatgggtgatgtctttccttatgttgctttttcaacatagcagaattaatgtagggagctaaatccagtggtgtgtgtgaatgcagaagggaatgcaccccacattcccatgatggaagtctgcgtaaccaataaattgtgcctttctcactca

SEQ ID NO: 421316 - DNA, 1621 bp, Homo sapiens
  misc_feature (956)..(956): n is a, c, g, or t
  misc_feature (1178)..(1178): n is a, c, g, or t
gttgctgtcgccgttgctgtcggccgaggccaccaagaggcaacgggcggcaggttgcagtggaggggcctccgctcccctcggtggtgtgtgggtcctgggggtgcctgccggcccagccgaggaggcccacgcccaccatggtcccctgctggaaccatggcaacatcacccgctccaaggcggaggagctgctttccaggacaggcaaggacgggagcttcctcgtgcgtgccagcgagtccatctcccgggcatacgcgctctgcgtgctgtatcggaattgcgtttacacttacagaattctgcccaatgaagatgataaattcactgttcaggcatccgaaggcgtctccatgaggttcttcaccaagctggaccagctcatcgagttttacaagaaggaaaacatggggctggtgacccatctgcaataccctgtgccgctggaggaagaggacacaggcgacgaccctgaggaggacacagaaagtgtcgtgtctccacccgagctgcccccaagaaacatcccgctgactgccagctcctgtgaggccaaggaggttcctttttcaaacgagaatccccgagcgaccgagaccagccggccgagcctctccgagacattgttccagcgactgcaaagcatggacaccagtgggcttccagaagagcatcttaaggccatccaagattatttaagcactcagctcgcccaggactctgaatttgtgaagacagggtccagcagtcttcctcacctgaagaaactgaccacactgctctgcaaggagctctatggagaagtcatccggaccctcccatccctggagtctctgcagaggttatttgaccagcagctctccccgggcctccgtccacgtcctcaggttcctggtgaggccaatcccatcaacatggtgtccaagctcagccaactgacaagcctgttgtcntccattgaagacaaggtcaaggccttgctgcacgagggtcctgagtctccgcaccggccctcccttatccctccagtcacctttgaggtgaaggcagagtctctggggattcctcagaaaatgcagctcaaagtcgacgttgagtctgggaaactgatcattaagaagtccaaggatggttctgaggacaagttctacagccacaagaaaatcctgcagctnattaagtcacagaaatttctgaataagttggtgatcttggtggaaacagagaaggagaagatcctgcggaaggaatatgtttttgctgactccaaaaagagagaaggcttctgccagctcctgcagcagatgaagaacaagcactcagagcagccggagcccgacatgatcaccatcttcatcggcacctggagggtgggcctcttggttccaggctcttgaaatagtgcagccttttcttcctatctctgtggctttcagctctgcttccttggttattaggagaatagatgggtgatgtctttccttatgttgctttttcaacatagcagaattaatgtagggagctaaatccagtggtgtgtgtgaatgcagaagggaatgcaccccacattcccatgatggaagtctgcgtaaccaataaattgtgcctttctcactca

SEQ ID NO: 421317 - DNA, 856 bp, Homo sapiens
cgacaggaagagaaggaaaaaagagaaggcgctgtcccgctcttgctacggtggcctggaggagtggcgaaaccggaacagagaatttatcacttctgggactcacagtcgtgatgtctttcaagagggaaggagacgattggagtcaactcaatgtgctcaaaaaaagaagagtcggggacctcctagccagttacattccagaggatgaggcgctgatgcttcgggatggacgctttgcttgtgccatctgcccccatcgaccggtactggacaccctggccatgctgactgcccaccgtgcaggcaagaaacatctgtccagcttgcagcttttctatggcaagaagcagccgggaaaggaaagaaagcagaatccaaaacatcagaatgaattgagaagggaagaaaccaaagctgaggctcctctgctaactcagacacgacttatcacccagagtgctctgcacagagctccccactataacagttgctgccgccggaagtacagaccagaagcccctggtccctctgtctccctttcccctatgccaccctcagaggtcaaactccaaagtgggaagatcagtagggaacctgaacctgcggctggcccacaggccgaggagtcagcaactgtctcagcccctgcacccatgagccccacaagaagacgagccctggaccattatctcacccttcgaagctctggatggatcccagatggacgaggtcgatgggtaaaagatgaaaatgttgagtttgactctgatgaggaggaaccacctgatctccccttggactgatacccttttcccattcattcacaaataaattacaatgggtgctgagaaaa

SEQ ID NO: 421318 - DNA, 808 bp, Homo sapiens
cgacaggaagagaaggaaaaaagagaaggcgctgtcccgctcttgctacggtggcctggaggagtggcgaaaccggaacagagaatttatcacttctgggactcacagtcgtgatgtctttcaagagggaaggagacgattggagtcaactcaatgtgctcaaaaaaagaagagtcggggacctcctagccagttacattccagaggatgaggcgctgatgcttcgggatggacgctttgcttgtgccatctgcccccatcgaccggtactggacaccctggccatgctgactgcccaccgtgcaggcaagaaacatctgtccagcttgcagcttttctatggcaagaagcagccgggaaaggaaagaaagcagaatccaaaacatcagaatgaattgagaagggaagaaaccaaagctgaggctcctctgctaactcagacacgacttatcacccagagtgctctgcacagagctccccactataacagttgctgccgccggaagtacagagaggtcaaactccaaagtgggaagatcagtagggaacctgaacctgcggctggcccacaggccgaggagtcagcaactgtctcagcccctgcacccatgagccccacaagaagacgagccctggaccattatctcacccttcgaagctctggatggatcccagatggacgaggtcgatgggtaaaagatgaaaatgttgagtttgactctgatgaggaggaaccacctgatctccccttggactgatacccttttcccattcattcacaaataaattacaatgggtgctgagaaaa

SEQ ID NO: 421319 - DNA, 903 bp, Homo sapiens
ttctccattctgtaagctttccgggaacatccaaggcaagactggcacccagcacagcagaaaagaagagtcggggacctcctagccagttacattccagaggatgaggcgctgatgcttcgggatggacgctttgcttgtgccatctgcccccatcgaccggtactggacaccctggccatgctgactgcccaccgtgcaggcaagaaacatctgtccagcttgcagcttttctatggcaagaagcagccgggaaaggaaagaaagcagaatccaaaacatcagaatgaattgagaagggaagaaaccaaagctgaggctcctctgctaactcagacacgacttatcacccagagtgctctgcacagagctccccactataacagttgctgccgccggaagtacagaccagaagcccctggtccctctgtctccctttcccctatgccaccctcagaggtcaaactccaaagtgggaagatcagtagggaacctgaacctgcggctggcccacaggccgaggagtcagcaactgtctcagcccctgcacccatgagccccacaagaagacgagccctggaccattatctcacccttcgaagctctggatggatcccagatggacgaggtcgatgggtaaaagatgaaaatgttgagtttgactctgatgaggaggaaccacctgatctccccttggactgatacccttttcccattcattcacaaataaattacaatgggtgctgagaaaaaaaaaaacaacaacacaaaaacaaaaaaaaacaccaggaggggccaaatattcgggggcggggaaaacaagaaggcatcagacacggcgctgtggtcaaagggcttcagaacgagattttttggcacagcggccaatcaggggacccacag

SEQ ID NO: 421320 - DNA, 891 bp, Homo sapiens
gggcttgggcgcgagtggttaaaagacagttggtgtcggttcggcttctcgggtcggattccgcggtcccaacccttccccatggccgaccctgaggagtggcgaaaccggaacagagaatttatcacttctgggactcacagtcgtgatgtctttcaagagggaaggagacgattggagtcaactcaatgtgctcaaaaaaagaagagtcggggacctcctagccagttacattccagaggatgaggcgctgatgcttcgggatggacgctttgcttgtgccatctgcccccatcgaccggtactggacaccctggccatgctgactgcccaccgtgcaggcaagaaacatctgtccagcttgcagcttttctatggcaagaagcagccgggaaaggaaagaaagcagaatccaaaacatcagaatgaattgagaagggaagaaaccaaagctgaggctcctctgctaactcagacacgacttatcacccagagtgctctgcacagagctccccactataacagttgctgccgccggaagtacagaccagaagcccctggtccctctgtctccctttcccctatgccaccctcagaggtcaaactccaaagtgggaagatcagtagggaacctgaacctgcggctggcccacaggccgaggagtcagcaactgtctcagcccctgcacccatgagccccacaagaagacgagccctggaccattatctcacccttcgaagctctggatggatcccagatggacgaggtcgatgggtaaaagatgaaaatgttgagtttgactctgatgaggaggaaccacctgatctccccttggactgatacccttttcccattcattcacaaataaattacaatgggtgctgagaaaa

SEQ ID NO: 421321 - DNA, 940 bp, Homo sapiens
gggcttgggcgcgagtggttaaaagacagttggtgtcggttcggcttctcgggtcggattccgcggtcccaacccttccccatggccgaccctgaggagtggcgaaaccggaacagagaatttatcacttctgggactcacagtcgtgatgtctttcaagagggaaggagacgattggagtcaactcaatgtgctcaaagtaagcgtgagcggagaggatctggagccgcttcagtcgctccctgaagaaaagaagagtcggggacctcctagccagttacattccagaggatgaggcgctgatgcttcgggatggacgctttgcttgtgccatctgcccccatcgaccggtactggacaccctggccatgctgactgcccaccgtgcaggcaagaaacatctgtccagcttgcagcttttctatggcaagaagcagccgggaaaggaaagaaagcagaatccaaaacatcagaatgaattgagaagggaagaaaccaaagctgaggctcctctgctaactcagacacgacttatcacccagagtgctctgcacagagctccccactataacagttgctgccgccggaagtacagaccagaagcccctggtccctctgtctccctttcccctatgccaccctcagaggtcaaactccaaagtgggaagatcagtagggaacctgaacctgcggctggcccacaggccgaggagtcagcaactgtctcagcccctgcacccatgagccccacaagaagacgagccctggaccattatctcacccttcgaagctctggatggatcccagatggacgaggtcgatgggtaaaagatgaaaatgttgagtttgactctgatgaggaggaaccacctgatctccccttggactgatacccttttcccattcattcacaaataaattacaatgggtgctgagaaaa

SEQ ID NO: 421322 - DNA, 886 bp, Homo sapiens
agtgatcctgcctcctcagcgtcgcgattagctgggtttacaagcgcatgccaccacgcctggcttcaacaaacttttgttattaattaggacagcaggagtacctaggattctttggcggccagtgaggactggaagaagtggagattgggtcaccagggagttgggttttgcaaagactgctaggacagggtgggacctatggcagggacgggcccaaccctcttcccctggaccacttatcctcttctctacccctgctcagctttgcttgtgccatctgcccccatcgaccggtactggacaccctggccatgctgactgcccaccgtgcaggcaagaaacatctgtccagcttgcagcttttctatggcaagaagcagccgggaaaggaaagaaagcagaatccaaaacatcagaatgaattgagaagggaagaaaccaaagctgaggctcctctgctaactcagacacgacttatcacccagagtgctctgcacagagctccccactataacagttgctgccgccggaagtacagaccagaagcccctggtccctctgtctccctttcccctatgccaccctcagaggtcaaactccaaagtgggaagatcagtagggaacctgaacctgcggctggcccacaggccgaggagtcagcaactgtctcagcccctgcacccatgagccccacaagaagacgagccctggaccattatctcacccttcgaagctctggatggatcccagatggacgaggtcgatgggtaaaagatgaaaatgttgagtttgactctgatgaggaggaaccacctgatctccccttggactgatacccttttcccattcattcacaaataaattacaatgggtgctgagaaaa

SEQ ID NO: 421323 - DNA, 1007 bp, Homo sapiens
cgacaggaagagaaggaaaaaagagaaggcgctgtcccgctcttgctacggtggcctggaggagtggcgaaaccggaacagagaatttatcacttctgggactcacagtcgtgatgtctttcaagagggaaggagacgattggagtcaactcaatgtgctcaaaaaaagaagagtcggggacctcctagccagttacattccagaggatgaggcgctgatgcttcgggatggacgctttgcttgtgccatctgcccccatcgaccggtactggacaccctggccatgctgactgcccaccgtgcaggcaagaaacatctgtccagcttgcagcttttctatggcaagaagcagccgggaaaggaaagaaagcagaatccaaaacatcagaatgaattgagaagggaagaaaccaaagctgaggctcctctgctaactcagacacgacttatcacccagagtgctctgcacagagctccccactataacagttgctgccgccggaagtacagaccagaagcccctggtccctctgtctccctttcccctatgccaccctcagaggtcaaactccaaagtgggaagatcagtagggaacctgaacctgcggctggcccacaggccgaggagtcagcaactgtctcagcccctgcacccatgagccccacaagaagacgagccctggaccattatctcacccttcgaagctctggatggatcccagatggacgaggtcgatgggtaaaagatgaaaatgttgagtttgactctgatgaggaggaaccacctgatctccccttggactgatacccttttcccattcattcacaaataaattacaatgggtgctgagaaaaaaaaaaacaacaacacaaaaacaaaaaaaaacaccaggaggggccaaatattcgggggcggggaaaacaagaaggcatcagacacggcgctgtggtcaaagggcttcagaacgagattttttggcacagcggccaatcaggggacccacag

SEQ ID NO: 421324 - DNA, 1107 bp, Homo sapiens
  misc_feature (1107)..(1107): n is a, c, g, or t
cgacaggaagagaaggaaaaaagagaaggcgctgtcccgctcttgctacggtggcctggaggagtggcgaaaccggaacagagaatttatcacttctgggactcacagtcgtgatgtctttcaagagggaaggagacgattggagtcaactcaatgtgctcaaaaaaagaagagtcggggacctcctagccagttacattccagaggatgaggcgctgatgcttcgggatggacgctttgcttgtgccatctgcccccatcgaccggtactggacaccctggccatgctgactgcccaccgtgcaggcaagaaacatctgtccagcttgcagcttttctatggcaagaagcagccgggaaaggaaagaaagcagaatccaaaacatcagaatgaattgagaagggaagaaaccaaagctgaggctcctctgctaactcagacacgacttatcacccagagtgctctgcacagagctccccactataacagttgctgccgccggaagtacagaccagaagcccctggtccctctgtctccctttcccctatgccaccctcagaggtcaaactccaaagtgggaagatcagtagggaacctgaacctgcggctggcccacaggccgaggagtcagcaactgtctcagcccctgcacccatgagccccacaagaagacgagccctggaccattatctcacccttcgaagctctggatggatcccagatggacgaggtcgatgggtaaaagatgaaaatgttgagtttgactctgatgaggaggaaccacctgatctccccttggactgatacccttttcccattcattcacaaataaattacaatgggtgctgagaaaaaaaaaaaccgaccaagaaaaaaagaaaaacaaaagtttcccccacaacaaaaaggtggcgccaataaagaggcctgggctcccacagacggggttgtggcaacctgcacccttggacaggcgccaaaggaccgggggggggggcacacacaggccggtggcgacagaaagcacaaggccccggtgttagaggggaacgaaagggccggaaaatgcccggcgggctcggggcgcccccgttgtgtaaattcn

SEQ ID NO: 421325 - DNA, 1191 bp, Homo sapiens
  misc_feature (1191)..(1191): n is a, c, g, or t
gggcttgggcgcgagtggttaaaagacagttggtgtcggttcggcttctcgggtcggattccgcggtcccaacccttccccatggccgaccctgaggagtggcgaaaccggaacagagaatttatcacttctgggactcacagtcgtgatgtctttcaagagggaaggagacgattggagtcaactcaatgtgctcaaagtaagcgtgagcggagaggatctggagccgcttcagtcgctccctgaagaaaagaagagtcggggacctcctagccagttacattccagaggatgaggcgctgatgcttcgggatggacgctttgcttgtgccatctgcccccatcgaccggtactggacaccctggccatgctgactgcccaccgtgcaggcaagaaacatctgtccagcttgcagcttttctatggcaagaagcagccgggaaaggaaagaaagcagaatccaaaacatcagaatgaattgagaagggaagaaaccaaagctgaggctcctctgctaactcagacacgacttatcacccagagtgctctgcacagagctccccactataacagttgctgccgccggaagtacagaccagaagcccctggtccctctgtctccctttcccctatgccaccctcagaggtcaaactccaaagtgggaagatcagtagggaacctgaacctgcggctggcccacaggccgaggagtcagcaactgtctcagcccctgcacccatgagccccacaagaagacgagccctggaccattatctcacccttcgaagctctggatggatcccagatggacgaggtcgatgggtaaaagatgaaaatgttgagtttgactctgatgaggaggaaccacctgatctccccttggactgatacccttttcccattcattcacaaataaattacaatgggtgctgagaaaaaaaaaaaccgaccaagaaaaaaagaaaaacaaaagtttcccccacaacaaaaaggtggcgccaataaagaggcctgggctcccacagacggggttgtggcaacctgcacccttggacaggcgccaaaggaccgggggggggggcacacacaggccggtggcgacagaaagcacaaggccccggtgttagaggggaacgaaagggccggaaaatgcccggcgggctcggggcgcccccgttgtgtaaattcn

SEQ ID NO: 421326 - DNA, 798 bp, Homo sapiens
cgacaggaagagaaggaaaaaagagaaggcgctgtcccgctcttgctacggtggcctggaggagtggcgaaaccggaacagagaatttatcacttctgggactcacagtcgtgatgtctttcaagagggaaggagacgattggagtcaactcaatgtgctcaaaaaaagaagagtcggggacctcctagccagttacattccagaggatgaggcgctgatgcttcgggatggacgctttgcttgtgccatctgcccccatcgaccggtactggacaccctggccatgctgactgcccaccgtgcaggcaagaaacatctgtccagcttgcagcttttctatggcaagaagcagccgggaaaggaaagaaagcagaatccaaaacatcagaatgaattgagaagggaagaaaccaaagctgaggctcctctgctaactcagacacgacttatcacccagagtgctctgcacagagctccccactataacagttgctgccgccggaagtacagaccagaagcccctggtccctctgtctccctttcccctatgccaccctccaggccgaggagtcagcaactgtctcagcccctgcacccatgagccccacaagaagacgagccctggaccattatctcacccttcgaagctctggatggatcccagatggacgaggtcgatgggtaaaagatgaaaatgttgagtttgactctgatgaggaggaaccacctgatctccccttggactgatacccttttcccattcattcacaaataaattacaatgggtgctgagaaaa

SEQ ID NO: 421327 - DNA, 478 bp, Homo sapiens
aaatcctttgtatgcagaacttattaatatcttgagaaatatagtttaagaagcactgttttaagaggttgggagtcataggagagttggccctttcccttactgcttttacagactattcttctctacctagaccagaagcccctggtccctctgtctccctttcccctatgccaccctcagaggtcaaactccaaagtgggaagatcagtagggaacctgaacctgcggctggcccacaggccgaggagtcagcaactgtctcagcccctgcacccatgagccccacaagaagacgagccctggaccattatctcacccttcgaagctctggatggatcccagatggacgaggtcgatgggtaaaagatgaaaatgttgagtttgactctgatgaggaggaaccacctgatctccccttggactgatacccttttcccattcattcacaaataaattacaatgggtgctgagaaaa

SEQ ID NO: 421328 - DNA, 770 bp, Homo sapiens
cgacaggaagagaaggaaaaaagagaaggcgctgtcccgctcttgctacggtggcctggaggagtggcgaaaccggaacagagaatttatcacttctgggactcacagtcgtgatgtctttcaagagggaaggagacgattggagtcaactcaatgtgctcaaaaaaagaagagtcggggacctcctagccagttacattccagaggatgaggcgctgatgcttcgggatggacgctttgcttgtgccatctgcccccatcgaccggtactggacaccctggccatgctgactgcccaccgtgcaggcaagaaacatctgtccagcttgcagcttttctatggcaagaagcagccgggaaaggaaagaaagcagaatccaaaacatcagaatgaattgagaagggaagaaaccaaagctgaggctcctctgctaactcagacacgacttatcacccagagtgctctgcacagagctccccactataacagttgctgccgccggaagtacagaccagaagcccctggtccctctgtctccctttcccctatgccaccctccccctgcacccatgagccccacaagaagacgagccctggaccattatctcacccttcgaagctctggatggatcccagatggacgaggtcgatgggtaaaagatgaaaatgttgagtttgactctgatgaggaggaaccacctgatctccccttggactgatacccttttcccattcattcacaaataaattacaatgggtgctgagaaaa

SEQ ID NO: 421329 - DNA, 1058 bp, Homo sapiens
  misc_feature (496)..(496): n is a, c, g, or t
  misc_feature (526)..(526): n is a, c, g, or t
  misc_feature (533)..(533): n is a, c, g, or t
  misc_feature (545)..(545): n is a, c, g, or t
  misc_feature (547)..(547): n is a, c, g, or t
  misc_feature (558)..(558): n is a, c, g, or t
  misc_feature (579)..(579): n is a, c, g, or t
  misc_feature (633)..(633): n is a, c, g, or t
  misc_feature (637)..(637): n is a, c, g, or t
  misc_feature (653)..(653): n is a, c, g, or t
  misc_feature (692)..(692): n is a, c, g, or t
  misc_feature (699)..(699): n is a, c, g, or t
  misc_feature (705)..(705): n is a, c, g, or t
  misc_feature (712)..(712): n is a, c, g, or t
  misc_feature (732)..(732): n is a, c, g, or t
  misc_feature (743)..(743): n is a, c, g, or t
  misc_feature (754)..(754): n is a, c, g, or t
  misc_feature (757)..(757): n is a, c, g, or t
  misc_feature (762)..(762): n is a, c, g, or t
  misc_feature (794)..(794): n is a, c, g, or t
  misc_feature (827)..(827): n is a, c, g, or t
  misc_feature (864)..(864): n is a, c, g, or t
  misc_feature (869)..(869): n is a, c, g, or t
  misc_feature (883)..(883): n is a, c, g, or t
  misc_feature (898)..(898): n is a, c, g, or t
  misc_feature (913)..(913): n is a, c, g, or t
  misc_feature (940)..(940): n is a, c, g, or t
  misc_feature (951)..(952): n is a, c, g, or t
  misc_feature (1008)..(1009): n is a, c, g, or t
  misc_feature (1015)..(1015): n is a, c, g, or t
  misc_feature (1018)..(1018): n is a, c, g, or t
  misc_feature (1027)..(1027): n is a, c, g, or t
cgacaggaagagaaggaaaaaagagaaggcgctgtcccgctcttgctacggtggcctggaggagtggcgaaaccggaacagagaatttatcacttctgggactcacagtcgtgatgtctttcaagagggaaggagacgattggagtcaactcaatgtgctcaaaaaaagaagagtcggggacctcctagccagttacattccagaggatgaggcgctgatgcttcgggatggacgctttgcttgtgccatctgcccccatcgaccggtactggacaccctggccatgctgactgcccaccgtgcaggcaagaaacatctgtccagcttgcagcttttctatggcaagaagcagccgggaaaggaaagaaagcagaatccaaaacatcagaatgaattgagaagggaagaaaccaaagctgaggctcctctgctaactcagacacgacttatcacccagagtgctctgcacagagctcccccacctcatgaaacagntttgcctgcccgcccgtggaaggtaccagnacccagnaagcccccctgngntcccctcctgntcctcccccttttcccccctnatgccgcacccctccaggagggtccacaacctcccaaaaggtgggggaaggatncagnttagggggaaccctgnaaaccctgccgggcctgtgcccccaccagagcccggagnggaggtncagccnaacctgnttcttcagccccccctgccnacccccactgnagcccccccancanagganaggaccggagccccctgtggacccattttatnctccaccccctttccggaagccctcctggggantggggatcccccaggaatggggaccggaggggtccgnagtgnggggttaaaaaagnaatggaaaaaattgntttggaggtttttgnacctccttttaatggaggggagggganccccacccctnncactcctccccccttgtggggacctggaataaccacctttttctcccccaattttnnactttncancaaaaattnaaaatttaacaaattggggggttgcctggag

SEQ ID NO: 421330 - DNA, 617 bp, Homo sapiens
cgacaggaagagaaggaaaaaagagaaggcgctgtcccgctcttgctacggtggcctggaggagtggcgaaaccggaacagagaatttatcacttctgggactcacagtcgtgatgtctttcaagagggaaggagacgattggagtcaactcaatgtgctcaaaaaaagaagagtcggggacctcctagccagttacattccagaggatgaggcgctgatgcttcgggatggacgctttgcttgtgccatctgcccccatcgaccggtactggacaccctggccatgctgactgcccaccgtgcaggcaagaaacatctgtccagcttgcagcttttctatggcaagaagcagccgggaaaggaaagaaagcagaatccaaaacatcagaatgaattgagaagggaagaaaccaaagctgaggctcctctgctaactcagacacgacttatcacccagagtgctctgcacagagctccccactataacagttgctgccgccggaagtacagaccagaagcccctggtccctctgtctccctttcccctatgccaccctctggactgatacccttttcccattcattcacaaataaattacaatgggtgctgagaaaa

SEQ ID NO: 421331 - DNA, 923 bp, Homo sapiens
cgacaggaagagaaggaaaaaagagaaggcgctgtcccgctcttgctacggtggcctggaggagtggcgaaaccggaacagagaatttatcacttctgggactcacagtcgtgatgtctttcaagagggaaggagacgattggagtcaactcaatgtgctcaaaaaaagaagagtcggggacctcctagccagttacattccagaggatgaggcgctgatgcttcgggatggacgctttgcttgtgccatctgcccccatcgaccggtactggacaccctggccatgctgactgcccaccgtgcaggcaagaaacatctgtccagcttgcagcttttctatggcaagaagcagccgggaaaggaaagaaagcagaatccaaaacatcagaatgaattgagaagggaagaaaccaaagctgaggctcctctgctaactcagacacgacttatcacccagagtgctctgcacagagctccccactataacagttgctgccgccggaagtacaggtatgggacgggaaagccagaggtaggaaggctcagaaggagacagatggctctaaaagagttttccagtgtgtattctgaggaatactagtgttctggagatgttacttagtgtttcaagaaaaggagaattttggctgggcgcggtgactcacgcctgtaatcccagcacttttggaggctgaggtgggtggatcacttgaggtcaggagttcaagaccagcctggccaacatggtgaaatcctgtctctaccaaaaatgtaaaaaattagctgggtgtgtggtgtgtgcctgtaatcccagctactcaagaggctgaggcaggagaattgcttgaatccgggagacagaggttgcagtgagccacggtcacaccacttcactccagcctgggtgacagagtgagactcc

SEQ ID NO: 421332 - DNA, 750 bp, Homo sapiens
cgacaggaagagaaggaaaaaagagaaggcgctgtcccgctcttgctacggtggcctggaggagtggcgaaaccggaacagagaatttatcacttctgggactcacagtcgtgatgtctttcaagagggaaggagacgattggagtcaactcaatgtgctcaaaaaaagaagagtcggggacctcctagccagttacattccagaggatgaggcgctgatgcttcgggatggacgctttgcttgtgccatctgcccccatcgaccggtactggacaccctggccatgctgactgcccaccgtgcaggcaagaaacatctgtccagcttgcagcttttctatggcaagaagcagccgggaaaggaaagaaagcagaatccaaaacatcagaatgaattgagaagggaagaaaccaaagctgaggctcctctgctaactcagacacgacttatcacccagagtgctctgcacagagctccccactataacagttgctgccgccggaagtacagcaggccgaggagtcagcaactgtctcagcccctgcacccatgagccccacaagaagacgagccctggaccattatctcacccttcgaagctctggatggatcccagatggacgaggtcgatgggtaaaagatgaaaatgttgagtttgactctgatgaggaggaaccacctgatctccccttggactgatacccttttcccattcattcacaaataaattacaatgggtgctgagaaaa

SEQ ID NO: 421333 - DNA, 403 bp, Homo sapiens
ggaaggagacgattggagtcaactcaatgtgctcaaagtaagcgtgagcggagaggatctggagccgcttcagtcgctccctgaaggttgggaaggagctttgtttcattgctctggcaacaactcgggggtgcaggagagaaccaggcgacttagagctgtgtagtgactcctttttcggtctatgatcgctgttctccccagggtccttattccatttcactcctcatttctataatttcacttccacccctctctcctatcccgctgatcccgtccggatttcttcccctactccctgcagaaaagaagagtcggggacctcctagccagttacattccagaggatgaggcgctgatgcttcgggatggacggtaagagcaaggagtggctcaagcctga

SEQ ID NO: 421334 - DNA, 407 bp, Homo sapiens
gttatattttggcaactgtttttaatcttttttcaatccatgtttacgatttgctaaatactttaaaatttaaagcatgggtactaagtccattgtcaagatagcaaatttatcttctgatttgtcttcagctggactgtccacttgttaaaaaattaaatccacccttgctcttccgtcggggagtattgaaaagtatgtgcacagaactgtaggtaatttcaaatttggagtttcaagtgtgtctgagcttcagtgcagcaacgtttgaatcagtgcactcattcccacggtgagatatcggagacagcattcctcctgcatattcactttagtatctgtcacttaataccttacttcaacatagagtataaggttaaatcacatatcctgagtaaatattttcc

SEQ ID NO: 421335 - DNA, 2355 bp, Homo sapiens
  misc_feature (2253)..(2253): n is a, c, g, or t
cgtcccgcgccagtcctcccgctttggtcccgccctgaggctcggcccggctcccccgccccggatttgaaatctaggtcttcctgagagtccgcgggcttccgctcccagcgcgggattctggagggaaattgagggagacttggaaaccgcgccaggcccaacgggtacctagaagggagacaaagccaggcctgctgcccagtttgagctctgggaagaagaggagcaggccgggacgcccaccgaggtatcccagaggtgacagaacttgatctgggcctggaaggggaagaattcgggaaaagcaacgtggggcattccagtagtaattgatagaaatattacgtgggataggatttattctctccacacttctgaaccaatgaatagaaaatgggaagcaaaactgaagcaaattgaagaacgagcatctcattatgagaggaaaccgttgtcctcagtgtatagaccaagattgtccaagccagaagaaccaccctccatctggagactatttcatcgacaagctcaagcttttaattttgttaaaagctgtaaagaagacgttcatgtatttgctttggaatgcaaagtaggagatggacaacgtatttaccttgtgacaacctatgctgaattttggttttactataaatccagaaaaaatctcttacactgctatgaagttattcctgaaaatgctgtgtgcaagctttattttgatttggaatttaacaaacctgccaacccaggagctgatgggaaaaagatggttgcattactcattgagtatgtgtgtaaagcacttcaagagttatacggtgttaattgctcagctgaagatgttttgaacttggattctagcactgatgaaaaattcagccggcatttaatatttcagctccatgatgtggcatttaaagataatattcatgttggtaattttttgagaaaaattttgcagcctgctcttgacttgcttggcagtgaagatgatgatagcgctccagagacaacaggccatggatttccccatttttcagaagcacctgcaagacaaggattttctttcaataaaatgttcacagaaaaggctacagaggaaagctggacatcgaattcaaagaaactggagaggctggggtcagctgagcaaagcagtcctgacctttcatttctagttgtgaagaataacatgggagagaagcatctttttgtagatctcggagtttatacaagaaatagaaactttcggctatataaatcatcaaaaattggaaagcgtgtggctttggaggttactgaagataacaaattttttcctatacagtcaaaagatgtttctgacgaatatcaatattttctctcttctttggtcagcaatgtcaggttctcagatactttacgaattcttacatgtgagccatctcagaataaacaaaaaggagttggatattttaacagtatcggcacttcagtagaaaccattgaaggttttcagtgttctccctatcctgaagttgatcattttgttctttctttggtgaataaagatggcattaaaggaggaattcggcgttggaactactttttcccagaagaattactggtttatgatatttgtaaatatcggtggtgtgaaaacattggaagagcccataagagtaataatataatgattctggttgatctgaaaaatgaagtttggtatcaaaaatgtcatgaccctgtatgtaaagcagaaaacttcaaatctgactgtttcccattacctgctgaagtatgtctcctgtttcttttcaaagaggaagaagagtttacaacagatgaagcagatgaaactaggagcaatgaaacccagaatcctcataaaccatcacctagcaggctgtcaacaggtgcatctgctgatgctgtctgggataatggcattgatgatgcttattttttagaagctactgaagatgctgaattagctgaagctgcagagaacagtcttctcagttataacagtgaagtggatgaaattcctgatgaactaattatagaagtattacaagagtaactaattcactatgaacacttttgtcaccaggctataatttgcctgatgtctgtgagatttgataaatatatcattcaacctgtttatataaactaagttttattactttgctttccaatttttgttttttacttctgtaaaccaatttcattaaaaattagctttggtgtaaaaaaaaataaatntattaaaataaaccattgttgggccgctttggcccacaatgactttataacttgacccttttgccattcggccccaatttaagcctaacttgggccttcccc

SEQ ID NO: 421336 - DNA, 2225 bp, Homo sapiens
  misc_feature (2123)..(2123): n is a, c, g, or t
cgtcccgcgccagtcctcccgctttggtcccgccctgaggctcggcccggctcccccgccccggatttgaaatctaggtcttcctgagagtccgcgggcttccgctcccagcgcgggattctggagggaaattgagggagacttggaaaccgcgccaggcccaacgggtacctagaagggagacaaagccaggcctgctgcccagtttgagctctgggaagaagaggagcaggccgggacgcccaccgaggtatcccagaggtgacagaacttgatctgggcctggaaggggaagaattcgggaaaagcaacgtggggcattccagtagtaattgatagaaatattacgtgggataggatttattctctccacacttctgaaccaatgaatagaaaatgggaagcaaaactgaagcaaattgaagaacgagcatctcattatgagaggaaaccgttgtcctcagtgtatagaccaagattgtccaagccagaagaaccaccctccatctggagactatttcatcgacaagctcaagcttttaattttgttaaaagctgtaaagaagacgttcatgtatttgctttggaatgcaaagtaggagatggacaacgtatttaccttgtgacaacctatgctgaattttggttttactataaatccagtatgtgtgtaaagcacttcaagagttatacggtgttaattgctcagctgaagatgttttgaacttggattctagcactgatgaaaaattcagccggcatttaatatttcagctccatgatgtggcatttaaagataatattcatgttggtaattttttgagaaaaattttgcagcctgctcttgacttgcttggcagtgaagatgatgatagcgctccagagacaacaggccatggatttccccatttttcagaagcacctgcaagacaaggattttctttcaataaaatgttcacagaaaaggctacagaggaaagctggacatcgaattcaaagaaactggagaggctggggtcagctgagcaaagcagtcctgacctttcatttctagttgtgaagaataacatgggagagaagcatctttttgtagatctcggagtttatacaagaaatagaaactttcggctatataaatcatcaaaaattggaaagcgtgtggctttggaggttactgaagataacaaattttttcctatacagtcaaaagatgtttctgacgaatatcaatattttctctcttctttggtcagcaatgtcaggttctcagatactttacgaattcttacatgtgagccatctcagaataaacaaaaaggagttggatattttaacagtatcggcacttcagtagaaaccattgaaggttttcagtgttctccctatcctgaagttgatcattttgttctttctttggtgaataaagatggcattaaaggaggaattcggcgttggaactactttttcccagaagaattactggtttatgatatttgtaaatatcggtggtgtgaaaacattggaagagcccataagagtaataatataatgattctggttgatctgaaaaatgaagtttggtatcaaaaatgtcatgaccctgtatgtaaagcagaaaacttcaaatctgactgtttcccattacctgctgaagtatgtctcctgtttcttttcaaagaggaagaagagtttacaacagatgaagcagatgaaactaggagcaatgaaacccagaatcctcataaaccatcacctagcaggctgtcaacaggtgcatctgctgatgctgtctgggataatggcattgatgatgcttattttttagaagctactgaagatgctgaattagctgaagctgcagagaacagtcttctcagttataacagtgaagtggatgaaattcctgatgaactaattatagaagtattacaagagtaactaattcactatgaacacttttgtcaccaggctataatttgcctgatgtctgtgagatttgataaatatatcattcaacctgtttatataaactaagttttattactttgctttccaatttttgttttttacttctgtaaaccaatttcattaaaaattagctttggtgtaaaaaaaaataaatntattaaaataaaccattgttgggccgctttggcccacaatgactttataacttgacccttttgccattcggccccaatttaagcctaacttgggccttcccc

SEQ ID NO: 421337 - DNA, 2116 bp, Homo sapiens
  misc_feature (2014)..(2014): n is a, c, g, or t
cgtcccgcgccagtcctcccgctttggtcccgccctgaggctcggcccggctcccccgccccggatttgaaatctaggtcttcctgagagtccgcgggcttccgctcccagcgcgggattctggagggaaattgagggagacttggaaaccgcgccaggcccaacgggtacctagaagggagacaaagccaggcctgctgcccagtttgagctctgggaagaagaggagcaggccgggacgcccaccgaggtatcccagaggtgacagaacttgatctgggcctggaaggggaagaattcgggaaaagcaacgtggggcattccaggacgttcatgtatttgctttggaatgcaaagtaggagatggacaacgtatttaccttgtgacaacctatgctgaattttggttttactataaatccagaaaaaatctcttacactgctatgaagttattcctgaaaatgctgtgtgcaagctttattttgatttggaatttaacaaacctgccaacccaggagctgatgggaaaaagatggttgcattactcattgagtatgtgtgtaaagcacttcaagagttatacggtgttaattgctcagctgaagatgttttgaacttggattctagcactgatgaaaaattcagccggcatttaatatttcagctccatgatgtggcatttaaagataatattcatgttggtaattttttgagaaaaattttgcagcctgctcttgacttgcttggcagtgaagatgatgatagcgctccagagacaacaggccatggatttccccatttttcagaagcacctgcaagacaaggattttctttcaataaaatgttcacagaaaaggctacagaggaaagctggacatcgaattcaaagaaactggagaggctggggtcagctgagcaaagcagtcctgacctttcatttctagttgtgaagaataacatgggagagaagcatctttttgtagatctcggagtttatacaagaaatagaaactttcggctatataaatcatcaaaaattggaaagcgtgtggctttggaggttactgaagataacaaattttttcctatacagtcaaaagatgtttctgacgaatatcaatattttctctcttctttggtcagcaatgtcaggttctcagatactttacgaattcttacatgtgagccatctcagaataaacaaaaaggagttggatattttaacagtatcggcacttcagtagaaaccattgaaggttttcagtgttctccctatcctgaagttgatcattttgttctttctttggtgaataaagatggcattaaaggaggaattcggcgttggaactactttttcccagaagaattactggtttatgatatttgtaaatatcggtggtgtgaaaacattggaagagcccataagagtaataatataatgattctggttgatctgaaaaatgaagtttggtatcaaaaatgtcatgaccctgtatgtaaagcagaaaacttcaaatctgactgtttcccattacctgctgaagtatgtctcctgtttcttttcaaagaggaagaagagtttacaacagatgaagcagatgaaactaggagcaatgaaacccagaatcctcataaaccatcacctagcaggctgtcaacaggtgcatctgctgatgctgtctgggataatggcattgatgatgcttattttttagaagctactgaagatgctgaattagctgaagctgcagagaacagtcttctcagttataacagtgaagtggatgaaattcctgatgaactaattatagaagtattacaagagtaactaattcactatgaacacttttgtcaccaggctataatttgcctgatgtctgtgagatttgataaatatatcattcaacctgtttatataaactaagttttattactttgctttccaatttttgttttttacttctgtaaaccaatttcattaaaaattagctttggtgtaaaaaaaaataaatntattaaaataaaccattgttgggccgctttggcccacaatgactttataacttgacccttttgccattcggccccaatttaagcctaacttgggccttcccc

SEQ ID NO: 421338 - DNA, 2077 bp, Homo sapiens
  misc_feature (1975)..(1975): n is a, c, g, or t
cgtcccgcgccagtcctcccgctttggtcccgccctgaggctcggcccggctcccccgccccggatttgaaatctaggtcttcctgagagtccgcgggcttccgctcccagcgcgggattctggagggaaattgagggagacttggaaaccgcgccaggcccaacgggtacctagaagggagacaaagccaggcctgctgcccagtttgagctctgggaagaagaggagcaggccgggacgcccaccgaggtatcccagaggtgacagaacttgatctgggcctggaaggggaagaattcgggaaaagcaacgtggggcattccagtagtaattgatagaaatattacgtgggataggatttattctctccacacttctgaaccaatgaatagaaaatgggaagcaaaactgaagcaaattgaagaacgagcatctcattatgagaggaaaccgttgtcctcagtgtatagaccaagattgtccaagccagaagaaccaccctccatctggagactatttcatcgacaagctcaagcttttaattttgttaaaagctgtaaagaagacgttcatgtatttgctttggaatgcaaagtaggagatggacaacgtatttaccttgtgacaacctatgctgaattttggttttactataaatccaggtaattttttgagaaaaattttgcagcctgctcttgacttgcttggcagtgaagatgatgatagcgctccagagacaacaggccatggatttccccatttttcagaagcacctgcaagacaaggattttctttcaataaaatgttcacagaaaaggctacagaggaaagctggacatcgaattcaaagaaactggagaggctggggtcagctgagcaaagcagtcctgacctttcatttctagttgtgaagaataacatgggagagaagcatctttttgtagatctcggagtttatacaagaaatagaaactttcggctatataaatcatcaaaaattggaaagcgtgtggctttggaggttactgaagataacaaattttttcctatacagtcaaaagatgtttctgacgaatatcaatattttctctcttctttggtcagcaatgtcaggttctcagatactttacgaattcttacatgtgagccatctcagaataaacaaaaaggagttggatattttaacagtatcggcacttcagtagaaaccattgaaggttttcagtgttctccctatcctgaagttgatcattttgttctttctttggtgaataaagatggcattaaaggaggaattcggcgttggaactactttttcccagaagaattactggtttatgatatttgtaaatatcggtggtgtgaaaacattggaagagcccataagagtaataatataatgattctggttgatctgaaaaatgaagtttggtatcaaaaatgtcatgaccctgtatgtaaagcagaaaacttcaaatctgactgtttcccattacctgctgaagtatgtctcctgtttcttttcaaagaggaagaagagtttacaacagatgaagcagatgaaactaggagcaatgaaacccagaatcctcataaaccatcacctagcaggctgtcaacaggtgcatctgctgatgctgtctgggataatggcattgatgatgcttattttttagaagctactgaagatgctgaattagctgaagctgcagagaacagtcttctcagttataacagtgaagtggatgaaattcctgatgaactaattatagaagtattacaagagtaactaattcactatgaacacttttgtcaccaggctataatttgcctgatgtctgtgagatttgataaatatatcattcaacctgtttatataaactaagttttattactttgctttccaatttttgttttttacttctgtaaaccaatttcattaaaaattagctttggtgtaaaaaaaaataaatntattaaaataaaccattgttgggccgctttggcccacaatgactttataacttgacccttttgccattcggccccaatttaagcctaacttgggccttcccc

SEQ ID NO: 421339 - DNA, 2266 bp, Homo sapiens
  misc_feature (2164)..(2164): n is a, c, g, or t
cgtcccgcgccagtcctcccgctttggtcccgccctgaggctcggcccggctcccccgccccggatttgaaatctaggtcttcctgagagtccgcgggcttccgctcccagcgcgggattctggagggaaattgagggagacttggaaaccgcgccaggcccaacgggtacctagaagggagacaaagccaggcctgctgcccagtttgagctctgggaagaagaggagcaggccgggacgcccaccgaggtatcccagaggtgacagaacttgatctgggcctggaaggggaagaattcgggaaaagcaacgtggggcattccagtagtaattgatagaaatattacgtgggataggatttattctctccacacttctgaaccaatgaatagaaaatgggaagcaaaactgaagcaaattgaagaacgagcatctcattatgagaggaaaccgttgtcctcagtgtatagaccaagattgtccaagccagaagaaccaccctccatctggagactatttcatcgacaagctcaagcttttaattttgttaaaagctgtaaagaagacgttcatgtatttgctttggaatgcaaagtaggagatggacaacgtatttaccttgtgacaacctatgctgaattttggttttactataaatccagaaaaaatctcttacactgctatgaagttattcctgaaaatgctgtgtgcaagctttattttgatttggaatttaacaaacctgccaacccaggagctgatgggaaaaagatggttgcattactcattgagtatgtgtgtaaagcacttcaagagttatacggtgttaattgctcagctgaagatgttttgaacttggattctagcactgatgaaaaattcagccggcatttaatatttcagctccatgatgtggcatttaaagataatattcatgttggtaattttttgagaaaaattttgcagcctgctcttgacttgcttggcagtgaagatgatgatagcgctccagagacaacaggccatggatttccccatttttcagaagcacctgcaagacaaggattttctttcaataaaatgttcacagaaaaggctacagaggaaagctggacatcgaattcaaagaaactggagaggctggggtcagctgagcaaagcagtcctgacctttcatttctagttgtgaagaataacatgggagagaagcatctttttgtagatctcggagtttatacaagaaatagaaactttcggctatataaatcatcaaaaattggaaagcgtgtggctttggaggttactgaagataacaaattttttcctatacagtcaaaagatgtttctgacgaatatcaatattttctctcttctttggtcagcaatgtcagtagaaaccattgaaggttttcagtgttctccctatcctgaagttgatcattttgttctttctttggtgaataaagatggcattaaaggaggaattcggcgttggaactactttttcccagaagaattactggtttatgatatttgtaaatatcggtggtgtgaaaacattggaagagcccataagagtaataatataatgattctggttgatctgaaaaatgaagtttggtatcaaaaatgtcatgaccctgtatgtaaagcagaaaacttcaaatctgactgtttcccattacctgctgaagtatgtctcctgtttcttttcaaagaggaagaagagtttacaacagatgaagcagatgaaactaggagcaatgaaacccagaatcctcataaaccatcacctagcaggctgtcaacaggtgcatctgctgatgctgtctgggataatggcattgatgatgcttattttttagaagctactgaagatgctgaattagctgaagctgcagagaacagtcttctcagttataacagtgaagtggatgaaattcctgatgaactaattatagaagtattacaagagtaactaattcactatgaacacttttgtcaccaggctataatttgcctgatgtctgtgagatttgataaatatatcattcaacctgtttatataaactaagttttattactttgctttccaatttttgttttttacttctgtaaaccaatttcattaaaaattagctttggtgtaaaaaaaaataaatntattaaaataaaccattgttgggccgctttggcccacaatgactttataacttgacccttttgccattcggccccaatttaagcctaacttgggccttcccc

SEQ ID NO: 421340 - DNA, 654 bp, Homo sapiens
  misc_feature (552)..(552): n is a, c, g, or t
ttacaccaaagctgatttttaatgaaattggtttacagaagtaaaaaacttcaaatctgactgtttcccattacctgctgaagtatgtctcctgtttcttttcaaagaggaagaagagtttacaacagatgaagcagatgaaactaggagcaatgaaacccagaatcctcataaaccatcacctagcaggctgtcaacaggtgcatctgctgatgctgtctgggataatggcattgatgatgcttattttttagaagctactgaagatgctgaattagctgaagctgcagagaacagtcttctcagttataacagtgaagtggatgaaattcctgatgaactaattatagaagtattacaagagtaactaattcactatgaacacttttgtcaccaggctataatttgcctgatgtctgtgagatttgataaatatatcattcaacctgtttatataaactaagttttattactttgctttccaatttttgttttttacttctgtaaaccaatttcattaaaaattagctttggtgtaaaaaaaaataaatntattaaaataaaccattgttgggccgctttggcccacaatgactttataacttgacccttttgccattcggccccaatttaagcctaacttgggccttcccc

SEQ ID NO: 421341 - DNA, 348 bp, Homo sapiens
atttatcttcaagctaagtatataaagtactcaagatgatattgattcccatttttcagttgattaaactaagattcagggcgcttcattaacctgtccaaggtcataataccattagatgaagaaccaggatctaagaatttctgataaccagccttgctctcattctgtggtaaaacttcatgcaaagaataaacaagaaaataagtgtcaggaagtgagttttgaaactttatcaaacaaaatatattctaaacaaagaaattaatggcctttttgtttgttgtttgttttagttagtaattgatagaaatattacgtgggataggatttattctctccacactt

SEQ ID NO: 421342 - DNA, 2086 bp, Homo sapiens
cgtcccgcgccagtcctcccgctttggtcccgccctgaggctcggcccggctcccccgccccggatttgaaatctaggtcttcctgagagtccgcgggcttccgctcccagcgcgggattctggagggaaattgagggagacttggaaaccgcgccaggcccaacgggtacctagaagggagacaaagccaggcctgctgcccagtttgagctctgggaagaagaggagcaggccgggacgcccaccgaggtatcccagaggtgacagaacttgatctgggcctggaaggggaagaattcgggaaaagcaacgtggggcattccagtagtaattgatagaaatattacgtgggataggatttattctctccacacttctgaaccaatgaatagaaaatgggaagcaaaactgaagcaaattgaagaacgagcatctcattatgagaggaaaccgttgtcctcagtgtatagaccaagattgtccaagccagaagaaccaccctccatctggagactatttcatcgacaagctcaagcttttaattttgttaaaagctgtaaagaagacgttcatgtatttgctttggaatgcaaagtaggagatggacaacgtatttaccttgtgacaacctatgctgaattttggttttactataaatccagaaaaaatctcttacactgctatgaagttattcctgaaaatgctgtgtgcaagctttattttgatttggaatttaacaaacctgccaacccaggagctgatgggaaaaagatggttgcattactcattgagtatgtgtgtaaagcacttcaagagttatacggtgttaattgctcagctgaagatgttttgaacttggattctagcactgatgaaaaattcagccggcatttaatatttcagctccatgatgtggcatttaaagataatattcatgttggtaattttttgagaaaaattttgcagcctgctcttgacttgcttggcagtgaagatgatgatagcgctccagagacaacaggccatggatttccccatttttcagaagcacctgcaagacaaggattttctttcaataaaatgttcacagaaaaggctacagaggaaagctggacatcgaattcaaagaaactggagaggctggggtcagctgagcaaagcagtcctgacctttcatttctagttgtgaagaataacatgggagagaagcatctttttgtagatctcggagtttatacaagaaatagaaactttcggctatataaatcatcaaaaattggaaagcgtgtggctttggaggttactgaagataacaaattttttcctatacagtcaaaagatgtttctgacgaatatcaatattttctctcttctttggtcagcaatgtcaggttctcagatactttacgaattcttacatgtgagccatctcagaataaacaaaaaggagttggatattttaacagtatcggcacttcagtagaaaccattgaaggttttcagtgttctccctatcctgaagttgatcattttgttctttctttggtgaataaagatggcattaaaggaggaattcggcgttggaactactttttcccagaagaattactggtttatgatatttgtaaatatcggtggtgtgaaaacattggaagagcccataagagtaataatataatgattctggttgatctgaaaaatgaagtttggtatcaaaaatgtcatgaccctgtatgtaaagcagaaaacttcaaatctgactgtttcccattacctgctgaagtatgtctcctgtttcttttcaaagagctggactgtccacttgttaaaaaattaaatccacccttgctcttccgtcggggagtattgaaaagtatgtgcacagaactgtaggtaatttcaaatttggagtttcaagtgtgtctgagcttcagtgcagcaacgtttgaatcagtgcactcattcccacggtgagatatcggagacagcattcctcctgcatattcactttagtatctgtcacttaataccttacttcaacatagagtataaggttaaatcacatatcctgagtaaatattttcc

SEQ ID NO: 421343 - DNA, 6377 bp, Homo sapiens
ggaaaaaaaaggcgtgagacatcaggttgtcattttttattgtgagattctgctcctaaagataataaatgggggattacgggtttggagtgctagtgcaaagcaatactgggaataaatctgcttttccagtcagattccatccacatctgcagcctccacaccatcaccaaaatgccacccccagccctgctgcttttataaataataacacagctgccaatggcagcagtgctgggtcagcttggctttttcctgctccagctacccataacattcaggatgagatcttggggtcagaaaaagcaaaaagtcagcaacaggaacagcaagaccccttagaaaagcagcagctttccccaagtccaggtcaggaagctggaatactgcctgaaacagagaaggcaaaatcagaagaaaatcaaggggacaattcttcggaaaatggcaatgggaaggagaaaataaggatcgaatctccagtgttgacagggtttgattatcaagaagccactgggctaggtacttcaacccaacccttgacatctagcgcatcgtctcttactggtttcagtaactggtcagcagcgatagcgccttcctcctctacaataatcaatgaagatgcaagtttctttcaccagggaggggtccctgctgcttcggctaataacggtgctctgttgtttcaaaatttcccccatcatgtcagccctggctttggaggcagcttctctcctcagatcgggcctctctcacagcaccacccacatcaccctcatttccagcatcatcacagccagcatcagcagcaaaggaggtctcctgccagtccccatcccccacccttcacacatagaaatgctgcttttaaccagctgcctcatttggcgaataatcttaacaaacccccctctccgtggagcagctaccagagtccgtcaccaacaccctcctcttcctggagcccgggcggtggtggatatggtggctggggaggttcccaaggccgagatcaccgcagagggctgaatggtggaataacgcccctgaactccatctcgcctttgaagaaaaattttgcaagcaatcatattcagctccagaagtatgctcgccccagctctgcctttgcacctaaatcctggatggaagatagcttgaacagggctgacaacatttttccttttccggatcgccccaggacattcgacatgcactcactggagagttcactcattgacataatgagagctgaaaatgataccattaaagcaaggacatatgggcgaaggagaggtcagtcttcactgtttccaatggaagatggattcttggatgatggccgtggggatcagcctcttcatagtggcctgggttcacctcactgcttcagtcaccagaatggggaaagagtggaacgatattctcgaaaggtgtttgtaggcggattgcctccagacattgatgaagatgagatcacagctagttttcgtcgctttggccctctgattgtggattggcctcataaagctgagagcaaatcctattttcctcctaaaggctatgcattcctgctgtttcaagatgaaagctctgtgcaggctctcattgatgcatgcattgaagaagatggaaaactctacctttgtgtatcaagtcccactatcaaggataagccagtccagattcggccttggaatctcagtgacagtgactttgtgatggatggttcacagccacttgacccacgaaaaactatatttgttggtggtgttcctcgaccattacgagctgtggagcttgcgatgataatggatcggctatatggaggtgtgtgctacgctgggattgataccgaccctgagctaaaatacccaaaaggagctgggagagttgcgttctctaatcaacagagttacatagctgctatcagtgcccgctttgttcagctgcagcatggagagatagataaacgggtggaagttaagccatatgtcttggatgatcagctgtgtgatgaatgtcagggggcccgttgtggggggaaatttgctccatttttctgtgctaatgttacctgtctgcagtattactgtgaatattgctgggctgctatccattctcgtgctggcagggaattccacaagcccctggtgaaggaaggcggtgaccgccctcggcatatttcattccgctggaactaaaggataactgcagtgctcattttcaggcctcagaataagtgcactcttctgttcattctgaccccttcctcaacctcttcacgctggcatgtccttttgtagcagtctgtaacttaactatagtataatgaaaagaatgacctataatataggtgttttgtagattcttgtgtcactgcaaacaatatgaactcctttttcgtattgccatcgggttgcatggaagttttattctcttgttttgctggaaaccaagaggatccaaacttcctgcaacattttcttagaggagagagagaaatattaaaagagaaatgaaacaatagagtattttgggtttttaattaaattattgttaataatataacatataagaatacttttattaaaataaccatgcaacaataacactatcggtctatctgacagtttttcccccagggaagtgcttttgccttttcctttcttttttttttttttttcatcttttttgtctctctcttttttccatccctttttaatttttttaacagcaatggaggaagttaacaatttttaatggaaagagcatgttagagcaaacaaatgcataagcaagactgagcagcattataattaattttcagggttttgaggctgaacataatttcattatccctcaaaaagttaccaccacatcagaaaaaataaaaaaaaaatagtaaagtaggcagagctaggtttattttctcttaaacaatttttaaaattcagaatgtaaaaattgggtaaatttactactgaggggagtgcacttatttatttaacttacttatctggtcaaagccccaggaaacctaccaaagctagaattaatgacaactggtgggaaacctagcatttcctctcctgaagaataaatgtataaatgttatttttgatgtttatatataaactctatatcctaatttactaatactcatcagatgtcagcctttgctctccattttgacgttaaaaaacaacaacagatctagagatacctcaaggatatcatttttgattttgtgttacagtacacttgtagccaaaactggaagacaaaaccaatatataatttggctgctgattggcttacttttagatttaaagttactttgggtatcctgtaatttagttgtaacatagaaaatgaaaaaacagttaaaaaaagtgaagtagttgcaaagtgttttgcactgttgaactaagtaactgtgtaaatctgtgcaaaggtacgtatgtttatcttactcttcctataaactaaaataacattacagtttccgaatttagcatgggacatagtcagtgtttgaagtgccaacttcatcaagtaatgcatgctttattataaataaaattctagctttgaaaggcgttatgtgttgaacagtatgcttcaggggtaaatttaaaatagtctcttgaagccctagtcatggaagtaacttttattttaattgacattctcttattaaatgccctatccatcattaaaaggtttattatcagtgggcaaaacatgaaataatatgatcgaatggcaatcttgctagttgcgctacctaacagtaccatcttggatccttcaaaaccaaagacttgccccagcactgctgtggaaccacctggcttatgacccctatggatgatctttaggaaaagcagccctttacttttaatacaggctttaatgaactatacctgttaagttccaaaggtcaaaatggaggcatttgctgtctaatattcaaacatagaaagggagctgcttttaaagaattccctgcaaatactgaaagcagtcatgcgaatggagggtgctcttgtgtagctggtcagggacttttttttcttttctcctgaactacatgattctaattggaatgttcatttgcctctttttactcttttaaatgcttgtaggtggcttggggtgtgctatcgtgctgttcctactcagtaaacaggtgtgatgagttaacaagaaataacactgtttgagaactagctttgaataataatttttccctttgtacatgacctgctgaatttcggtacagtgtttttgtagctaacttattttgtcatgcacataatgtatatttgttatgcactacttttgtatatcttgtttttccaacagtgaacatttttaggcacacttttcactgacgggatatctctttatgcaatacctcaatttttcatattgcaaagagtagctttttgtacttttattactgagagatcttcatatacttcattttttaatataaataattttaataaattttattttcttatattctgctttttatacatttcagtgctctgcatacattttaaattatgaatgtcgtgcactggcaatgctattttagagtctgcagagaagagaaagcatgttgcttaaacatccttccccagcaccagctattggtgtacctataatttaagaaatagtctatgtaaagtcacaaattaatgaaaaaaattcgcatgaaaatgacagataacactgtagttcctaaaaaaaaaattaaatgcataagcataaggtagaaattaaaataacaaaattgtctacagcttcttactaagtttttaaaattattcataaaatgcagacatttttggtgaatgtttagccatttttaatattaataaattgatgttaagtgtttgattcagagatgtctgctcttttaaattatatataaggaaaaaaaatagcctgccttgggacaggtgtgtaatgttagtgtgcatgactaatgtaagaaattgttattctactaatatttacttgtgattgtgtgacaagtgtgtttacagattattggttacacttcaatttacagggcataaacaatgattatctattactctgaactttatgattacatgttcttcagattacatgggattgtagttgggagttaccatgtaactcaaacataattaacatgtaattagtttacagattgtagggcatcacttcaattcaccaagcatgtagttctagcgcactagcatggcgccagccatgtacttacaatgtagttacagagtaattacatggtgatttttgcaatgtaaaataaagtgtttctgattattttctatgtaaaggaaccctctcctttccccttctggtccctgcgctttggtataatatatatacttctccatacacagacctctgcagaatgcaaaataaaacttgcagtgaatgaatttagcattttatgagagtgctgttggaaagacttgataattcaccccttttgttttgaagagttgaatcttctgttaaaaggtgatttaaaacttgaatgtgatgaattgtggcaagttaacttcaagttatgtgcaatacttatttcaaacttttgaaagatctttgcagtgtaattctttgtttttaattgcagacatttaaaaatgtcattttctactgttaagagtaatcctctttcttgctggtgtttctaaagaaaagaatcagaaatcaatctttctactaatgtaaatttgagattatttttaaaaatggaataaaagaggttttggtcatttgctttattttattattttaaagctactgtgattgatagcattgtaagaatcgggacaatattgtattcaactgttttattttttatatttttaaaatttaaagtataattagtttttataattttcatcagatttttgttatattttttggaagtgaaacttttagcaagtgggtgtctagtttttactaatccctaattttttttccagtgtattgctcatattatcagaaggaaaagttatttaagtatgtcagttaattgtactacttggctgaatttccatatagtttttactgtgtatggggaggttgtagtatttattatagcattttaaataagggtaattcattttttattaaagtcattttcacgttaagttcctatttttgtatgttctactcttaagttatataacacagttccttttttaaaagagttcatttgttgaagtgctagtgaaaaattaatgttattaaatagtttgcaaatgactatttataccagtatgcatataatttttaaatatttgtaatgtgagatgttgaatgaataaaacttttaactc

SEQ ID NO: 421344 - DNA, 1532 bp, Homo sapiens
ggaaaaaaaaggcgtgagacatcaggttgtcattttttattgtgagattctgctcctaaagataataaatgggggattacgggtttggagtgctagtgcaaagcaatactgggaataaatctgcttttccagtcagattccatccacatctgcagcctccacaccatcaccaaaatgccacccccagccctgctgcttttataaataataacacagctgccaatggcagcagtgctgggtcagcttggctttttcctgctccagctacccataacattcaggatgagatcttggggtcagaaaaagcaaaaagtcagcaacaggaacagcaagaccccttagaaaagcagcagctttccccaagtccaggtcaggaagctggaatactgcctgaaacagagaaggcaaaatcagaagaaaatcaaggggacaattcttcggaaaatggcaatgggaaggagaaaataaggatcgaatctccagtgttgacagggtttgattatcaagaagccactgggctaggtacttcaacccaacccttgacatctagcgcatcgtctcttactggtttcagtaactggtcagcagcgatagcgccttcctcctctacaataatcaatgaagatgcaagtttctttcaccagggaggggtccctgctgcttcggctaataacggtgctctgttgtttcaaaatttcccccatcatgtcagccctggctttggaggcagcttctctcctcagatcgggcctctctcacagcaccacccacatcaccctcatttccagcatcatcacagccagcatcagcagcaaaggaggtctcctgccagtccccatcccccacccttcacacatagaaatgctgcttttaaccagctgcctcatttggcgaataatcttaacaaacccccctctccgtggagcagctaccagagtccgtcaccaacaccctcctcttcctggagcccgggcggtggtggatatggtggctggggaggttcccaaggccgagatcaccgcagagggctgaatggtggaataacgcccctgaactccatctcgcctttgaagaaaaattttgcaagcaatcatattcagctccagaagtatgctcgccccagctctgcctttgcacctaaatcctggatggaagatagcttgaacagggctgacaacatttttccttttccggatcgccccaggacattcgacatgcactcactggagagttcactcattgacataatgagagctgaaaatgataccattaaaggtaagtttagaaatatacccaattgatttcagacaatagttttaaatgtgtattaactatttaatctgatacacagtatggcaaatattatggagtcactttgtatgcagtaagttctatcaattttacacatatacctcttgttgttaaaaaatccaacatacttgatgaacctctatagtggagccatcgtgataccaggtaagagtactacgtgagtactaattgccaagaatgggcaattatctcaaagacac

SEQ ID NO: 421345 - DNA, 1807 bp, Homo sapiens
ggaaaaaaaaggcgtgagacatcaggttgtcattttttattgtgagattctgctcctaaagataataaatgggggattacgggtttggagtgctagtgcaaagcaatactgggaataaatctgcttttccagtcagattccatccacatctgcagcctccacaccatcaccaaaatgccacccccagccctgctgcttttataaataataacacagctgccaatggcagcagtgctgggtcagcttggctttttcctgctccagctacccataacattcaggatgagatcttggggtcagaaaaagcaaaaagtcagcaacaggaacagcaagaccccttagaaaagcagcagctttccccaagtccaggtcaggaagctggaatactgcctgaaacagagaaggcaaaatcagaagaaaatcaaggggacaattcttcggaaaatggcaatgggaaggagaaaataaggatcgaatctccagtgttgacagggtttgattatcaagaagccactgggctaggtacttcaacccaacccttgacatctagcgcatcgtctcttactggtttcagtaactggtcagcagcgatagcgccttcctcctctacaataatcaatgaagatgcaagtttctttcaccagggaggggtccctgctgcttcggctaataacggtgctctgttgtttcaaaatttcccccatcatgtcagccctggctttggaggcagcttctctcctcagatcgggcctctctcacagcaccacccacatcaccctcatttccagcatcatcacagccagcatcagcagcaaaggaggtctcctgccagtccccatcccccacccttcacacatagaaatgctgcttttaaccagctgcctcatttggcgaataatcttaacaaacccccctctccgtggagcagctaccagagtccgtcaccaacaccctcctcttcctggagcccgggcggtggtggatatggtggctggggaggttcccaaggccgagatcaccgcagagggctgaatggtggaataacgcccctgaactccatctcgcctttgaagaaaaattttgcaagcaatcatattcagctccagaagtatgctcgccccagctctgcctttgcacctaaatcctggatggaagatagcttgaacagggctgacaacatttttccttttccggtctgaacagcctgaattgatggacttggcaattcctcttaaacctctgcaaattttggcctacctttcatcagtaaggactatctagtgagagaaatgatctaaatgttttcttcatccccatttatttttgaacactgtgaaactgttcatctcagagtgactctttatgcctttcacccgtttgtttattttccaatgttaacattgaagatgtagataattaaaccattcctaaaaatagatccaggcaaagatcatttgtctttcttgcctacccagaatatcctttattcctggcaagagtcattgatgtttttgaattaatgagcagcaagttaggttgatatgaactagataaagggaatttcataggtggttgaacgtcagatgctccactaaatgtatatactttgagggtatgattatatgtgtttaggaaatttataaggggtaagaatctagcattgaatctagttttcccaacaacctcacaagatgagttctgttattatccccattttacagatgcagaaattgaatatgagaaatatataataacttagccaagggtacacagctggtcagagtacaaattctaagttaaaaaaaaa

SEQ ID NO: 421346 - DNA, 6404 bp, Homo sapiens
ggaaaaaaaaggcgtgagacatcaggttgtcattttttattgtgagattctgctcctaaagataataaatgggggattacgggtttggagtgctagtgcaaagcaatactgggaataaatctgcttttccagtcagattccatccacatctgcagcctccacaccatcaccaaaatgccacccccagccctgctgcttttataaataataacacagctgccaatggcagcagtgctgggtcagcttggctttttcctgctccagctacccataacattcaggatgagatcttggggtcagaaaaagcaaaaagtcagcaacaggaacagcaagaccccttagaaaagcagcagctttccccaagtccaggtcaggaagctggaatactgcctgaaacagagaaggcaaaatcagaagaaaatcaaggggacaattcttcggaaaatggcaatgggaaggagaaaataaggatcgaatctccagtgttgacagggtttgattatcaagaagccactgggctaggtacttcaacccaacccttgacatctagcgcatcgtctcttactggtttcagtaactggtcagcagcgatagcgccttcctcctctacaataatcaatgaagatgcaagtttctttcaccagggaggggtccctgctgcttcggctaataacggtgctctgttgtttcaaaatttcccccatcatgtcagccctggctttggaggcagcttctctcctcagatcgggcctctctcacagcaccacccacatcaccctcatttccagcatcatcacagccagcatcagcagcaaaggaggtctcctgccagtccccatcccccacccttcacacatagaaatgctgcttttaaccagctgcctcatttggcgaataatcttaacaaacccccctctccgtggagcagctaccagagtccgtcaccaacaccctcctcttcctggagcccgggcggtggtggatatggtggctggggaggttcccaaggccgagatcaccgcagagggctgaatggtggaataacgcccctgaactccatctcgcctttgaagaaaaattttgcaagcaatcatattcagctccagaagtatgctcgccccagctctgcctttgcacctaaatcctggatggaagatagcttgaacagggctgacaacatttttccttttccggatcgccccaggacattcgacatgcactcactggagagttcactcattgacataatgagagctgaaaatgataccattaaaggtcgtctaaactattcatatccaggatccgatagctctctgcttattaatggtcagtcttcactgtttccaatggaagatggattcttggatgatggccgtggggatcagcctcttcatagtggcctgggttcacctcactgcttcagtcaccagaatggggaaagagtggaacgatattctcgaaaggtgtttgtaggcggattgcctccagacattgatgaagatgagatcacagctagttttcgtcgctttggccctctgattgtggattggcctcataaagctgagagcaaatcctattttcctcctaaaggctatgcattcctgctgtttcaagatgaaagctctgtgcaggctctcattgatgcatgcattgaagaagatggaaaactctacctttgtgtatcaagtcccactatcaaggataagccagtccagattcggccttggaatctcagtgacagtgactttgtgatggatggttcacagccacttgacccacgaaaaactatatttgttggtggtgttcctcgaccattacgagctgtggagcttgcgatgataatggatcggctatatggaggtgtgtgctacgctgggattgataccgaccctgagctaaaatacccaaaaggagctgggagagttgcgttctctaatcaacagagttacatagctgctatcagtgcccgctttgttcagctgcagcatggagagatagataaacgggtggaagttaagccatatgtcttggatgatcagctgtgtgatgaatgtcagggggcccgttgtggggggaaatttgctccatttttctgtgctaatgttacctgtctgcagtattactgtgaatattgctgggctgctatccattctcgtgctggcagggaattccacaagcccctggtgaaggaaggcggtgaccgccctcggcatatttcattccgctggaactaaaggataactgcagtgctcattttcaggcctcagaataagtgcactcttctgttcattctgaccccttcctcaacctcttcacgctggcatgtccttttgtagcagtctgtaacttaactatagtataatgaaaagaatgacctataatataggtgttttgtagattcttgtgtcactgcaaacaatatgaactcctttttcgtattgccatcgggttgcatggaagttttattctcttgttttgctggaaaccaagaggatccaaacttcctgcaacattttcttagaggagagagagaaatattaaaagagaaatgaaacaatagagtattttgggtttttaattaaattattgttaataatataacatataagaatacttttattaaaataaccatgcaacaataacactatcggtctatctgacagtttttcccccagggaagtgcttttgccttttcctttcttttttttttttttttcatcttttttgtctctctcttttttccatccctttttaatttttttaacagcaatggaggaagttaacaatttttaatggaaagagcatgttagagcaaacaaatgcataagcaagactgagcagcattataattaattttcagggttttgaggctgaacataatttcattatccctcaaaaagttaccaccacatcagaaaaaataaaaaaaaaatagtaaagtaggcagagctaggtttattttctcttaaacaatttttaaaattcagaatgtaaaaattgggtaaatttactactgaggggagtgcacttatttatttaacttacttatctggtcaaagccccaggaaacctaccaaagctagaattaatgacaactggtgggaaacctagcatttcctctcctgaagaataaatgtataaatgttatttttgatgtttatatataaactctatatcctaatttactaatactcatcagatgtcagcctttgctctccattttgacgttaaaaaacaacaacagatctagagatacctcaaggatatcatttttgattttgtgttacagtacacttgtagccaaaactggaagacaaaaccaatatataatttggctgctgattggcttacttttagatttaaagttactttgggtatcctgtaatttagttgtaacatagaaaatgaaaaaacagttaaaaaaagtgaagtagttgcaaagtgttttgcactgttgaactaagtaactgtgtaaatctgtgcaaaggtacgtatgtttatcttactcttcctataaactaaaataacattacagtttccgaatttagcatgggacatagtcagtgtttgaagtgccaacttcatcaagtaatgcatgctttattataaataaaattctagctttgaaaggcgttatgtgttgaacagtatgcttcaggggtaaatttaaaatagtctcttgaagccctagtcatggaagtaacttttattttaattgacattctcttattaaatgccctatccatcattaaaaggtttattatcagtgggcaaaacatgaaataatatgatcgaatggcaatcttgctagttgcgctacctaacagtaccatcttggatccttcaaaaccaaagacttgccccagcactgctgtggaaccacctggcttatgacccctatggatgatctttaggaaaagcagccctttacttttaatacaggctttaatgaactatacctgttaagttccaaaggtcaaaatggaggcatttgctgtctaatattcaaacatagaaagggagctgcttttaaagaattccctgcaaatactgaaagcagtcatgcgaatggagggtgctcttgtgtagctggtcagggacttttttttcttttctcctgaactacatgattctaattggaatgttcatttgcctctttttactcttttaaatgcttgtaggtggcttggggtgtgctatcgtgctgttcctactcagtaaacaggtgtgatgagttaacaagaaataacactgtttgagaactagctttgaataataatttttccctttgtacatgacctgctgaatttcggtacagtgtttttgtagctaacttattttgtcatgcacataatgtatatttgttatgcactacttttgtatatcttgtttttccaacagtgaacatttttaggcacacttttcactgacgggatatctctttatgcaatacctcaatttttcatattgcaaagagtagctttttgtacttttattactgagagatcttcatatacttcattttttaatataaataattttaataaattttattttcttatattctgctttttatacatttcagtgctctgcatacattttaaattatgaatgtcgtgcactggcaatgctattttagagtctgcagagaagagaaagcatgttgcttaaacatccttccccagcaccagctattggtgtacctataatttaagaaatagtctatgtaaagtcacaaattaatgaaaaaaattcgcatgaaaatgacagataacactgtagttcctaaaaaaaaaattaaatgcataagcataaggtagaaattaaaataacaaaattgtctacagcttcttactaagtttttaaaattattcataaaatgcagacatttttggtgaatgtttagccatttttaatattaataaattgatgttaagtgtttgattcagagatgtctgctcttttaaattatatataaggaaaaaaaatagcctgccttgggacaggtgtgtaatgttagtgtgcatgactaatgtaagaaattgttattctactaatatttacttgtgattgtgtgacaagtgtgtttacagattattggttacacttcaatttacagggcataaacaatgattatctattactctgaactttatgattacatgttcttcagattacatgggattgtagttgggagttaccatgtaactcaaacataattaacatgtaattagtttacagattgtagggcatcacttcaattcaccaagcatgtagttctagcgcactagcatggcgccagccatgtacttacaatgtagttacagagtaattacatggtgatttttgcaatgtaaaataaagtgtttctgattattttctatgtaaaggaaccctctcctttccccttctggtccctgcgctttggtataatatatatacttctccatacacagacctctgcagaatgcaaaataaaacttgcagtgaatgaatttagcattttatgagagtgctgttggaaagacttgataattcaccccttttgttttgaagagttgaatcttctgttaaaaggtgatttaaaacttgaatgtgatgaattgtggcaagttaacttcaagttatgtgcaatacttatttcaaacttttgaaagatctttgcagtgtaattctttgtttttaattgcagacatttaaaaatgtcattttctactgttaagagtaatcctctttcttgctggtgtttctaaagaaaagaatcagaaatcaatctttctactaatgtaaatttgagattatttttaaaaatggaataaaagaggttttggtcatttgctttattttattattttaaagctactgtgattgatagcattgtaagaatcgggacaatattgtattcaactgttttattttttatatttttaaaatttaaagtataattagtttttataattttcatcagatttttgttatattttttggaagtgaaacttttagcaagtgggtgtctagtttttactaatccctaattttttttccagtgtattgctcatattatcagaaggaaaagttatttaagtatgtcagttaattgtactacttggctgaatttccatatagtttttactgtgtatggggaggttgtagtatttattatagcattttaaataagggtaattcattttttattaaagtcattttcacgttaagttcctatttttgtatgttctactcttaagttatataacacagttccttttttaaaagagttcatttgttgaagtgctagtgaaaaattaatgttattaaatagtttgcaaatgactatttataccagtatgcatataatttttaaatatttgtaatgtgagatgttgaatgaataaaacttttaactc

SEQ ID NO: 421347 - DNA, 7089 bp, Homo sapiens
ggaaaaaaaaggcgtgagacatcaggttgtcattttttattgtgagattctgctcctaaagataataaatgggggattacgggtttggagtgctagtgcaaagcaatactgggaataaatctgcttttccagtcagattccatccacatctgcagcctccacaccatcaccaaaatgccacccccagccctgctgcttttataaataataacacagctgccaatggcagcagtgctgggtcagcttggctttttcctgctccagctacccataacattcaggatgagatcttggggtcagaaaaagcaaaaagtcagcaacaggaacagcaagaccccttagaaaagcagcagctttccccaagtccaggtcaggaagctggaatactgcctgaaacagagaaggcaaaatcagaagaaaatcaaggggacaattcttcggaaaatggcaatgggaaggagaaaataaggatcgaatctccagtgttgacagggtttgattatcaagaagccactgggctaggtacttcaacccaacccttgacatctagcgcatcgtctcttactggtttcagtaactggtcagcagcgatagcgccttcctcctctacaataatcaatgaagatgcaagtttctttcaccagggaggggtccctgctgcttcggctaataacggtgctctgttgtttcaaaatttcccccatcatgtcagccctggctttggaggcagcttctctcctcagatcgggcctctctcacagcaccacccacatcaccctcatttccagcatcatcacagccagcatcagcagcaaaggaggtctcctgccagtccccatcccccacccttcacacatagaaatgctgcttttaaccagctgcctcatttggcgaataatcttaacaaacccccctctccgtggagcagctaccagagtccgtcaccaacaccctcctcttcctggagcccgggcggtggtggatatggtggctggggaggttcccaaggccgagatcaccgcagagggctgaatggtggaataacgcccctgaactccatctcgcctttgaagaaaaattttgcaagcaatcatattcagctccagaagtatgctcgccccagctctgcctttgcacctaaatcctggatggaagatagcttgaacagggctgacaacatttttccttttccggatcgccccaggacattcgacatgcactcactggagagttcactcattgacataatgagagctgaaaatgataccattaaaggtcgtctaaactattcatatccaggatccgatagctctctgcttattaatggtcagtcttcactgtttccaatggaagatggattcttggatgatggccgtggggatcagcctcttcatagtggcctgggttcacctcactgcttcagtcaccagaatggggaaagagtggaacgatattctcgaaaggtgtttgtaggcggattgcctccagacattgatgaagatgagatcacagctagttttcgtcgctttggccctctgattgtggattggcctcataaagctgagagcaaatcctattttcctcctaaaggctatgcattcctgctgtttcaagatgaaagctctgtgcaggctctcattgatgcatgcattgaagaagatggaaaactctacctttgtgtatcaagtcccactatcaaggataagccagtccagattcggccttggaatctcagtgacagtgactttgtgatggatggttcacagccacttgacccacgaaaaactatatttgttggtggtgttcctcgaccattacgagctgtggagcttgcgatgataatggatcggctatatggaggtgtgtgctacgctgggattgataccgaccctgagctaaaatacccaaaaggagctgggagagttgcgttctctaatcaacagagttacatagctgctatcagtgcccgctttgttcagctgcagcatggagagatagataaacgggtggaagttaagccatatgtcttggatgatcagctgtgtgatgaatgtcagggggcccgttgtggggggaaatttgctccatttttctgtgctaatgttacctgtctgcagtattactgtgaatattgctgggctgctatccattctcgtgctggcagggaattccacaagcccctggtgaaggaaggcggtgaccgccctcggcatatttcattccgctggaactaaaggataactgcagtgctcattttcaggcctcagaataagtgcactcttctgttcattctgaccccttcctcaacctcttcacgctggcatgtccttttgtagcagtctgtaacttaactatagtataatgaaaagaatgacctataatataggtgttttgtagattcttgtgtcactgcaaacaatatgaactcctttttcgtattgccatcgggttgcatggaagttttattctcttgttttgctggaaaccaagaggatccaaacttcctgcaacattttcttagaggagagagagaaatattaaaagagaaatgaaacaatagagtattttgggtttttaattaaattattgttaataatataacatataagaatacttttattaaaataaccatgcaacaataacactatcggtctatctgacagtttttcccccagggaagtgcttttgccttttcctttcttttttttttttttttcatcttttttgtctctctcttttttccatccctttttaatttttttaacagcaatggaggaagttaacaatttttaatggaaagagcatgttagagcaaacaaatgcataagcaagactgagcagcattataattaattttcagggttttgaggctgaacataatttcattatccctcaaaaagttaccaccacatcagaaaaaataaaaaaaaaatagtaaagtaggcagagctaggtttattttctcttaaacaatttttaaaattcagaatgtaaaaattgggtaaatttactactgaggggagtgcacttatttatttaacttacttatctggtcaaagccccaggaaacctaccaaagctagaattaatgacaactggtgggaaacctagcatttcctctcctgaagaataaatgtataaatgttatttttgatgtttatatataaactctatatcctaatttactaatactcatcagatgtcagcctttgctctccattttgacgttaaaaaacaacaacagatctagagatacctcaaggatatcatttttgattttgtgttacagtacacttgtagccaaaactggaagacaaaaccaatatataatttggctgctgattggcttacttttagatttaaagttactttgggtatcctgtaatttagttgtaacatagaaaatgaaaaaacagttaaaaaaagtgaagtagttgcaaagtgttttgcactgttgaactaagtaactgtgtaaatctgtgcaaaggtacgtatgtttatcttactcttcctataaactaaaataacattacagtttccgaatttagcatgggacatagtcagtgtttgaagtgccaacttcatcaagtaatgcatgctttattataaataaaattctagctttgaaaggcgttatgtgttgaacagtatgcttcaggggtaaatttaaaatagtctcttgaagccctagtcatggaagtaacttttattttaattgacattctcttattaaatgccctatccatcattaaaaggtttattatcagtgggcaaaacatgaaataatatgatcgaatggcaatcttgctagttgcgctacctaacagtaccatcttggatccttcaaaaccaaagacttgccccagcactgctgtggaaccacctggcttatgacccctatggatgatctttaggaaaagcagccctttacttttaatacaggctttaatgaactatacctgttaagttccaaaggtcaaaatggaggcatttgctgtctaatattcaaacatagaaagggagctgcttttaaagaattccctgcaaatactgaaagcagtcatgcgaatggagggtgctcttgtgtagctggtcagggacttttttttcttttctcctgaactacatgattctaattggaatgttcatttgcctctttttactcttttaaatgcttgtaggtggcttggggtgtgctatcgtgctgttcctactcagtaaacaggtgtgatgagttaacaagaaataacactgtttgagaactagctttgaataataatttttccctttgtacatgacctgctgaatttcggtacagtgtttttgtagctaacttattttgtcatgcacataatgtatatttgttatgcactacttttgtatatcttgtttttccaacagtgaacatttttaggcacacttttcactgacgggatatctctttatgcaatacctcaatttttcatattgcaaagagtagctttttgtacttttattactgagagatcttcatatacttcattttttaatataaataattttaataaattttattttcttatattctgctttttatacatttcagtgctctgcatacattttaaattatgaatgtcgtgcactggcaatgctattttagagtctgcagagaagagaaagcatgttgcttaaacatccttccccagcaccagctattggtgtacctataatttaagaaatagtctatgtaaagtcacaaattaatgaaaaaaattcgcatgaaaatgacagataacactgtagttcctaaaaaaaaaattaaatgcataagcataaggtagaaattaaaataacaaaattgtctacagcttcttactaagtttttaaaattattcataaaatgcagacatttttggtgaatgtttagccatttttaatattaataaattgatgttaagtgtttgattcagagatgtctgctcttttaaattatatataaggaaaaaaaatagcctgccttgggacaggtgtgtaatgttagtgtgcatgactaatgtaagaaattgttattctactaatatttacttgtgattgtgtgacaagtgtgtttacagattattggttacacttcaatttacagggcataaacaatgattatctattactctgaactttatgattacatgttcttcagattacatgggattgtagttgggagttaccatgtaactcaaacataattaacatgtaattagtttacagattgtagggcatcacttcaattcaccaagcatgtagttctagcgcactagcatggcgccagccatgtacttacaatgtagttacagagtaattacatggtgatttttgcaatgtaaaataaagtgtttctgattattttctatgtaaaggaaccctctcctttccccttctggtccctgcgctttggtataatatatatacttctccatacacagacctctgcagaatgcaaaataaaacttgcagtgaatgaatttagcattttatgagagtgctgttggaaagacttgataattcaccccttttgttttgaagagttgaatcttctgttaaaaggtgatttaaaacttgaatgtgatgaattgtggcaagttaacttcaagttatgtgcaatacttatttcaaacttttgaaagatctttgcagtgtaattctttgtttttaattgcagacatttaaaaatgtcattttctactgttaagagtaatcctctttcttgctggtgtttctaaagaaaagaatcagaaatcaatctttctactaatgtaaatttgagattatttttaaaaatggaataaaagaggttttggtcatttgctttattttattattttaaagctactgtgattgatagcattgtaagaatcgggacaatattgtattcaactgttttattttttatatttttaaaatttaaagtataattagtttttataattttcatcagatttttgttatattttttggaagtgaaacttttagcaagtgggtgtctagtttttactaatccctaattttttttccagtgtattgctcatattatcagaaggaaaagttatttaagtatgtcagttaattgtactacttggctgaatttccatatagtttttactgtgtatggggaggttgtagtatttattatagcattttaaataagggtaattcattttttattaaagtcattttcacgttaagttcctatttttgtatgttctactcttaagttatataacacagttccttttttaaaagagttcatttgttgaagtgctagtgaaaaattaatgttattaaatagtttgcaaatgactatttataccagtatgcatataatttttaaatatttgtaatgtgagatgttgaatgaataaaacttttaactcagatttcttttaatatacttatttctttttaacacaagtagatgatgctttcttgactgggaatgtaacattttaaaatattaggaatatactgttcagctaatgcagcacaaaccaataggaaaaaatcttcagtcatataagtactgtggccagtgtgcattcttatgtaagcctataagcgtcggtgggtggttgtgtctttggcctgtactgttagttcacctgctgcctgccctgcagagttctttttatttgtagccttcaatatgtatacagggagtaagcccaggatctaagcattcagttatcagttgaaggccaaatgcccaacaaaagtgaaaaacccaatgtttagttaataatgaaagtccgtatctgggaggttcagttttgagtctttgtcaatgaatagtcttgatttgtggccacactaccaaagggcttgaaaacaagtctcttttgacttccaattcccagttcctccatagaccttaatgtcataggatacggtgtgtgggattataatctctatggcatgtcaattgaaaatattatctttgatttgatccattaatcatgtggactaccaagtgctgtaatgtgttagtatttatattttaaactgcattctcaaacttttaacataaggatttattataacaaaatataacaataagaataa

SEQ ID NO: 421348 - DNA, 6350 bp, Homo sapiens
ggaaaaaaaaggcgtgagacatcaggttgtcattttttattgtgagattctgctcctaaagataataaatgggggattacgggtttggagtgctagtgcaaagcaatactgggaataaatctgcttttccagtcagattccatccacatctgcagcctccacaccatcaccaaaatgccacccccagccctgctgcttttataaataataacacagctgccaatggcagcagtgctgggtcagcttggctttttcctgctccagctacccataacattcaggatgagatcttggggtcagaaaaagcaaaaagtcagcaacaggaacagcaagaccccttagaaaagcagcagctttccccaagtccaggtcaggaagctggaatactgcctgaaacagagaaggcaaaatcagaagaaaatcaaggggacaattcttcggaaaatggcaatgggaaggagaaaataaggatcgaatctccagtgttgacagggtttgattatcaagaagccactgggctaggtacttcaacccaacccttgacatctagcgcatcgtctcttactggtttcagtaactggtcagcagcgatagcgccttcctcctctacaataatcaatgaagatgcaagtttctttcaccagggaggggtccctgctgcttcggctaataacggtgctctgttgtttcaaaatttcccccatcatgtcagccctggctttggaggcagcttctctcctcagatcgggcctctctcacagcaccacccacatcaccctcatttccagcatcatcacagccagcatcagcagcaaaggaggtctcctgccagtccccatcccccacccttcacacatagaaatgctgcttttaaccagctgcctcatttggcgaataatcttaacaaacccccctctccgtggagcagctaccagagtccgtcaccaacaccctcctcttcctggagcccgggcggtggtggatatggtggctggggaggttcccaaggccgagatcaccgcagagggctgaatggtggaataacgcccctgaactccatctcgcctttgaagaaaaattttgcaagcaatcatattcagctccagaagtatgctcgccccagctctgcctttgcacctaaatcctggatggaagatagcttgaacagggctgacaacatttttccttttccggatcgccccaggacattcgacatgcactcactggagagttcactcattgacataatgagagctgaaaatgataccattaaaggtcgtctaaactattcatatccaggatccgatagctctctgcttattaatggtcagtcttcactgtttccaatggaagatggattcttggatgatggccgtggggatcagcctcttcatagtggcctgggttcacctcactgcttcagtcaccagaatggggaaagagtggaacgatattctcgaaaggtgtttgtaggcggattgcctccagacattgatgaagatgagatcacagctagttttcgtcgctttggccctctgattgtggattggcctcataaagctgagagcaaatcctattttcctcctaaaggctatgcattcctgctgtttcaagatgaaagctctgtgcaggctctcattgatgcatgcattgaagaagatggaaaactctacctttgtgtatcaagtcccactatcaaggataagccagtccagattcggccttggaatctcagtgacagtgactttgtgatggatggttcacagccacttgacccacgaaaaactatatttgttggtggtgttcctcgaccattacgagctgtggagcttgcgatgataatggatcggctatatggaggtgtgtgctacgctgggattgataccgaccctgagctaaaatacccaaaaggagctgggagagttgcgttctctaatcaacagagttacatagctgctatcagtgcccgctttgttcagctgcagcatggagagatagataaacgggtggaagttaagccatatgtcttggatgatcagctgtgtgatgaatgtcagggggcccgttgtggggggaaatttgctccatttttctgtgctaatgttacctgtctgcagtattactgtgaatattgctgggctgctatccattctcgtgctggcagggaattccacaagcccctggtgaaggaaggcggtgaccgccctcggcatatttcattccgctggaactaaaggataactgcagtgctcattttcaggcctcagaataagtgcactcttctgttcattctgaccccttcctcaacctcttcacgctggcatgtccttttgtagcagtctgtaacttaactatagtataatgaaaagaatgacctataatataggtgttttgtagattcttgtgtcactgcaaacaatatgaactcctttttcgtattgccatcgggttgcatggaagttttattctcttgttttgctggaaaccaagaggatccaaacttcctgcaacattttcttagaggagagagagaaatattaaaagagaaatgaaacaatagagtattttgggtttttaattaaattattgttaataatataacatataagaatacttttattaaaataaccatgcaacaataacactatcggtctatctgacagtttttcccccagggaagtgcttttgccttttcctttcttttttttttttttttcatcttttttgtctctctcttttttccatccctttttaatttttttaacagcaatggaggaagttaacaatttttaatggaaagagcatgttagagcaaacaaatgcataagcaagactgagcagcattataattaattttcagggttttgaggctgaacataatttcattatccctcaaaaagttaccaccacatcagaaaaaataaaaaaaaaatagtaaagtaggcagagctaggtttattttctcttaaacaatttttaaaattcagaatgtaaaaattgggtaaatttactactgaggggagtgcacttatttatttaacttacttatctggtcaaagccccaggaaacctaccaaagctagaattaatgacaactggtgggaaacctagcatttcctctcctgaagaataaatgtataaatgttatttttgatgtttatatataaactctatatcctaatttactaatactcatcagatgtcagcctttgctctccattttgacgttaaaaaacaacaacagatctagagatacctcaaggatatcatttttgattttgtgttacagtacacttgtagccaaaactggaagacaaaaccaatatataatttggctgctgattggcttacttttagatttaaagttactttgggtatcctgtaatttagttgtaacatagaaaatgaaaaaacagttaaaaaaagtgaagtagttgcaaagtgttttgcactgttgaactaagtaactgtgtaaatctgtgcaaaggtacgtatgtttatcttactcttcctataaactaaaataacattacagtttccgaatttagcatgggacatagtcagtgtttgaagtgccaacttcatcaagtaatgcatgctttattataaataaaattctagctttgaaaggcgttatgtgttgaacagtatgcttcaggggtaaatttaaaatagtctcttgaagccctagtcatggaagtaacttttattttaattgacattctcttattaaatgccctatccatcattaaaaggtttattatcagtgggcaaaacatgaaataatatgatcgaatggcaatcttgctagttgcgctacctaacagtaccatcttggatccttcaaaaccaaagacttgccccagcactgctgtggaaccacctggcttatgacccctatggatgatctttaggaaaagcagccctttacttttaatacaggctttaatgaactatacctgttaagttccaaaggtcaaaatggaggcatttgctgtctaatattcaaacatagaaagggagctgcttttaaagaattccctgcaaatactgaaagcagtcatgcgaatggagggtgctcttgtgtagctggtcagggacttttttttcttttctcctgaactacatgattctaattggaatgttcatttgcctctttttactcttttaaatgcttgtaggtggcttggggtgtgctatcgtgctgttcctactcagtaaacaggtgtgatgagttaacaagaaataacactgtttgagaactagctttgaataataatttttccctttgtacatgacctgctgaatttcggtacagtgtttttgtagctaacttattttgtcatgcacataatgtatatttgttatgcactacttttgtatatcttgtttttccaacagtgaacatttttaggcacacttttcactgacgggatatctctttatgcaatacctcaatttttcatattgcaaagagtagctttttgtacttttattactgagagatcttcatatacttcattttttaatataaataattttaataaattttattttcttatattctgctttttatacatttcagtgctctgcatacattttaaattatgaatgtcgtgcactggcaatgctattttagagtctgcagagaagagaaagcatgttgcttaaacatccttccccagcaccagctattggtgtacctataatttaagaaatagtctatgtaaagtcacaaattaatgaaaaaaattcgcatgaaaatgacagataacactgtagttcctaaaaaaaaaattaaatgcataagcataaggtagaaattaaaataacaaaattgtctacagcttcttactaagtttttaaaattattcataaaatgcagacatttttggtgaatgtttagccatttttaatattaataaattgatgttaagtgtttgattcagagatgtctgctcttttaaattatatataaggaaaaaaaatagcctgccttgggacaggtgtgtaatgttagtgtgcatgactaatgtaagaaattgttattctactaatatttacttgtgattgtgtgacaagtgtgtttacagattattggttacacttcaatttacagggcataaacaatgattatctattactctgaactttatgattacatgttcttcagattacatgggattgtagttgggagttaccatgtaactcaaacataattaacatgtaattagtttacagattgtagggcatcacttcaattcaccaagcatgtagttctagcgcactagcatggcgccagccatgtacttacaatgtagttacagagtaattacatggtgatttttgcaatgtaaaataaagtgtttctgattattttctatgtaaaggaaccctctcctttccccttctggtccctgcgctttggtataatatatatacttctccatacacagacctctgcagaatgcaaaataaaacttgcagtgaatgaatttagcattttatgagagtgctgttggaaagacttgataattcaccccttttgttttgaagagttgaatcttctgttaaaaggtgattttatttcaaacttttgaaagatctttgcagtgtaattctttgtttttaattgcagacatttaaaaatgtcattttctactgttaagagtaatcctctttcttgctggtgtttctaaagaaaagaatcagaaatcaatctttctactaatgtaaatttgagattatttttaaaaatggaataaaagaggttttggtcatttgctttattttattattttaaagctactgtgattgatagcattgtaagaatcgggacaatattgtattcaactgttttattttttatatttttaaaatttaaagtataattagtttttataattttcatcagatttttgttatattttttggaagtgaaacttttagcaagtgggtgtctagtttttactaatccctaattttttttccagtgtattgctcatattatcagaaggaaaagttatttaagtatgtcagttaattgtactacttggctgaatttccatatagtttttactgtgtatggggaggttgtagtatttattatagcattttaaataagggtaattcattttttattaaagtcattttcacgttaagttcctatttttgtatgttctactcttaagttatataacacagttccttttttaaaagagttcatttgttgaagtgctagtgaaaaattaatgttattaaatagtttgcaaatgactatttataccagtatgcatataatttttaaatatttgtaatgtgagatgttgaatgaataaaacttttaactc

SEQ ID NO: 421349 - DNA, 567 bp, Homo sapiens
cagatgtgcaaattattaacagttggggaatctagatgaaggggataaaggagttctttttactgttcttgtaaatagtagatttgaaacttaaaagaaaaactttcaaaaaatgatcataaaaatatttaaatctactgttttcctttgttgtttattagatgagatcacagctagttttcgtcgctttggccctctgattgtggattggcctcataaagctgagagcaaatcctattttcctcctaaaggtaattctcaagattcattatacttatgtaatttattcttacattgtttaatgtgtagccttttcataaatgttcaccttcactgtaaaatgttgcattgttaaacttgcattttcccaaatgctctttaaaatttcaacataatattcttttaattcaaatttaattttactctaaaagatgcttcaagatactaccaaaatgaactgtatgttgatgtcatcagacttttggtataaatattgttttaatttttttcctattcctttttcctttctttagttttgtgcatgattcctttcccctgaagaattac

SEQ ID NO: 421350 - DNA, 3568 bp, Homo sapiens
gaaaggaaatagctctacgagcggatcctgcctgcgttagcggcggtggaggaggaggcagagaggagtggagggcggagtagacggaggaggctgctgcagagaagaaagtgtcagagccggttcggctttagagtgtggtgaagggtacttttcatggtgcatggaaggaaagccaatgcgcaggtgtaccaacattcgaccaggagagactggaatggatgtaacaagccgctgcacccttggagaccccaacaaactgccagaaggggttccccaacctgcccgcatgccctatatctcagacaagcaccctcgacaaaccttggaagtgattaaccttctgagaaagcaccgggagctatgtgatgtggtgctagttgtgggcgccaagaagatatatgcccatcgagtcattttgtcagcctgtagtccctacttccgagctatgtttacaggagaattggcagagagccgtcagacagaagtagtgatccgagacattgacgagagggctatggaattactgattgactttgcgtatacctcccagataacagtagaagagggcaatgttcagactcttctgccagctgcttgcctcctccagctggcagaaatacaggaagcctgctgtgaattcttaaagagacaattagatccttctaactgcctgggcattcgggcttttgctgacacacattcatgtcgtgagttgctaaggatagcagacaagttcacccaacataactttcaagaggtaatggagagtgaagagttcatgttgcttccagccaatcaactcattgatataatatccagtgatgagctaaacgttcgcagtgaagaacaagtgttcaatgcagtgatggcctgggtcaaatacagtattcaggaaagacgtcctcaattaccccaggtgctgcagcatgttcgtttgcctttgcttagtcccaagttcctggtcggcacagtaggctctgatcccctcatcaaaagtgatgaagaatgcagagacttggtagatgaggctaaaaactacctcctattgccgcaagaacgaccactaatgcaaggaccaaggacgagaccacggaaacctatccgatgtggggaagtactctttgcagttggtggttggtgcagtggagatgccatttccagtgttgaacgatatgatccacagaccaatgaatggagaatggtggcttcaatgagcaaaaggagatgcggagttggggtcagtgttcttgatgatctgttatatgcagtaggaggccatgatggatcctcttatctcaatagtgttgaaaggtatgaccccaaaacaaaccagtggagcagtgatgtggcccctacaagcacctgcaggacaagtgttggtgtagcagtacttggaggctttctttatgctgtgggtggccaggatggtgtgtcttgcctcaacattgttgagaggtatgatccgaaggagaacaagtggactcgggtagcttctatgagtaccagaagactaggtgtggctgtggctgtgttaggagggttcttatatgctgtaggtggctctgacgggacatctcctctcaacacagtggaacgttacaatcctcaggaaaacagatggcacactatagcccctatggggacccggaggaaacacctaggctgtgcagtatatcaggacatgatctatgctgtaggaggtagagatgacactacagagctgagcagtgctgagagatacaaccccagaaccaaccagtggtctccagtggtggccatgacatcacgccgtagtggagttggcctggcagtggtcaatggacagctcatggcagtaggaggttttgatggcacaacatacttgaagaccatagaagtttttgatcctgatgccaatacatggaggttatatggcgggatgaattaccgtcggctagggggtggcgtaggagttattaaaatgacacattgtgaatcccatatttggtgaacacagagaagacagtcttgtatatattcctctgtattctggggagctttgaccttggagctttgtacagcttgagaaaacattagaacaaattttattatttgccggtgcctcaacaaatggaaatacaatccaatgaaagtacttcacctgcaagatgcacaataattttcaactctgtgcagaagaatatttatttttggttttaatttatcatggttttttgttgttttcgttttgaacttatccttcctcccacaaaaaaagaaaagaagaaaaaattccaagcagcaaaacttactttgtttgtaaggtattcatttaggtttgaaaatactatttaataagggcagaagggctatatatgatttggctattatttctagacactccatccacatgattccactaacaaggattaccaggaataaaggtaggtatgcaaaatgtattagctacccattattctcgcactaaccaccagaagacttgaaaatcttaaaaaaaaaaaacaaaaaaacaagaaaaggcaacatctcattttaaatagtacaattcagaagggatactaaatcaataaaaaccaggactcagacactacagttttcatcagtgtaattttatgtcttgtttctttctatatgaacttgtttatttagtctttttttcataatattctcatagagtttctgctagatctagagctctgctcagtgcctcttataaaaacaatatataagtctcatatgctgtcttgagaatccaagagaatcacatgcagctctgcaacagtttttgctcaaaaatgttactgactaaagcaactgtccttcctgtttccttattgctaccaaggaccagcagggagaaatgtcttctcccagcagtgaattctgttatgcaatttattcttgatgctcaggcctggttaagctgaggcttacctttaataacagcctccaagggaatgaattattcagttaatgtaatagcacacattaaagagtgtaaaatcaattgaggcattttattaatatcttggttcttttatacaaacaatgtatcattatcttcattctataaggtcattgttactacttctctcaaattgcactttctggtaaaaagttaaaaatttttaaggaaaaaataatttcaatggttaaagttttttttcctcattgtattcatagacaaatttttttcaatatattttgcaagaaaaatctttgaataagactaactgcatttaaaaggaataacctccttctccctttccccaactacaaaaatgtttggcaactttgtgtttacatttaaagatcatttgcacctttttcaaggaaaaaaagtattgagtaaacaattgtttacatatatcatttatgcttttttctagcatgtataacttttttaaataaaggtagtatttaccattaaaaaaattttagctaatgctttttatccttgtacttttgttatttaatttggaatttctgtttctatataatttattttatctgtatgtaaagttacaagtgctttcaacttgaataaaaggattgccagctagaa

SEQ ID NO: 421351 - DNA, 1597 bp, Homo sapiens
tgtggaacccccaatttgggggacccaaaaaaaaacccttttgggaaaaaatcccggagtattggagaattttcccttggagctttgtacagcttgagaaaacattagaacaaattttattatttgccggtgcctcaacaaatggaaatacaatccaatgaaagtacttcacctgcaagatgcacaataattttcaactctgtgcagaagaatatttatttttggttttaatttatcatggttttttgttgttttcgttttgaacttatccttcctcccacaaaaaaagaaaagaagaaaaaattccaagcagcaaaacttactttgtttgtaaggtattcatttaggtttgaaaatactatttaataagggcagaagggctatatatgatttggctattatttctagacactccatccacatgattccactaacaaggattaccaggaataaaggtaggtatgcaaaatgtattagctacccattattctcgcactaaccaccagaagacttgaaaatcttaaaaaaaaaaaacaaaaaaacaagaaaaggcaacatctcattttaaatagtacaattcagaagggatactaaatcaataaaaaccaggactcagacactacagttttcatcagtgtaattttatgtcttgtttctttctatatgaacttgtttatttagtctttttttcataatattctcatagagtttctgctagatctagagctctgctcagtgcctcttataaaaacaatatataagtctcatatgctgtcttgagaatccaagagaatcacatgcagctctgcaacagtttttgctcaaaaatgttactgactaaagcaactgtccttcctgtttccttattgctaccaaggaccagcagggagaaatgtcttctcccagcagtgaattctgttatgcaatttattcttgatgctcaggcctggttaagctgaggcttacctttaataacagcctccaagggaatgaattattcagttaatgtaatagcacacattaaagagtgtaaaatcaattgaggcattttattaatatcttggttcttttatacaaacaatgtatcattatcttcattctataaggtcattgttactacttctctcaaattgcactttctggtaaaaagttaaaaatttttaaggaaaaaataatttcaatggttaaagttttttttcctcattgtattcatagacaaatttttttcaatatattttgcaagaaaaatctttgaataagactaactgcatttaaaaggaataacctccttctccctttccccaactacaaaaatgtttggcaactttgtgtttacatttaaagatcatttgcacctttttcaaggaaaaaaagtattgagtaaacaattgtttacatatatcatttatgcttttttctagcatgtataacttttttaaataaaggtagtatttaccattaaaaaaattttagctaatgctttttatccttgtacttttgttatttaatttggaatttctgtttctatataatttattttatctgtatgtaaagttacaagtgctttcaacttgaataaaaggattgccagctagaa

SEQ ID NO: 421352 - DNA, 950 bp, Homo sapiens
gagacgcctcctcctcctgtcacttcgggacaagttaacaatcttcagattcgttattaaagcctcgtgtaccctatgtgatctatcaggttcggctttagagtgtggtgaagggtacttttcatggtgcatggaaggaaagccaatgcgcaggtgtaccaacattcgaccaggagagactggaatggatgtaacaagccgctgcacccttggagaccccaacaaactgccagaaggggttccccaacctgcccgcatgccctatatctcagacaagcaccctcgacaaaccttggaagtgattaaccttctgagaaagcaccgggagctatgtgatgtggtgctagttgtgggcgccaagaagatatatgcccatcgagtcattttgtcagcctgtagtccctacttccgagctatgtttacaggagaattggcagagagccgtcagacagaagtagtgatccgagacattgacgagagggctatggaattactgattgactttgcgtatacctcccagataacagtagaagagggcaatgttcagactcttctgccagctgcttgcctcctccagctggcagaaatacaggaagcctgctgtgaattcttaaagagacaattagatccttctaactgcctgggcattcgggcttttgctgacacacattcatgtcgtgagttgctaaggatagcagacaagttcacccaacataactttcaagaggtgagttgcacttggtgttccaatgcacccatttgttggagagcaatatgggttcacattctgctaaataacacttgcctgggtatttcctgctgattctaactcataatagcaaataaataagttattataaatcctaaacctggcttttattttagagggcaattttgtgttctaccagcaagttaagatttagggatttattctccctaactgtattcat

SEQ ID NO: 421353 - DNA, 3142 bp, Homo sapiens
gaaaggaaatagctctacgagcggatcctgcctgcgttagcggcggtggaggaggaggcagagaggagtggagggcggagtagacggaggaggctgctgcagagaagaaagtgtcagagccggttcggctttagagtgtggtgaagggtacttttcatggtgcatggaaggaaagccaatgcgcaggtgtaccaacattcgaccaggagagactggaatggatgtaacaagccgctgcacccttggagaccccaacaaactgccagaaggggttccccaacctgcccgcatgccctatatctcagacaagcaccctcgacaaaccttggaagtgattaaccttctgagaaagcaccgggagctatgtgatgtggtgctagttgtgggcgccaagaagatatatgcccatcgagtcattttgtcagcctgtagtccctacttccgagctatgtttacaggagaattggcagagagccgtcagacagaagtagtgatccgagacattgacgagagggctatggaattactgattgactttgcgtatacctcccagataacagtagaagagggcaatgttcagactcttctgccagctgcttgcctcctccagctggcagaaatacaggaagcctgctgtgaattcttaaagagacaattagatccttctaactgcctgggcattcgggcttttgctgacacacattcatgtcgtgagttgctaaggatagcagacaagttcacccaacataactttcaagaggtaatggagagtgaagagttcatgttgcttccagccaatcaactcattgatataatatccagtgatgagctaaacgttcgcagtgaagaacaagtgttcaatgcagtgatggcctgggtcaaatacagtattcaggaaagacgtcctcaattaccccaggtgctgcagcatgttcgtttgcctttgcttagtcccaagttcctggtcggcacagtaggctctgatcccctcatcaaaagtgatgaagaatgcagagacttggtagatgaggctaaaaactacctcctattgccgcaagaacgaccactaatgcaaggaccaaggacgagaccacggaaacctatccgatgtggggaagtactctttgcagttggtggttggtgcagtggagatgccatttccagtgttgaacgatatgatccacagaccaatgaatggagaatggtggcttcaatgagcaaaaggagatgcggagttggggtcagtgttcttgatgatctgttatatgcagtaggaggccatgatggatcctcttatctcaatagtgttgaaagatacaaccccagaaccaaccagtggtctccagtggtggccatgacatcacgccgtagtggagttggcctggcagtggtcaatggacagctcatggcagtaggaggttttgatggcacaacatacttgaagaccatagaagtttttgatcctgatgccaatacatggaggttatatggcgggatgaattaccgtcggctagggggtggcgtaggagttattaaaatgacacattgtgaatcccatatttggtgaacacagagaagacagtcttgtatatattcctctgtattctggggagctttgaccttggagctttgtacagcttgagaaaacattagaacaaattttattatttgccggtgcctcaacaaatggaaatacaatccaatgaaagtacttcacctgcaagatgcacaataattttcaactctgtgcagaagaatatttatttttggttttaatttatcatggttttttgttgttttcgttttgaacttatccttcctcccacaaaaaaagaaaagaagaaaaaattccaagcagcaaaacttactttgtttgtaaggtattcatttaggtttgaaaatactatttaataagggcagaagggctatatatgatttggctattatttctagacactccatccacatgattccactaacaaggattaccaggaataaaggtaggtatgcaaaatgtattagctacccattattctcgcactaaccaccagaagacttgaaaatcttaaaaaaaaaaaacaaaaaaacaagaaaaggcaacatctcattttaaatagtacaattcagaagggatactaaatcaataaaaaccaggactcagacactacagttttcatcagtgtaattttatgtcttgtttctttctatatgaacttgtttatttagtctttttttcataatattctcatagagtttctgctagatctagagctctgctcagtgcctcttataaaaacaatatataagtctcatatgctgtcttgagaatccaagagaatcacatgcagctctgcaacagtttttgctcaaaaatgttactgactaaagcaactgtccttcctgtttccttattgctaccaaggaccagcagggagaaatgtcttctcccagcagtgaattctgttatgcaatttattcttgatgctcaggcctggttaagctgaggcttacctttaataacagcctccaagggaatgaattattcagttaatgtaatagcacacattaaagagtgtaaaatcaattgaggcattttattaatatcttggttcttttatacaaacaatgtatcattatcttcattctataaggtcattgttactacttctctcaaattgcactttctggtaaaaagttaaaaatttttaaggaaaaaataatttcaatggttaaagttttttttcctcattgtattcatagacaaatttttttcaatatattttgcaagaaaaatctttgaataagactaactgcatttaaaaggaataacctccttctccctttccccaactacaaaaatgtttggcaactttgtgtttacatttaaagatcatttgcacctttttcaaggaaaaaaagtattgagtaaacaattgtttacatatatcatttatgcttttttctagcatgtataacttttttaaataaaggtagtatttaccattaaaaaaattttagctaatgctttttatccttgtacttttgttatttaatttggaatttctgtttctatataatttattttatctgtatgtaaagttacaagtgctttcaacttgaataaaaggattgccagctagaa

SEQ ID NO: 421354 - DNA, 3535 bp, Homo sapiens
gagacgcctcctcctcctgtcacttcgggacaagttaacaatcttcagattcgttattaaagcctcgtgtaccctatgtgatctatcaggttcggctttagagtgtggtgaagggtacttttcatggtgcatggaaggaaagccaatgcgcaggtgtaccaacattcgaccaggagagactggaatggatgtaacaagccgctgcacccttggagaccccaacaaactgccagaaggggttccccaacctgcccgcatgccctatatctcagacaagcaccctcgacaaaccttggaagtgattaaccttctgagaaagcaccgggagctatgtgatgtggtgctagttgtgggcgccaagaagatatatgcccatcgagtcattttgtcagcctgtagtccctacttccgagctatgtttacaggagaattggcagagagccgtcagacagaagtagtgatccgagacattgacgagagggctatggaattactgattgactttgcgtatacctcccagataacagtagaagagggcaatgttcagactcttctgccagctgcttgcctcctccagctggcagaaatacaggaagcctgctgtgaattcttaaagagacaattagatccttctaactgcctgggcattcgggcttttgctgacacacattcatgtcgtgagttgctaaggatagcagacaagttcacccaacataactttcaagaggtaatggagagtgaagagttcatgttgcttccagccaatcaactcattgatataatatccagtgatgagctaaacgttcgcagtgaagaacaagtgttcaatgcagtgatggcctgggtcaaatacagtattcaggaaagacgtcctcaattaccccaggtgctgcagcatgttcgtttgcctttgcttagtcccaagttcctggtcggcacagtaggctctgatcccctcatcaaaagtgatgaagaatgcagagacttggtagatgaggctaaaaactacctcctattgccgcaagaacgaccactaatgcaaggaccaaggacgagaccacggaaacctatccgatgtggggaagtactctttgcagttggtggttggtgcagtggagatgccatttccagtgttgaacgatatgatccacagaccaatgaatggagaatggtggcttcaatgagcaaaaggagatgcggagttggggtcagtgttcttgatgatctgttatatgcagtaggaggccatgatggatcctcttatctcaatagtgttgaaaggtatgaccccaaaacaaaccagtggagcagtgatgtggcccctacaagcacctgcaggacaagtgttggtgtagcagtacttggaggctttctttatgctgtgggtggccaggatggtgtgtcttgcctcaacattgttgagaggtatgatccgaaggagaacaagtggactcgggtagcttctatgagtaccagaagactaggtgtggctgtggctgtgttaggagggttcttatatgctgtaggtggctctgacgggacatctcctctcaacacagtggaacgttacaatcctcaggaaaacagatggcacactatagcccctatggggacccggaggaaacacctaggctgtgcagtatatcaggacatgatctatgctgtaggaggtagagatgacactacagagctgagcagtgctgagagatacaaccccagaaccaaccagtggtctccagtggtggccatgacatcacgccgtagtggagttggcctggcagtggtcaatggacagctcatggcagtaggaggttttgatggcacaacatacttgaagaccatagaagtttttgatcctgatgccaatacatggaggttatatggcgggatgaattaccgtcggctagggggtggcgtaggagttattaaaatgacacattgtgaatcccatatttggtgaacacagagaagacagtcttgtatatattcctctgtattctggggagctttgaccttggagctttgtacagcttgagaaaacattagaacaaattttattatttgccggtgcctcaacaaatggaaatacaatccaatgaaagtacttcacctgcaagatgcacaataattttcaactctgtgcagaagaatatttatttttggttttaatttatcatggttttttgttgttttcgttttgaacttatccttcctcccacaaaaaaagaaaagaagaaaaaattccaagcagcaaaacttactttgtttgtaaggtattcatttaggtttgaaaatactatttaataagggcagaagggctatatatgatttggctattatttctagacactccatccacatgattccactaacaaggattaccaggaataaaggtaggtatgcaaaatgtattagctacccattattctcgcactaaccaccagaagacttgaaaatcttaaaaaaaaaaaacaaaaaaacaagaaaaggcaacatctcattttaaatagtacaattcagaagggatactaaatcaataaaaaccaggactcagacactacagttttcatcagtgtaattttatgtcttgtttctttctatatgaacttgtttatttagtctttttttcataatattctcatagagtttctgctagatctagagctctgctcagtgcctcttataaaaacaatatataagtctcatatgctgtcttgagaatccaagagaatcacatgcagctctgcaacagtttttgctcaaaaatgttactgactaaagcaactgtccttcctgtttccttattgctaccaaggaccagcagggagaaatgtcttctcccagcagtgaattctgttatgcaatttattcttgatgctcaggcctggttaagctgaggcttacctttaataacagcctccaagggaatgaattattcagttaatgtaatagcacacattaaagagtgtaaaatcaattgaggcattttattaatatcttggttcttttatacaaacaatgtatcattatcttcattctataaggtcattgttactacttctctcaaattgcactttctggtaaaaagttaaaaatttttaaggaaaaaataatttcaatggttaaagttttttttcctcattgtattcatagacaaatttttttcaatatattttgcaagaaaaatctttgaataagactaactgcatttaaaaggaataacctccttctccctttccccaactacaaaaatgtttggcaactttgtgtttacatttaaagatcatttgcacctttttcaaggaaaaaaagtattgagtaaacaattgtttacatatatcatttatgcttttttctagcatgtataacttttttaaataaaggtagtatttaccattaaaaaaattttagctaatgctttttatccttgtacttttgttatttaatttggaatttctgtttctatataatttattttatctgtatgtaaagttacaagtgctttcaacttgaataaaaggattgccagctagaa

SEQ ID NO: 421355 - DNA, 2829 bp, Homo sapiens
ttcttacctaactttgaacaggtaatggagagtgaagagttcatgttgcttccagccaatcaactcattgatataatatccagtgatgagctaaacgttcgcagtgaagaacaagtgttcaatgcagtgatggcctgggtcaaatacagtattcaggaaagacgtcctcaattaccccaggtgctgcagcatgttcgtttgcctttgcttagtcccaagttcctggtcggcacagtaggctctgatcccctcatcaaaagtgatgaagaatgcagagacttggtagatgaggctaaaaactacctcctattgccgcaagaacgaccactaatgcaaggaccaaggacgagaccacggaaacctatccgatgtggggaagtactctttgcagttggtggttggtgcagtggagatgccatttccagtgttgaacgatatgatccacagaccaatgaatggagaatggtggcttcaatgagcaaaaggagatgcggagttggggtcagtgttcttgatgatctgttatatgcagtaggaggccatgatggatcctcttatctcaatagtgttgaaaggtatgaccccaaaacaaaccagtggagcagtgatgtggcccctacaagcacctgcaggacaagtgttggtgtagcagtacttggaggctttctttatgctgtgggtggccaggatggtgtgtcttgcctcaacattgttgagaggtatgatccgaaggagaacaagtggactcgggtagcttctatgagtaccagaagactaggtgtggctgtggctgtgttaggagggttcttatatgctgtaggtggctctgacgggacatctcctctcaacacagtggaacgttacaatcctcaggaaaacagatggcacactatagcccctatggggacccggaggaaacacctaggctgtgcagtatatcaggacatgatctatgctgtaggaggtagagatgacactacagagctgagcagtgctgagagatacaaccccagaaccaaccagtggtctccagtggtggccatgacatcacgccgtagtggagttggcctggcagtggtcaatggacagctcatggcagtaggaggttttgatggcacaacatacttgaagaccatagaagtttttgatcctgatgccaatacatggaggttatatggcgggatgaattaccgtcggctagggggtggcgtaggagttattaaaatgacacattgtgaatcccatatttggtgaacacagagaagacagtcttgtatatattcctctgtattctggggagctttgaccttggagctttgtacagcttgagaaaacattagaacaaattttattatttgccggtgcctcaacaaatggaaatacaatccaatgaaagtacttcacctgcaagatgcacaataattttcaactctgtgcagaagaatatttatttttggttttaatttatcatggttttttgttgttttcgttttgaacttatccttcctcccacaaaaaaagaaaagaagaaaaaattccaagcagcaaaacttactttgtttgtaaggtattcatttaggtttgaaaatactatttaataagggcagaagggctatatatgatttggctattatttctagacactccatccacatgattccactaacaaggattaccaggaataaaggtaggtatgcaaaatgtattagctacccattattctcgcactaaccaccagaagacttgaaaatcttaaaaaaaaaaaacaaaaaaacaagaaaaggcaacatctcattttaaatagtacaattcagaagggatactaaatcaataaaaaccaggactcagacactacagttttcatcagtgtaattttatgtcttgtttctttctatatgaacttgtttatttagtctttttttcataatattctcatagagtttctgctagatctagagctctgctcagtgcctcttataaaaacaatatataagtctcatatgctgtcttgagaatccaagagaatcacatgcagctctgcaacagtttttgctcaaaaatgttactgactaaagcaactgtccttcctgtttccttattgctaccaaggaccagcagggagaaatgtcttctcccagcagtgaattctgttatgcaatttattcttgatgctcaggcctggttaagctgaggcttacctttaataacagcctccaagggaatgaattattcagttaatgtaatagcacacattaaagagtgtaaaatcaattgaggcattttattaatatcttggttcttttatacaaacaatgtatcattatcttcattctataaggtcattgttactacttctctcaaattgcactttctggtaaaaagttaaaaatttttaaggaaaaaataatttcaatggttaaagttttttttcctcattgtattcatagacaaatttttttcaatatattttgcaagaaaaatctttgaataagactaactgcatttaaaaggaataacctccttctccctttccccaactacaaaaatgtttggcaactttgtgtttacatttaaagatcatttgcacctttttcaaggaaaaaaagtattgagtaaacaattgtttacatatatcatttatgcttttttctagcatgtataacttttttaaataaaggtagtatttaccattaaaaaaattttagctaatgctttttatccttgtacttttgttatttaatttggaatttctgtttctatataatttattttatctgtatgtaaagttacaagtgctttcaacttgaataaaaggattgccagctagaa

SEQ ID NO: 421356 - DNA, 2410 bp, Homo sapiens
ctccatctcaaaaaaaaaaaaaaaaaagagaaagagcctgtgttatgtgagctgaagtcataggttgttttctttccttgggacattttccaagtatgagtgtagaaaatagcttaatagctggcacagatataaattctaagacgtttttctaatgactaagtaaaatgttagattttcattgcacatttgactatagcaagtccgtgtactcagtatatcgttagtgtgatttcagatcttatgaaaaaggcttcacttaataagaacaagcatacagtctggtttccctcactgcaggtatgatccgaaggagaacaagtggactcgggtagcttctatgagtaccagaagactaggtgtggctgtggctgtgttaggagggttcttatatgctgtaggtggctctgacgggacatctcctctcaacacagtggaacgttacaatcctcaggaaaacagatggcacactatagcccctatggggacccggaggaaacacctaggctgtgcagtatatcaggacatgatctatgctgtaggaggtagagatgacactacagagctgagcagtgctgagagatacaaccccagaaccaaccagtggtctccagtggtggccatgacatcacgccgtagtggagttggcctggcagtggtcaatggacagctcatggcagtaggaggttttgatggcacaacatacttgaagaccatagaagtttttgatcctgatgccaatacatggaggttatatggcgggatgaattaccgtcggctagggggtggcgtaggagttattaaaatgacacattgtgaatcccatatttggtgaacacagagaagacagtcttgtatatattcctctgtattctggggagctttgaccttggagctttgtacagcttgagaaaacattagaacaaattttattatttgccggtgcctcaacaaatggaaatacaatccaatgaaagtacttcacctgcaagatgcacaataattttcaactctgtgcagaagaatatttatttttggttttaatttatcatggttttttgttgttttcgttttgaacttatccttcctcccacaaaaaaagaaaagaagaaaaaattccaagcagcaaaacttactttgtttgtaaggtattcatttaggtttgaaaatactatttaataagggcagaagggctatatatgatttggctattatttctagacactccatccacatgattccactaacaaggattaccaggaataaaggtaggtatgcaaaatgtattagctacccattattctcgcactaaccaccagaagacttgaaaatcttaaaaaaaaaaaacaaaaaaacaagaaaaggcaacatctcattttaaatagtacaattcagaagggatactaaatcaataaaaaccaggactcagacactacagttttcatcagtgtaattttatgtcttgtttctttctatatgaacttgtttatttagtctttttttcataatattctcatagagtttctgctagatctagagctctgctcagtgcctcttataaaaacaatatataagtctcatatgctgtcttgagaatccaagagaatcacatgcagctctgcaacagtttttgctcaaaaatgttactgactaaagcaactgtccttcctgtttccttattgctaccaaggaccagcagggagaaatgtcttctcccagcagtgaattctgttatgcaatttattcttgatgctcaggcctggttaagctgaggcttacctttaataacagcctccaagggaatgaattattcagttaatgtaatagcacacattaaagagtgtaaaatcaattgaggcattttattaatatcttggttcttttatacaaacaatgtatcattatcttcattctataaggtcattgttactacttctctcaaattgcactttctggtaaaaagttaaaaatttttaaggaaaaaataatttcaatggttaaagttttttttcctcattgtattcatagacaaatttttttcaatatattttgcaagaaaaatctttgaataagactaactgcatttaaaaggaataacctccttctccctttccccaactacaaaaatgtttggcaactttgtgtttacatttaaagatcatttgcacctttttcaaggaaaaaaagtattgagtaaacaattgtttacatatatcatttatgcttttttctagcatgtataacttttttaaataaaggtagtatttaccattaaaaaaattttagctaatgctttttatccttgtacttttgttatttaatttggaatttctgtttctatataatttattttatctgtatgtaaagttacaagtgctttcaacttgaataaaaggattgccagctagaa

SEQ ID NO: 421357 - DNA, 2360 bp, Homo sapiens
caggactagactgaagctccagaccgggcaacatgcggaggcttgattgcaaatgttagctccagactgactgcaagaaaaaatcagcaatctcaagaggacccacagaccctctgaagaaagcggactgctcctgcagcacccgggagaaaccccaaatattgggagtgccccaactgcagaaatgggaaagggagaccctcctctcccaaacacacacccccactggagaagctgaaggtatgaccccaaaacaaaccagtggagcagtgatgtggcccctacaagcacctgcaggacaagtgttggtgtagcagtacttggaggctttctttatgctgtgggtggccaggatggtgtgtcttgcctcaacattgttgagagtggaacgttacaatcctcaggaaaacagatggcacactatagcccctatggggacccggaggaaacacctaggctgtgcagtatatcaggacatgatctatgctgtaggaggtagagatgacactacagagctgagcagtgctgagagatacaaccccagaaccaaccagtggtctccagtggtggccatgacatcacgccgtagtggagttggcctggcagtggtcaatggacagctcatggcagtaggaggttttgatggcacaacatacttgaagaccatagaagtttttgatcctgatgccaatacatggaggttatatggcgggatgaattaccgtcggctagggggtggcgtaggagttattaaaatgacacattgtgaatcccatatttggtgaacacagagaagacagtcttgtatatattcctctgtattctggggagctttgaccttggagctttgtacagcttgagaaaacattagaacaaattttattatttgccggtgcctcaacaaatggaaatacaatccaatgaaagtacttcacctgcaagatgcacaataattttcaactctgtgcagaagaatatttatttttggttttaatttatcatggttttttgttgttttcgttttgaacttatccttcctcccacaaaaaaagaaaagaagaaaaaattccaagcagcaaaacttactttgtttgtaaggtattcatttaggtttgaaaatactatttaataagggcagaagggctatatatgatttggctattatttctagacactccatccacatgattccactaacaaggattaccaggaataaaggtaggtatgcaaaatgtattagctacccattattctcgcactaaccaccagaagacttgaaaatcttaaaaaaaaaaaacaaaaaaacaagaaaaggcaacatctcattttaaatagtacaattcagaagggatactaaatcaataaaaaccaggactcagacactacagttttcatcagtgtaattttatgtcttgtttctttctatatgaacttgtttatttagtctttttttcataatattctcatagagtttctgctagatctagagctctgctcagtgcctcttataaaaacaatatataagtctcatatgctgtcttgagaatccaagagaatcacatgcagctctgcaacagtttttgctcaaaaatgttactgactaaagcaactgtccttcctgtttccttattgctaccaaggaccagcagggagaaatgtcttctcccagcagtgaattctgttatgcaatttattcttgatgctcaggcctggttaagctgaggcttacctttaataacagcctccaagggaatgaattattcagttaatgtaatagcacacattaaagagtgtaaaatcaattgaggcattttattaatatcttggttcttttatacaaacaatgtatcattatcttcattctataaggtcattgttactacttctctcaaattgcactttctggtaaaaagttaaaaatttttaaggaaaaaataatttcaatggttaaagttttttttcctcattgtattcatagacaaatttttttcaatatattttgcaagaaaaatctttgaataagactaactgcatttaaaaggaataacctccttctccctttccccaactacaaaaatgtttggcaactttgtgtttacatttaaagatcatttgcacctttttcaaggaaaaaaagtattgagtaaacaattgtttacatatatcatttatgcttttttctagcatgtataacttttttaaataaaggtagtatttaccattaaaaaaattttagctaatgctttttatccttgtacttttgttatttaatttggaatttctgtttctatataatttattttatctgtatgtaaagttacaagtgctttcaacttgaataaaaggattgccagctagaa

SEQ ID NO: 421358 - DNA, 1817 bp, Homo sapiens
gaaaggaaatagctctacgagcggatcctgcctgcgttagcggcggtggaggaggaggcagagaggagtggagggcggagtagacggaggaggctgctgcagagaagaaagtgtcagagccggttcggctttagagtgtggtgaagggtacttttcatggtgcatggaaggaaagccaatgcgcaggtgtaccaacattcgaccaggagagactggaatggatgtaacaagccgctgcacccttggagaccccaacaaactgccagaaggggttccccaacctgcccgcatgccctatatctcagacaagcaccctcgacaaaccttggaagtgattaaccttctgagaaagcaccgggagctatgtgatgtggtgctagttgtgggcgccaagaagatatatgcccatcgagtcattttgtcagcctgtagtccctacttccgagctatgtttacaggagaattggcagagagccgtcagacagaagtagtgatccgagacattgacgagagggctatggaattactgattgactttgcgtatacctcccagataacagtagaagagggcaatgttcagactcttctgccagctgcttgcctcctccagctggcagaaatacaggaagcctgctgtgaattcttaaagagacaattagatccttctaactgcctgggcattcgggcttttgctgacacacattcatgtcgtgagttgctaaggatagcagacaagttcacccaacataactttcaagaggtaatggagagtgaagagttcatgttgcttccagccaatcaactcattgatataatatccagtgatgagctaaacgttcgcagtgaagaacaagtgttcaatgcagtgatggcctgggtcaaatacagtattcaggaaagacgtcctcaattaccccaggtgctgcagcatgttcgtttgcctttgcttagtcccaagttcctggtcggcacagtaggctctgatcccctcatcaaaagtgatgaagaatgcagagacttggtagatgaggctaaaaactacctcctattgccgcaagaacgaccactaatgcaaggaccaaggacgagaccacggaaacctatccgatgtggggaagtactctttgcagttggtggttggtgcagtggagatgccatttccagtgttgaacgatatgatccacagaccaatgaatggagaatggtggcttcaatgagcaaaaggagatgcggagttggggtcagtgttcttgatgatctgttatatgcagtaggaggccatgatggatcctcttatctcaatagtgttgaaaggtatgaccccaaaacaaaccagtggagcagtgatgtggcccctacaagcacctgcaggacaagtgttggtgtagcagtacttggaggctttctttatgctgtgggtggccaggatggtgtgtcttgcctcaacattgttgagaggtgatcttttttttaagtcattttccgtatttttattttaaagaacatagagctctttaaaagaaaaactacaggttgggcgtggtggctcacacctgtaatcctagcactttggaaggccaaggcaggtggattgcttgaactcaggagttcgagaccagcctgggcaacatggtgagataaaaaatacaaaaaaaaaaaaaaaaattagccgggcgtggtggtgcatgtagttccagctacttgtggggctgaggtgggaggatcacttgagcccaggaggttgaggctgcagtgagctgagatcacgccactgtactccagcctgggtgcaaagtgagaccctgtatcaaggggga

SEQ ID NO: 421359 - DNA, 504 bp, Homo sapiens
agaagggatcatggcagacgggaggcaggactagactgaagctccagaccgggcaacatgcggaggcttgattgcaaatgttagctccagactgactgcaagaaaaaatcagcaatctcaagaggacccacagaccctctgaagaaagcggactgctcctgcagcacccgggagaaaccccaaatattgggagtgccccaactgcagaaatgggaaagggagaccctcctctcccaaacacacacccccactggagaagctgaaggtctgtttgcaggagaagtttccaactttacctggagctgagtcaagttagagaggcaagcgaaataacaggggtagaggaagcagcagaaaggccctgggagtttgctgggtccccaagcaggccattcctgcctggcaccacagggatccattgggagggtggccagaggagcaggggataaaactccccagggagaaggaattctctagctgaactttgtaacaatttgaacaggg

SEQ ID NO: 421360 - DNA, 2985 bp, Homo sapiens
cgctggggcgctttccgaggaaattcgggactcgagtttcccggggaagaggcgcggcctgagcccggcgagggtggggagggcaggcgcaggtggaccccggcgccccccgagccccgctgtgaccttggccgcgggggaggggctgggccgctgcggggcagtcgcggccgccagagggggcagcggagaagaacttgcccaacttggcggcgcgggctggggcggttctgcgcctccgcgcccgcctccccggcctccgccttctcccctcccgcgagcctcctcccctcccgcgagcctcctcccctgggccctcctcccgtcctccccgccgccgccggtcccggtgcgcgcccatccctgcccgcagccccgcgcgccggccgagtcgctgagccgcggctgccggacgggacgggaccggctaggctgggcgcgccccccgggccccgccgtgggcatgggcgcactggcccgggcgctgctgctgcctctgctggcccagtggctcctgcgcgccgccccggagctggcccccgcgcccttcacgctgcccctccgggtggccgcggccacgaaccgcgtagttgcgcccaccccgggacccgggacccctgccgagcgccacgccgacggcttggcgctcgccctggagcctgccctggcgtcccccgcgggcgccgccaacttcttggccatggtagacaacctgcagggggactctggccgcggctactacctggagatgctgatcgggacccccccgcagaagctacagattctcgttgacactggaagcagtaactttgccgtggcaggaaccccgcactcctacatagacacgtactttgacacagagaggtctagcacataccgctccaagggctttgacgtcacagtgaagtacacacaaggaagctggacgggcttcgttggggaagacctcgtcaccatccccaaaggcttcaatacttcttttcttgtcaacattgccactatttttgaatcagagaatttctttttgcctgggattaaatggaatggaatacttggcctagcttatgccacacttgccaagccatcaagttctctggagaccttcttcgactccctggtgacacaagcaaacatccccaacgttttctccatgcagatgtgtggagccggcttgcccgttgctggatctgggaccaacggaggtagtcttgtcttgggtggaattgaaccaagtttgtataaaggagacatctggtatacccctattaaggaagagtggtactaccagatagaaattctgaaattggaaattggaggccaaagccttaatctggactgcagagagtataacgcagacaaggccatcgtggacagtggcaccacgctgctgcgcctgccccagaaggtgtttgatgcggtggtggaagctgtggcccgcgcatctctgattccagaattctctgatggtttctggactgggtcccagctggcgtgctggacgaattcggaaacaccttggtcttacttccctaaaatctccatctacctgagagacgagaactccagcaggtcattccgtatcacaatcctgcctcagctttacattcagcccatgatgggggccggcctgaattatgaatgttaccgattcggcatttccccatccacaaatgcgctggtgatcggtgccacggtgatggagggcttctacgtcatcttcgacagagcccagaagagggtgggcttcgcagcgagcccctgtgcagaaattgcaggtgctgcagtgtctgaaatttccgggcctttctcaacagaggatgtagccagcaactgtgtccccgctcagtctttgagcgagcccattttgtggattgtgtcctatgcgctcatgagcgtctgtggagccatcctccttgtcttaatcgtcctgctgctgctgccgttccggtgtcagcgtcgcccccgtgaccctgaggtcgtcaatgatgagtcctctctggtcagacatcgctggaaatgaatagccaggcctgacctcaagcaaccatgaactcagctattaagaaaatcacatttccagggcagcagccgggatcgatggtggcgctttctcctgtgcccacccgtcttcaatctctgttctgctcccagatgccttctagattcactgtcttttgattcttgattttcaagctttcaaatcctccctacttccaagaaaaataattaaaaaaaaaacttcattctaaaccaaaacagagtggattgggctgcaggctctatggggttcgttatgccaaagtgtctacatgtgccaccaacataaaacaaaaccaagccttggctcgttctcttctctcttcaatctctggaaaaataagtacatatagttgataacccctcttagcttacaggaagctttttgtattaattgcctttgaggttattttccgccagacctcaacctgggtcaaagtggtacaggaaggcttgcagtatgatggcaggagaatcagcctggggcctggggatgtaaccaagctgtacccttgagacctggaaccagagccacaggccccttttgtgggtttctctgtgctctgaatgggagccagaattcactaggaggtcatcaaccgatggtcctcacaagcctcttctgaagatggaaggccttttgcccgttgaggtagaggggaaggaaatctcctcttttgtacccaatacttatgttgtattgttggtgcgaaagtaaaaacactacctcttttgagactttgcccagggtcctgtgcctggatgggggtgcaggcagccttgaccacggctgttcccctcacccaaaagaattatcatcccaacagccaagacccaacaggtgctgaactgtgcatcaaccaggaagagttctatccccaagctggccactatcacatatgcttactcttgcttaaaattaataaatcatgttttgatgagaaaaaa

SEQ ID NO: 421361 - DNA, 2835 bp, Homo sapiens
cgctggggcgctttccgaggaaattcgggactcgagtttcccggggaagaggcgcggcctgagcccggcgagggtggggagggcaggcgcaggtggaccccggcgccccccgagccccgctgtgaccttggccgcgggggaggggctgggccgctgcggggcagtcgcggccgccagagggggcagcggagaagaacttgcccaacttggcggcgcgggctggggcggttctgcgcctccgcgcccgcctccccggcctccgccttctcccctcccgcgagcctcctcccctcccgcgagcctcctcccctgggccctcctcccgtcctccccgccgccgccggtcccggtgcgcgcccatccctgcccgcagccccgcgcgccggccgagtcgctgagccgcggctgccggacgggacgggaccggctaggctgggcgcgccccccgggccccgccgtgggcatgggcgcactggcccgggcgctgctgctgcctctgctggcccagtggctcctgcgcgccgccccggagctggcccccgcgcccttcacgctgcccctccgggtggccgcggccacgaaccgcgtagttgcgcccaccccgggacccgggacccctgccgagcgccacgccgacggcttggcgctcgccctggagcctgccctggcgtcccccgcgggcgccgccaacttcttggccatggtagacaacctgcagggggactctggccgcggctactacctggagatgctgatcgggacccccccgcagaagctacagattctcgttgacactggaagcagtaactttgccgtggcaggaaccccgcactcctacatagacacgtactttgacacagagaggtctagcacataccgctccaagggctttgacgtcacagtgaagtacacacaaggaagctggacgggcttcgttggggaagacctcgtcaccatccccaaaggcttcaatacttcttttcttgtcaacattgccactatttttgaatcagagaatttctttttgcctgggattaaatggaatggaatacttggcctagcttatgccacacttgccaagccatcaagttctctggagaccttcttcgactccctggtgacacaagcaaacatccccaacgttttctccatgcagatgtgtggagccggcttgcccgttgctggatctgggaccaacggaggtagtcttgtcttgggtggaattgaaccaagtttgtataaaggagacatctggtatacccctattaaggaagagtggtactaccagatagaaattctgaaattggaaattggaggccaaagccttaatctggactgcagagagtataacgcagacaaggccatcgtggacagtggcaccacgctgctgcgcctgccccagaaggtgtttgatgcggtggtggaagctgtggcccgcgcatctctgctttacattcagcccatgatgggggccggcctgaattatgaatgttaccgattcggcatttccccatccacaaatgcgctggtgatcggtgccacggtgatggagggcttctacgtcatcttcgacagagcccagaagagggtgggcttcgcagcgagcccctgtgcagaaattgcaggtgctgcagtgtctgaaatttccgggcctttctcaacagaggatgtagccagcaactgtgtccccgctcagtctttgagcgagcccattttgtggattgtgtcctatgcgctcatgagcgtctgtggagccatcctccttgtcttaatcgtcctgctgctgctgccgttccggtgtcagcgtcgcccccgtgaccctgaggtcgtcaatgatgagtcctctctggtcagacatcgctggaaatgaatagccaggcctgacctcaagcaaccatgaactcagctattaagaaaatcacatttccagggcagcagccgggatcgatggtggcgctttctcctgtgcccacccgtcttcaatctctgttctgctcccagatgccttctagattcactgtcttttgattcttgattttcaagctttcaaatcctccctacttccaagaaaaataattaaaaaaaaaacttcattctaaaccaaaacagagtggattgggctgcaggctctatggggttcgttatgccaaagtgtctacatgtgccaccaacataaaacaaaaccaagccttggctcgttctcttctctcttcaatctctggaaaaataagtacatatagttgataacccctcttagcttacaggaagctttttgtattaattgcctttgaggttattttccgccagacctcaacctgggtcaaagtggtacaggaaggcttgcagtatgatggcaggagaatcagcctggggcctggggatgtaaccaagctgtacccttgagacctggaaccagagccacaggccccttttgtgggtttctctgtgctctgaatgggagccagaattcactaggaggtcatcaaccgatggtcctcacaagcctcttctgaagatggaaggccttttgcccgttgaggtagaggggaaggaaatctcctcttttgtacccaatacttatgttgtattgttggtgcgaaagtaaaaacactacctcttttgagactttgcccagggtcctgtgcctggatgggggtgcaggcagccttgaccacggctgttcccctcacccaaaagaattatcatcccaacagccaagacccaacaggtgctgaactgtgcatcaaccaggaagagttctatccccaagctggccactatcacatatgcttactcttgcttaaaattaataaatcatgttttgatgagaaaaaa

SEQ ID NO: 421362 - DNA, 1500 bp, Homo sapiens
  misc_feature (131)..(131): n is a, c, g, or t
  misc_feature (138)..(139): n is a, c, g, or t
  misc_feature (147)..(147): n is a, c, g, or t
  misc_feature (155)..(155): n is a, c, g, or t
  misc_feature (158)..(158): n is a, c, g, or t
  misc_feature (164)..(164): n is a, c, g, or t
  misc_feature (173)..(173): n is a, c, g, or t
  misc_feature (190)..(190): n is a, c, g, or t
  misc_feature (200)..(201): n is a, c, g, or t
  misc_feature (211)..(212): n is a, c, g, or t
agaaatcaccaaagacatgagcgtaagccaccatgagcactgtcaacagaaacaataatctgtagattcatcccacaaatactataaatattagaaactgttgagctatagactgggtatggtggctcatncctgtanncccagcantttgggangcnaaggtnggaggattncttgagcccaggagttngagactagcnngggcaatatnntgagaccctacttcttttcttgtcaacattgccactatttttgaatcagagaatttctttttgcctgggattaaatggaatggaatacttggcctagcttatgccacacttgccaagccatcaagttctctggagaccttcttcgactccctggtgacacaagcaaacatccccaacgttttctccatgcagatgtgtggagccggcttgcccgttgctggatctgggaccaacggaggtagtcttgtcttgggtggaattgaaccaagtttgtataaaggagacatctggtatacccctattaaggaagagtggtactaccagatagaaattctgaaattggaaattggaggccaaagccttaatctggactgcagagagtataacgcagacaaggccatcgtggacagtggcaccacgctgctgcgcctgccccagaaggtgtttgatgcggtggtggaagctgtggcccgcgcatctctgattccagaattctctgatggtttctggactgggtcccagctggcgtgctggacgaattcggaaacaccttggtcttacttccctaaaatctccatctacctgagagacgagaactccagcaggtcattccgtatcacaatcctgcctcagctttacattcagcccatgatgggggccggcctgaattatgaatgttaccgattcggcatttccccatccacaaatgcgctggtgatcggtgccacggtgatggagggcttctacgtcatcttcgacagagcccagaagagggtgggcttcgcagcgagcccctgtgcagaaattgcaggtgctgcagtgtctgaaatttccgggcctttctcaacagaggatgtagccagcaactgtgtccccgctcagtctttgagcgagcccattttgtggattgtgtcctatgcgctcatgagcgtctgtggagccatcctccttgtcttaatcgtcctgctgctgctgccgttccggtgtcagcgtcgcccccgtgaccctgaggtcgtcaatgatgagtcctctctggtcagacatcgctggaaatgaatagccaggcctgacctcaagcaaccatgaactcagctattaagaaaatcacatttccagggcagcagccgggatcgatggtggcgctttctcctgtgcccacccgtcttcaatctctgttctgctcccagatgccttctagattcactgtcttttgattcttgattttcaagctttcaaatcctccctacttccaagaaaaataattaaaaaaaaaacttcattctaaacc

SEQ ID NO: 421363 - DNA, 2980 bp, Homo sapiens
cgctggggcgctttccgaggaaattcgggactcgagtttcccggggaagaggcgcggcctgagcccggcgagggtggggagggcaggcgcaggtggaccccggcgccccccgagccccgctgtgaccttggccgcgggggaggggctgggccgctgcggggcagtcgcggccgccagagggggcagcggagaagaacttgcccaacttggcggcgcgggctggggcggttctgcgcctccgcgcccgcctccccggcctccgccttctcccctcccgcgagcctcctcccctcccgcgagcctcctcccctgggccctcctcccgtcctccccgccgccgccggtcccggtgcgcgcccatccctgcccgcagccccgcgcgccggccgagtcgctgagccgcggctgccggacgggacgggaccggctaggctgggcgcgccccccgggccccgccgtgggcatgggcgcactggcccgggcgctgctgctgcctctgctggcccagtggctcctgcgcgccgccccggagctggcccccgcgcccttcacgctgcccctccgggtggccgcggccacgaaccgcgtagttgcgcccaccccgggacccgggacccctgccgagcgccacgccgacggcttggcgctcgccctggagcctgccctggcgtcccccgcgggcgccgccaacttcttggccatggtagacaacctgcagggggactctggccgcggctactacctggagatgctgatcgggacccccccgcagaagctacagattctcgttgacactggaagcagtaactttgccgtggcaggaaccccgcactcctacatagacacgtactttgacacagagaggtctagcacataccgctccaagggctttgacgtcacagtgaagtacacacaaggaagctggacgggcttcgttggggaagacctcgtcaccatccccaaaggcttcaatacttcttttcttgtcaacattgccactatttttgaatcagagaatttctttttgcctgggattaaatggaatggaatacttggcctagcttatgccacacttgccaagccatcaagttctctggagaccttcttcgactccctggtgacacaagcaaacatccccaacgttttctccatgcagatgtgtggagccggcttgcccgttgctggatctgggaccaacggaggtagtcttgtcttgggtggaattgaaccaagtttgtataaaggagacatctggtatacccctattaaggaagagtggtactaccagatagaaattctgaaattggaaattggaggccaaagccttaatctggactgcagagagtataacgcagacaaggccatcgtggacagtggcaccacgctgctgcgcctgccccagaaggtgtttgatgcggtggtggaagctgtggcccgcgcatctctgattccagaattctctgatggtttctggactgggtcccagctggcgtgctggacgaattcggaaacaccttggtcttacttccctaaaatctccatctacctgagagacgagaactccagcaggtcattccgtatcacaatcctgcctcagctttacattcagcccatgatgggggccggcctgaattatgaatgttaccgattcggcatttccccatccacaaatgcgctggtgatcggtgccacggtgatggagggcttctacgtcatcttcgacagagcccagaagagggtgggcttcgcagcgagcccctgtgcagaaattgcaggtgctgcagtgtctgaaatttccgggcctttctcaacagaggatgtagccagcaactgtgtccccgctcagtctttgagcgagcccattttgtggattgtgtcctatgcgctcatgagcgtctgtggagccatcctccttgtcttaatcgtcctgctgctgctgccgttccggtgtcagcgtcgcccccgtgaccctgaggtcgtcaatgatgagtcctctctggtcagacatcgctggaaatgaatagccaggcctgacctcaagcaaccatgaactcagctattaagaaaatcacatttccagggcagcagccgggatcgatggtggcgctttctcctgtgcccacccgtcttcaatctctgttctgctcccagatgccttctagattcactgtcttttgattcttgattttcaagctttcaaatcctccctacttccaagaaaaataattaaaaaaaaaacttcattctaaaccaaaacagagtggattgggctgcaggctctatggggttcgttatgccaaagtgtctacatgtgccaccaacataaaacaaaaccaagccttggctcgttctcttctctcttcaatctctggaaaaataagtacatatagttgataacccctcttagcttacaggaagctttttgtattaattgcctttgaggttattttccgccagacctcaacctgggtcaaagtggtacaggaaggcttgcagtatgatggcaggagaatcagcctggggcctggggatgtaaccaagctgtacccttgagacctggaaccagagccacaggccccttttgtgggtttctctgtgctctgaatgggagccagaattcactaggaggtcatcaaccgatggtcctcacaagcctcttctgaagatggaaggccttttgcccgttgaggtagaggggaaggaaatctcctcttttgtacccaatacttatgttgtattgttggtgcgaaagtaaaaacactacctcttttgagactttgcccagggtcctgtgcctggatgggggtgcaggcagccttgaccacggctgttcccctcacccaaaagaattatcatcccaacagccctgcccccccaggttgttgtatctcctcctaccagcctcccgcttccatcggcctgtggattattgtgacgtaatattcatatagcttataactaataaatcattttttaataa

SEQ ID NO: 421364 - DNA, 2343 bp, Homo sapiens
cgctggggcgctttccgaggaaattcgggactcgagtttcccggggaagaggcgcggcctgagcccggcgagggtggggagggcaggcgcaggtggaccccggcgccccccgagccccgctgtgaccttggccgcgggggaggggctgggccgctgcggggcagtcgcggccgccagagggggcagcggagaagaacttgcccaacttggcggcgcgggctggggcggttctgcgcctccgcgcccgcctccccggcctccgccttctcccctcccgcgagcctcctcccctcccgcgagcctcctcccctgggccctcctcccgtcctccccgccgccgccggtcccggtgcgcgcccatccctgcccgcagccccgcgcgccggccgagtcgctgagccgcggctgccggacgggacgggaccggctaggctgggcgcgccccccgggccccgccgtgggcatgggcgcactggcccgggcgctgctgctgcctctgctggcccagtggctcctgcgcgccgccccggagctggcccccgcgcccttcacgctgcccctccgggtggccgcggccacgaaccgcgtagttgcgcccaccccgggacccgggacccctgccgagcgccacgccgacggcttggcgctcgccctggagcctgccctggcgtcccccgcgggcgccgccaacttcttggccatggtagacaacctgcagggggactctggccgcggctactacctggagatgctgatcgggacccccccgcagaagctacagattctcgttgacactggaagcagtaactttgccgtggcaggaaccccgcactcctacatagacacgtactttgacacagagaggtctagcacataccgctccaagggctttgacgtcacagtgaagtacacacaaggaagctggacgggcttcgttggggaagacctcgtcaccatccccaaaggcttcaatacttcttttcttgtcaacattgccactatttttgaatcagagaatttctttttgcctgggattaaatggaatggaatacttggcctagcttatgccacacttgccaagccatcaagttctctggagaccttcttcgactccctggtgacacaagcaaacatccccaacgttttctccatgcagatgtgtggagccggcttgcccgttgctggatctgggaccaacggaggtagtcttgtcttgggtggaattgaaccaagtttgtataaaggagacatctggtatacccctattaaggaagagtggtactaccagatagaaattctgaaattggaaattggaggccaaagccttaatctggactgcagagagtataacgcagacaaggccatcgtggacagtggcaccacgctgctgcgcctgccccagaaggtgtttgatgcggtggtggaagctgtggcccgcgcatctctgattccagaattctctgatggtttctggactgggtcccagctggcgtgctggacgaattcggaaacaccttggtcttacttccctaaaatctccatctacctgagagacgagaactccagcaggtcattccgtatcacaatcctgcctcagctttacattcagcccatgatgggggccggcctgaattatgaatgttaccgattcggcatttccccatccacaaatgcgctggtgatcggtgccacggtgatggagggcttctacgtcatcttcgacagagcccagaagagggtgggcttcgcagcgagcccctgtgcagaaattgcaggtgctgcagtgtctgaaatttccgggcctttctcaacagaggatgtagccagcaactgtgtccccgctcagtctttgagcgagcccattttgtggattgtgtcctatgcgctcatgagcgtctgtggagccatcctccttgtcttaatcgtcctgctgctgctgccgttccggtgtcagcgtcgcccccgtgaccctgaggtcgtcaatgatgagtcctctctggtcagacatcgctggaaatgaatagccaggcctgacctcaagcaaccatgaactcagctattaagaaaatcacatttccagggcagcagccgggatcgatggtggcgctttctcctgtgcccacccgtcttcaatctctgttctgctcccagatgccttctagattcactgtcttttgattcttgattttcaagctttcaaatcctccctacttccaagaaaaataattaaaaaaaaaacttcattctaaaccaaaacagagtggattgggctgcaggctctatggggttcgttatgccaaagtgtctacatgtgccaccaacataaaacaaaaccaagccttg

SEQ ID NO: 421365 - DNA, 2583 bp, Homo sapiens
aagacctgtacagtgtgtccatagctgtcttattcatagtagcctcaaaatggacacaactcaagggcccgtcgaaagcagaggcaaatcatggtgtgtccctgcatcgtgaagagaaacaaagggctgatgcaacatgaggacgtctcaaagacaagttgcacttaagaagctatgctaagaaaacaaacacacagaagcctacatcattacatgtatagaatgttcaagaactgatgaaaccagtccgtggtcacaaaagccagaaagtggttgcttctggggaccagaagggaaaggggcataaaggaaccttttgaggtgaatagaagtttctgcatcttggtttggcacacatgccaaaactcaccagctacagattctcgttgacactggaagcagtaactttgccgtggcaggaaccccgcactcctacatagacacgtactttgacacagagaggtctagcacataccgctccaagggctttgacgtcacagtgaagtacacacaaggaagctggacgggcttcgttggggaagacctcgtcaccatccccaaaggcttcaatacttcttttcttgtcaacattgccactatttttgaatcagagaatttctttttgcctgggattaaatggaatggaatacttggcctagcttatgccacacttgccaagccatcaagttctctggagaccttcttcgactccctggtgacacaagcaaacatccccaacgttttctccatgcagatgtgtggagccggcttgcccgttgctggatctgggaccaacggaggtagtcttgtcttgggtggaattgaaccaagtttgtataaaggagacatctggtatacccctattaaggaagagtggtactaccagatagaaattctgaaattggaaattggaggccaaagccttaatctggactgcagagagtataacgcagacaaggccatcgtggacagtggcaccacgctgctgcgcctgccccagaaggtgtttgatgcggtggtggaagctgtggcccgcgcatctctgattccagaattctctgatggtttctggactgggtcccagctggcgtgctggacgaattcggaaacaccttggtcttacttccctaaaatctccatctacctgagagacgagaactccagcaggtcattccgtatcacaatcctgcctcagctttacattcagcccatgatgggggccggcctgaattatgaatgttaccgattcggcatttccccatccacaaatgcgctggtgatcggtgccacggtgatggagggcttctacgtcatcttcgacagagcccagaagagggtgggcttcgcagcgagcccctgtgcagaaattgcaggtgctgcagtgtctgaaatttccgggcctttctcaacagaggatgtagccagcaactgtgtccccgctcagtctttgagcgagcccattttgtggattgtgtcctatgcgctcatgagcgtctgtggagccatcctccttgtcttaatcgtcctgctgctgctgccgttccggtgtcagcgtcgcccccgtgaccctgaggtcgtcaatgatgagtcctctctggtcagacatcgctggaaatgaatagccaggcctgacctcaagcaaccatgaactcagctattaagaaaatcacatttccagggcagcagccgggatcgatggtggcgctttctcctgtgcccacccgtcttcaatctctgttctgctcccagatgccttctagattcactgtcttttgattcttgattttcaagctttcaaatcctccctacttccaagaaaaataattaaaaaaaaaacttcattctaaaccaaaacagagtggattgggctgcaggctctatggggttcgttatgccaaagtgtctacatgtgccaccaacataaaacaaaaccaagccttggctcgttctcttctctcttcaatctctggaaaaataagtacatatagttgataacccctcttagcttacaggaagctttttgtattaattgcctttgaggttattttccgccagacctcaacctgggtcaaagtggtacaggaaggcttgcagtatgatggcaggagaatcagcctggggcctggggatgtaaccaagctgtacccttgagacctggaaccagagccacaggccccttttgtgggtttctctgtgctctgaatgggagccagaattcactaggaggtcatcaaccgatggtcctcacaagcctcttctgaagatggaaggccttttgcccgttgaggtagaggggaaggaaatctcctcttttgtacccaatacttatgttgtattgttggtgcgaaagtaaaaacactacctcttttgagactttgcccagggtcctgtgcctggatgggggtgcaggcagccttgaccacggctgttcccctcacccaaaagaattatcatcccaacagccaagacccaacaggtgctgaactgtgcatcaaccaggaagagttctatccccaagctggccactatcacatatgcttactcttgcttaaaattaataaatcatgttttgatgagaaaaaa

SEQ ID NO: 421366 - DNA, 2260 bp, Homo sapiens
ctctcaaatgcctaagattaggatccaccacctgccacggtaacctacttccacggcttctcacaccccctcacaaggcagtcatgatgatagatgtgactgcgtcgaatggcttccagaaatatgatcttatttgtacaacagagccgtgcccaaaggaagaatgccaaccagtgggaagctctgctggggctttctgaattcctagacccaatcacaagctggtgtactgttgaaccatgaaaaaattgagtataaacaccaggaatgtctgtggcgcgtggcgtctacactgggtgacccatgtctacactgtgagtcctaagcgggtgcccctctctgtcgccctcccgcagccatcaagttctctggagaccttcttcgactccctggtgacacaagcaaacatccccaacgttttctccatgcagatgtgtggagccggcttgcccgttgctggatctgggaccaacggaggtagtcttgtcttgggtggaattgaaccaagtttgtataaaggagacatctggtatacccctattaaggaagagtggtactaccagatagaaattctgaaattggaaattggaggccaaagccttaatctggactgcagagagtataacgcagacaaggccatcgtggacagtggcaccacgctgctgcgcctgccccagaaggtgtttgatgcggtggtggaagctgtggcccgcgcatctctgattccagaattctctgatggtttctggactgggtcccagctggcgtgctggacgaattcggaaacaccttggtcttacttccctaaaatctccatctacctgagagacgagaactccagcaggtcattccgtatcacaatcctgcctcagctttacattcagcccatgatgggggccggcctgaattatgaatgttaccgattcggcatttccccatccacaaatgcgctggtgatcggtgccacggtgatggagggcttctacgtcatcttcgacagagcccagaagagggtgggcttcgcagcgagcccctgtgcagaaattgcaggtgctgcagtgtctgaaatttccgggcctttctcaacagaggatgtagccagcaactgtgtccccgctcagtctttgagcgagcccattttgtggattgtgtcctatgcgctcatgagcgtctgtggagccatcctccttgtcttaatcgtcctgctgctgctgccgttccggtgtcagcgtcgcccccgtgaccctgaggtcgtcaatgatgagtcctctctggtcagacatcgctggaaatgaatagccaggcctgacctcaagcaaccatgaactcagctattaagaaaatcacatttccagggcagcagccgggatcgatggtggcgctttctcctgtgcccacccgtcttcaatctctgttctgctcccagatgccttctagattcactgtcttttgattcttgattttcaagctttcaaatcctccctacttccaagaaaaataattaaaaaaaaaacttcattctaaaccaaaacagagtggattgggctgcaggctctatggggttcgttatgccaaagtgtctacatgtgccaccaacataaaacaaaaccaagccttggctcgttctcttctctcttcaatctctggaaaaataagtacatatagttgataacccctcttagcttacaggaagctttttgtattaattgcctttgaggttattttccgccagacctcaacctgggtcaaagtggtacaggaaggcttgcagtatgatggcaggagaatcagcctggggcctggggatgtaaccaagctgtacccttgagacctggaaccagagccacaggccccttttgtgggtttctctgtgctctgaatgggagccagaattcactaggaggtcatcaaccgatggtcctcacaagcctcttctgaagatggaaggccttttgcccgttgaggtagaggggaaggaaatctcctcttttgtacccaatacttatgttgtattgttggtgcgaaagtaaaaacactacctcttttgagactttgcccagggtcctgtgcctggatgggggtgcaggcagccttgaccacggctgttcccctcacccaaaagaattatcatcccaacagccaagacccaacaggtgctgaactgtgcatcaaccaggaagagttctatccccaagctggccactatcacatatgcttactcttgcttaaaattaataaatcatgttttgatgagaaaaaa

SEQ ID NO: 421367 - DNA, 1999 bp, Homo sapiens
cttgcagctatcggtcatggcggacgatagcatggttgcttgtatccgggattaatggaatgaatacttggctagcttatgcacacttgactacgccatcaagttctctggagaccttcttcgactccctggtgacacaagcaaacatccccaacgttttctccatgcagatgtgtggagccggcttgcccgttgctggatctgggaccaacggaggtagtcttgtcttgggtggaattgaaccaagtttgtataaaggagacatctggtatacccctattaaggaagagtggtactaccagatagaaattctgaaattggaaattggaggccaaagccttaatctggactgcagagagtataacgcagacaaggccatcgtggacagtggcaccacgctgctgcgcctgccccagaaggtgtttgatgcggtggtggaagctgtggcccgcgcatctctgattccagaattctctgatggtttctggactgggtcccagctggcgtgctggacgaattcggaaacaccttggtcttacttccctaaaatctccatctacctgagagacgagaactccagcaggtcattccgtatcacaatcctgcctcagctttacattcagcccatgatgggggccggcctgaattatgaatgttaccgattcggcatttccccatccacaaatgcgctggtgatcggtgccacggtgatggagggcttctacgtcatcttcgacagagcccagaagagggtgggcttcgcagcgagcccctgtgcagaaattgcaggtgctgcagtgtctgaaatttccgggcctttctcaacagaggatgtagccagcaactgtgtccccgctcagtctttgagcgagcccattttgtggattgtgtcctatgcgctcatgagcgtctgtggagccatcctccttgtcttaatcgtcctgctgctgctgccgttccggtgtcagcgtcgcccccgtgaccctgaggtcgtcaatgatgagtcctctctggtcagacatcgctggaaatgaatagccaggcctgacctcaagcaaccatgaactcagctattaagaaaatcacatttccagggcagcagccgggatcgatggtggcgctttctcctgtgcccacccgtcttcaatctctgttctgctcccagatgccttctagattcactgtcttttgattcttgattttcaagctttcaaatcctccctacttccaagaaaaataattaaaaaaaaaacttcattctaaaccaaaacagagtggattgggctgcaggctctatggggttcgttatgccaaagtgtctacatgtgccaccaacataaaacaaaaccaagccttggctcgttctcttctctcttcaatctctggaaaaataagtacatatagttgataacccctcttagcttacaggaagctttttgtattaattgcctttgaggttattttccgccagacctcaacctgggtcaaagtggtacaggaaggcttgcagtatgatggcaggagaatcagcctggggcctggggatgtaaccaagctgtacccttgagacctggaaccagagccacaggccccttttgtgggtttctctgtgctctgaatgggagccagaattcactaggaggtcatcaaccgatggtcctcacaagcctcttctgaagatggaaggccttttgcccgttgaggtagaggggaaggaaatctcctcttttgtacccaatacttatgttgtattgttggtgcgaaagtaaaaacactacctcttttgagactttgcccagggtcctgtgcctggatgggggtgcaggcagccttgaccacggctgttcccctcacccaaaagaattatcatcccaacagccaagacccaacaggtgctgaactgtgcatcaaccaggaagagttctatccccaagctggccactatcacatatgcttactcttgcttaaaattaataaatcatgttttgatgagaaaaaa

SEQ ID NO: 421368 - DNA, 1793 bp, Homo sapiens
  misc_feature (23)..(23): n is a, c, g, or t
acaaagagatacagcgtccccgnttattcatgagggatgcctagtttattagtggacatctggtatacccctattaaggaagagtggtactaccagatagaaattctgaaattggaaattggaggccaaagccttaatctggactgcagagagtataacgcagacaaggccatcgtggacagtggcaccacgctgctgcgcctgccccagaaggtgtttgatgcggtggtggaagctgtggcccgcgcatctctgattccagaattctctgatggtttctggactgggtcccagctggcgtgctggacgaattcggaaacaccttggtcttacttccctaaaatctccatctacctgagagacgagaactccagcaggtcattccgtatcacaatcctgcctcagctttacattcagcccatgatgggggccggcctgaattatgaatgttaccgattcggcatttccccatccacaaatgcgctggtgatcggtgccacggtgatggagggcttctacgtcatcttcgacagagcccagaagagggtgggcttcgcagcgagcccctgtgcagaaattgcaggtgctgcagtgtctgaaatttccgggcctttctcaacagaggatgtagccagcaactgtgtccccgctcagtctttgagcgagcccattttgtggattgtgtcctatgcgctcatgagcgtctgtggagccatcctccttgtcttaatcgtcctgctgctgctgccgttccggtgtcagcgtcgcccccgtgaccctgaggtcgtcaatgatgagtcctctctggtcagacatcgctggaaatgaatagccaggcctgacctcaagcaaccatgaactcagctattaagaaaatcacatttccagggcagcagccgggatcgatggtggcgctttctcctgtgcccacccgtcttcaatctctgttctgctcccagatgccttctagattcactgtcttttgattcttgattttcaagctttcaaatcctccctacttccaagaaaaataattaaaaaaaaaacttcattctaaaccaaaacagagtggattgggctgcaggctctatggggttcgttatgccaaagtgtctacatgtgccaccaacataaaacaaaaccaagccttggctcgttctcttctctcttcaatctctggaaaaataagtacatatagttgataacccctcttagcttacaggaagctttttgtattaattgcctttgaggttattttccgccagacctcaacctgggtcaaagtggtacaggaaggcttgcagtatgatggcaggagaatcagcctggggcctggggatgtaaccaagctgtacccttgagacctggaaccagagccacaggccccttttgtgggtttctctgtgctctgaatgggagccagaattcactaggaggtcatcaaccgatggtcctcacaagcctcttctgaagatggaaggccttttgcccgttgaggtagaggggaaggaaatctcctcttttgtacccaatacttatgttgtattgttggtgcgaaagtaaaaacactacctcttttgagactttgcccagggtcctgtgcctggatgggggtgcaggcagccttgaccacggctgttcccctcacccaaaagaattatcatcccaacagccaagacccaacaggtgctgaactgtgcatcaaccaggaagagttctatccccaagctggccactatcacatatgcttactcttgcttaaaattaataaatcatgttttgatgagaaaaaa

SEQ ID NO: 421369 - DNA, 1137 bp, Homo sapiens
cttgtgtcctggccgtcgttattacacgggcggatcgttgatcacggcggtagtttatactagtcggtctgtgcggtcatcgctgtggtgtgatttccggtgtcagcgtcgcccccgtgaccctgaggtcgtcaatgatgagtcctctctggtcagacatcgctggaaatgaatagccaggcctgacctcaagcaaccatgaactcagctattaagaaaatcacatttccagggcagcagccgggatcgatggtggcgctttctcctgtgcccacccgtcttcaatctctgttctgctcccagatgccttctagattcactgtcttttgattcttgattttcaagctttcaaatcctccctacttccaagaaaaataattaaaaaaaaaacttcattctaaaccaaaacagagtggattgggctgcaggctctatggggttcgttatgccaaagtgtctacatgtgccaccaacataaaacaaaaccaagccttggctcgttctcttctctcttcaatctctggaaaaataagtacatatagttgataacccctcttagcttacaggaagctttttgtattaattgcctttgaggttattttccgccagacctcaacctgggtcaaagtggtacaggaaggcttgcagtatgatggcaggagaatcagcctggggcctggggatgtaaccaagctgtacccttgagacctggaaccagagccacaggccccttttgtgggtttctctgtgctctgaatgggagccagaattcactaggaggtcatcaaccgatggtcctcacaagcctcttctgaagatggaaggccttttgcccgttgaggtagaggggaaggaaatctcctcttttgtacccaatacttatgttgtattgttggtgcgaaagtaaaaacactacctcttttgagactttgcccagggtcctgtgcctggatgggggtgcaggcagccttgaccacggctgttcccctcacccaaaagaattatcatcccaacagccaagacccaacaggtgctgaactgtgcatcaaccaggaagagttctatccccaagctggccactatcacatatgcttactcttgcttaaaattaataaatcatgttttgatgagaaaaaa

SEQ ID NO: 421370 - DNA, 2295 bp, Homo sapiens
  misc_feature (1985)..(1985): n is a, c, g, or t
cgctggggcgctttccgaggaaattcgggactcgagtttcccggggaagaggcgcggcctgagcccggcgagggtggggagggcaggcgcaggtggaccccggcgccccccgagccccgctgtgaccttggccgcgggggaggggctgggccgctgcggggcagtcgcggccgccagagggggcagcggagaagaacttgcccaacttggcggcgcgggctggggcggttctgcgcctccgcgcccgcctccccggcctccgccttctcccctcccgcgagcctcctcccctcccgcgagcctcctcccctgggccctcctcccgtcctccccgccgccgccggtcccggtgcgcgcccatccctgcccgcagccccgcgcgccggccgagtcgctgagccgcggctgccggacgggacgggaccggctaggctgggcgcgccccccgggccccgccgtgggcatgggcgcactggcccgggcgctgctgctgcctctgctggcccagtggctcctgcgcgccgccccggagctggcccccgcgcccttcacgctgcccctccgggtggccgcggccacgaaccgcgtagttgcgcccaccccgggacccgggacccctgccgagcgccacgccgacggcttggcgctcgccctggagcctgccctggcgtcccccgcgggcgccgccaacttcttggccatggtagacaacctgcagggggactctggccgcggctactacctggagatgctgatcgggacccccccgcagaagctacagattctcgttgacactggaagcagtaactttgccgtggcaggaaccccgcactcctacatagacacgtactttgacacagagaggtctagcacataccgctccaagggctttgacgtcacagtgaagtacacacaaggaagctggacgggcttcgttggggaagacctcgtcaccatccccaaaggcttcaatacttcttttcttgtcaacattgccactatttttgaatcagagaatttctttttgcctgggattaaatggaatggaatacttggcctagcttatgccacacttgccaagccatcaagttctctggagaccttcttcgactccctggtgacacaagcaaacatccccaacgttttctccatgcagatgtgtggagccggcttgcccgttgctggatctgggaccaacggaggtagtcttgtcttgggtggaattgaaccaagtttgtataaaggagacatctggtatacccctattaaggaagagtggtactaccagatagaaattctgaaattggaaattggaggccaaagccttaatctggactgcagagagtataacgcagacaaggccatcgtggacagtggcaccacgctgctgcgcctgccccagaaggtgtttgatgcggtggtggaagctgtggcccgcgcatctctgattccagaattctctgatggtttctggactgggtcccagctggcgtgctggacgaattcggaaacaccttggtcttacttccctaaaatctccatctacctgagagacgagaactccagcaggtcattccgtatcacaatcctgcctcagctttacattcagcccatgatgggggccggcctgaattatgaatgttaccgattcggcatttccccatccacaaatgcgctggtgatcggtgccacggtgatggagggcttctacgtcatcttcgacagagcccagaagagggtgggcttcgcagcgagcccctgtgcagaaattgcaggtgctgcagtgtctgaaatttccgggcctttctcaacagaggatgtagccagcaactgtgtccccgctcagtctttgagcgagcccattttgtggattgtgtcctatgcgctcatgagcgtctgtggagccatcctccttgtcttaatcgtcctgctgctgctgccggttttcccccccgggggggggtttggggttccccccaaggggnttccggtgtcagcgtcgcccccgtgaccctgaggtcgtcaatgatgagtcctctctggtcagacatcgctggaaatgaatagccaggcctgacctcaagcaaccatgaactcagctattaagaaaatcacatttccagggcagcagccgggatcgatggtggcgctttctcctgtgcccacccgtcttcaatctctgttctgctcccagatgccttctagattcactgtcttttgattcttgattttcaagctttcaaatcctccctacttccaagaaaaataattaaaaaaaaaacttcattctaaacc

SEQ ID NO: 421371 - DNA, 542 bp, Homo sapiens
aagacctgtacagtgtgtccatagctgtcttattcatagtagcctcaaaatggacacaactcaagggcccgtcgaaagcagaggcaaatcatggtgtgtccctgcatcgtgaagagaaacaaagggctgatgcaacatgaggacgtctcaaagacaagttgcacttaagaagctatgctaagaaaacaaacacacagaagcctacatcattacatgtatagaatgttcaagaactgatgaaaccagtccgtggtcacaaaagccagaaagtggttgcttctggggaccagaagggaaaggggcataaaggaaccttttgaggtgaatagaagtttctgcatcttggtttggcacacatgccaaaactcaccagctacagattctcgttgacactggaagcagtaactttgccgtggcaggaaccccgcactcctacatagacacgtactttgacacagagaggtaagcgctggccccttggctggtgtgctgggccggggcactgcatgatcaacatgcttcaaaatgcaccagagcatgac

SEQ ID NO: 421372 - DNA, 2252 bp, Homo sapiens
cgctggggcgctttccgaggaaattcgggactcgagtttcccggggaagaggcgcggcctgagcccggcgagggtggggagggcaggcgcaggtggaccccggcgccccccgagccccgctgtgaccttggccgcgggggaggggctgggccgctgcggggcagtcgcggccgccagagggggcagcggagaagaacttgcccaacttggcggcgcgggctggggcggttctgcgcctccgcgcccgcctccccggcctccgccttctcccctcccgcgagcctcctcccctcccgcgagcctcctcccctgggccctcctcccgtcctccccgccgccgccggtcccggtgcgcgcccatccctgcccgcagccccgcgcgccggccgagtcgctgagccgcggctgccggacgggacgggaccggctaggctgggcgcgccccccgggccccgccgtgggcatgggcgcactggcccgggcgctgctgctgcctctgctggcccagtggctcctgcgcgccgccccggagctggcccccgcgcccttcacgctgcccctccgggtggccgcggccacgaaccgcgtagttgcgcccaccccgggacccgggacccctgccgagcgccacgccgacggcttggcgctcgccctggagcctgccctggcgtcccccgcgggcgccgccaacttcttggccatggtagacaacctgcagggggactctggccgcggctactacctggagatgctgatcgggacccccccgcagaagctacagattctcgttgacactggaagcagtaactttgccgtggcaggaaccccgcactcctacatagacacgtactttgacacagagaggtctagcacataccgctccaagggctttgacgtcacagtgaagtacacacaaggaagctggacgggcttcgttggggaagacctcgtcaccatccccaaaggcttcaatacttcttttcttgtcaacattgccactatttttgaatcagagaatttctttttgcctgggattaaatggaatggaatacttggcctagcttatgccacacttgccaagccatcaagttctctggagaccttcttcgactccctggtgacacaagcaaacatccccaacgttttctccatgcagatgtgtggagccggcttgcccgttgctggatctgggaccaacggaggtagtcttgtcttgggtggaattgaaccaagtttgtataaaggagacatctggtatacccctattaaggaagagtggtactaccagatagaaattctgaaattggaaattggaggccaaagccttaatctggactgcagagagtataacgcagacaaggccatcgtggacagtggcaccacgctgctgcgcctgccccagaaggtgtttgatgcggtggtggaagctgtggcccgcgcatctctgattccagaattctctgatggtttctggactgggtcccagctggcgtgctggacgaattcggaaacaccttggtcttacttccctaaaatctccatctacctgagagacgagaactccagcaggtcattccgtatcacaatcctgcctcagctttacattcagcccatgatgggggccggcctgaattatgaatgttaccgattcggcatttccccatccacaaatgcgctggtgatcggtgccacggtgatggagggcttctacgtcatcttcgacagagcccagaagagggtgggcttcgcagcgagcccctgtgcagaaattgcaggtgctgcagtgtctgaaatttccgggcctttctcaacagaggatgtagccagcaactgtgtccccgctcagtctttgagcgagcccattttgtggattgtgtcctatgcgctcatgagcgtctgtggagccatcctccttgtcttaatcgtcctgctgctgctgccgttccggtgtcagcgtcgcccccgtgaccctgaggtcgtcaatgatgagtcctctctggtcagacatcgctggaaatgaatagccaggcctgacctcaagcaaccatgaactcagctattaagaaaatcacatttccagggcagcagccgggatcgatggtggcgctttctcctgtgcccacccgtcttcaatctctgttctgctcccagatgccttctagattcactgtcttttgattcttgattttcaagctttcaaatcctccctacttccaagaaaaataattaaaaaaaaaacttcattctaaacc

SEQ ID NO: 421373 - DNA, 2816 bp, Homo sapiens
cgctggggcgctttccgaggaaattcgggactcgagtttcccggggaagaggcgcggcctgagcccggcgagggtggggagggcaggcgcaggtggaccccggcgccccccgagccccgctgtgaccttggccgcgggggaggggctgggccgctgcggggcagtcgcggccgccagagggggcagcggagaagaacttgcccaacttggcggcgcgggctggggcggttctgcgcctccgcgcccgcctccccggcctccgccttctcccctcccgcgagcctcctcccctcccgcgagcctcctcccctgggccctcctcccgtcctccccgccgccgccggtcccggtgcgcgcccatccctgcccgcagccccgcgcgccggccgagtcgctgagccgcggctgccggacgggacgggaccggctaggctgggcgcgccccccgggccccgccgtgggcatgggcgcactggcccgggcgctgctgctgcctctgctggcccagtggctcctgcgcgccgccccggagctggcccccgcgcccttcacgctgcccctccgggtggccgcggccacgaaccgcgtagttgcgcccaccccgggacccgggacccctgccgagcgccacgccgacggcttggcgctcgccctggagcctgccctggcgtcccccgcgggcgccgccaacttcttggccatggtagacaacctgcagggggactctggccgcggctactacctggagatgctgatcgggacccccccgcagaagctacagattctcgttgacactggaagcagtaactttgccgtggcaggaaccccgcactcctacatagacacgtactttgacacagagaggtctagcacataccgctccaagggctttgacgtcacagtgaagtacacacaaggaagctggacgggcttcgttggggaagacctcgtcaccatccccaaaggcttcaatacttcttttcttgtcaacattgccactatttttgaatcagagaatttctttttgcctgggattaaatggaatggaatacttggcctagcttatgccacacttgccaagccatcaagttctctggagaccttcttcgactccctggtgacacaagcaaacatccccaacgttttctccatgcagatgtgtggagccggcttgcccgttgctggatctgggaccaacggaggtagtcttgtcttgggtggaattgaaccaagtttgtataaaggagacatctggtatacccctattaaggaagagtggtactaccagatagaaattctgaaattggaaattggaggccaaagccttaatctggactgcagagagtataacgcagacaaggccatcgtggacagtggcaccacgctgctgcgcctgccccagaaggtgtttgatgcggtggtggaagctgtggcccgcgcatctctgattccagaattctctgatggtttctggactgggtcccagctggcgtgctggacgaattcggaaacaccttggtcttacttccctaaaatctccatctacctgagagacgagaactccagcaggtcattccgtatcacaatcctgcctcagaaattgcaggtgctgcagtgtctgaaatttccgggcctttctcaacagaggatgtagccagcaactgtgtccccgctcagtctttgagcgagcccattttgtggattgtgtcctatgcgctcatgagcgtctgtggagccatcctccttgtcttaatcgtcctgctgctgctgccgttccggtgtcagcgtcgcccccgtgaccctgaggtcgtcaatgatgagtcctctctggtcagacatcgctggaaatgaatagccaggcctgacctcaagcaaccatgaactcagctattaagaaaatcacatttccagggcagcagccgggatcgatggtggcgctttctcctgtgcccacccgtcttcaatctctgttctgctcccagatgccttctagattcactgtcttttgattcttgattttcaagctttcaaatcctccctacttccaagaaaaataattaaaaaaaaaacttcattctaaaccaaaacagagtggattgggctgcaggctctatggggttcgttatgccaaagtgtctacatgtgccaccaacataaaacaaaaccaagccttggctcgttctcttctctcttcaatctctggaaaaataagtacatatagttgataacccctcttagcttacaggaagctttttgtattaattgcctttgaggttattttccgccagacctcaacctgggtcaaagtggtacaggaaggcttgcagtatgatggcaggagaatcagcctggggcctggggatgtaaccaagctgtacccttgagacctggaaccagagccacaggccccttttgtgggtttctctgtgctctgaatgggagccagaattcactaggaggtcatcaaccgatggtcctcacaagcctcttctgaagatggaaggccttttgcccgttgaggtagaggggaaggaaatctcctcttttgtacccaatacttatgttgtattgttggtgcgaaagtaaaaacactacctcttttgagactttgcccagggtcctgtgcctggatgggggtgcaggcagccttgaccacggctgttcccctcacccaaaagaattatcatcccaacagccaagacccaacaggtgctgaactgtgcatcaaccaggaagagttctatccccaagctggccactatcacatatgcttactcttgcttaaaattaataaatcatgttttgatgagaaaaaa

SEQ ID NO: 421374 - DNA, 3175 bp, Homo sapiens
cgctggggcgctttccgaggaaattcgggactcgagtttcccggggaagaggcgcggcctgagcccggcgagggtggggagggcaggcgcaggtggaccccggcgccccccgagccccgctgtgaccttggccgcgggggaggggctgggccgctgcggggcagtcgcggccgccagagggggcagcggagaagaacttgcccaacttggcggcgcgggctggggcggttctgcgcctccgcgcccgcctccccggcctccgccttctcccctcccgcgagcctcctcccctcccgcgagcctcctcccctgggccctcctcccgtcctccccgccgccgccggtcccggtgcgcgcccatccctgcccgcagccccgcgcgccggccgagtcgctgagccgcggctgccggacgggacgggaccggctaggctgggcgcgccccccgggccccgccgtgggcatgggcgcactggcccgggcgctgctgctgcctctgctggcccagtggctcctgcgcgccgccccggagctggcccccgcgcccttcacgctgcccctccgggtggccgcggccacgaaccgcgtagttgcgcccaccccgggacccgggacccctgccgagcgccacgccgacggcttggcgctcgccctggagcctgccctggcgtcccccgcgggcgccgccaacttcttggccatggtagacaacctgcagggggactctggccgcggctactacctggagatgctgatcgggacccccccgcagaagctacagattctcgttgacactggaagcagtaactttgccgtggcaggaaccccgcactcctacatagacacgtactttgacacagagaggtctagcacataccgctccaagggctttgacgtcacagtgaagtacacacaaggaagctggacgggcttcgttggggaagacctcgtcaccatccccaaaggcttcaatacttcttttcttgtcaacattgccactatttttgaatcagagaatttctttttgcctgggattaaatggaatggaatacttggcctagcttatgccacacttgccaagccatcaagttctctggagaccttcttcgactccctggtgacacaagcaaacatccccaacgttttctccatgcagatgtgtggagccggcttgcccgttgctggatctgggaccaacggaggtagtcttgtcttgggtggaattgaaccaagtttgtataaaggagacatctggtatacccctattaaggaagagtggtactaccagatagaaattctgaaattggaaattggaggccaaagccttaatctggactgcagagagtataacgcagacaaggccatcgtggacagtggcaccacgctgctgcgcctgccccagaaggtgtttgatgcggtggtggaagctgtggcccgcgcatctctgattccagaattctctgatggtttctggactgggtcccagctggcgtgctggacgaattcggaaacaccttggtcttacttccctaaaatctccatctacctgagagacgagaactccagcaggtcattccgtatcacaatcctgcctcagctttacattcagcccatgatgggggccggcctgaattatgaatgttaccgattcggcatttccccatccacaaatgcgctggtgatcggtgccacggtgatggagggcttctacgtcatcttcgacagagcccagaagagggtgggcttcgcagcgagcccctgtgcagaaattgcaggtgctgcagtgtctgaaatttccgggcctttctcaacagaggatgtagccagcaactgtgtccccgctcagtctttgagcgagcccattttgtggattgtgtcctatgcgctcatgagcgtctgtggagccatcctccttgtcttaatcgtcctgctgctgctgccgttccggtgtcagcgtcgcccccgtgaccctgaggtcgtcaatgatgagtcctctctggtcagacatcgctggaaatgaatagccaggcctgacctcaagcaaccatgaactcagctattaagaaaatcacatttccagggcagcagccgggatcgatggtggcgctttctcctgtgcccacccgtcttcaatctctgttctgctcccagatgccttctagattcactgtcttttgattcttgattttcaagctttcaaatcctccctacttccaagaaaaataattaaaaaaaaaacttcattctaaaccaaaacagagtggattgggctgcaggctctatggggttcgttatgccaaagtgtctacatgtgccaccaacataaaacaaaaccaagccttggctcgttctcttctctcttcaatctctggaaaaataagtacatatagttgataacccctcttagcttacaggaagctttttgtattaattgcctttgaggttattttccgccagacctcaacctgggtcaaagtggtacaggaaggcttgcagtatgatggcaggagaatcagcctggggcctggggatgtaaccaagctgtacccttgagacctggaaccagagccacaggccccttttgtgggtttctctgtgctctgaatgggagccagaattcactaggaggtcatcaaccgatggtcctcacaagcctcttctgaagatggaaggccttttgcccgttgaggtagaggggaaggaaatctcctcttttgtacccaatacttatgttgtattgttggtgcgaaagtaaaaacactacctcttttgagactttgcccagggtcctgtgcctggatgggggtgcaggcagccttgaccacggctgttcccctcacccaaaagaattatcatcccaacagccaagacccaacaggtgctgaactgtgcatcaaccaggaagagttctatccccaagctggccactatcacatatgcttactcttgcttaaaattaataaatcatgttttgatgagaaaaaaaaaaaaaaaagaaaaaaggggggggggcaaaagaatccctgagggcaaagtaaggggtacccggtttttgtaaaaggtgcctaaggggtcgtataatagaaaggaggcggtgtttaacgtggctggtaacggtgcgggtttgggggacatttgggtgttggaaactcaggttggtaggataatggttggc

SEQ ID NO: 421375 - DNA, 2568 bp, Homo sapiens
gcgccgccgctcgtgtgccccccggcaccggaatgggcggcaattgtgggccgcactggcccgggcgctgctgctgcctctgctggcccagtggctcctgcgcgccgccccggagctggcccccgcgcccttcacgctgcccctccgggtggccgcggccacgaaccgcgtagttgcgcccaccccgggacccgggacccctgccgagcgccacgccgacggcttggcgctcgccctggagcctgccctggcgtcccccgcgggcgccgccaacttcttggccatggtagacaacctgcagggggactctggccgcggctactacctggagatgctgatcgggacccccccgcagaagctacagattctcgttgacactggaagcagtaactttgccgtggcaggaaccccgcactcctacatagacacgtactttgacacagagaggtctagcacataccgctccaagggctttgacgtcacagtgaagtacacacaaggaagctggacgggcttcgttggggaagacctcgtcaccatccccaaaggcttcaatacttcttttcttgtcaacattgccactatttttgaatcagagaatttctttttgcctgggattaaatggaatggaatacttggcctagcttatgccacacttgccaagccatcaagttctctggagaccttcttcgactccctggtgacacaagcaaacatccccaacgttttctccatgcagatgtgtggagccggcttgcccgttgctggatctgggaccaacggaggtagtcttgtcttgggtggaattgaaccaagtttgtataaaggagacatctggtatacccctattaaggaagagtggtactaccagatagaaattctgaaattggaaattggaggccaaagccttaatctggactgcagagagtataacgcagacaaggccatcgtggacagtggcaccacgctgctgcgcctgccccagaaggtgtttgatgcggtggtggaagctgtggcccgcgcatctctgattccagaattctctgatggtttctggactgggtcccagctggcgtgctggacgaattcggaaacaccttggtcttacttccctaaaatctccatctacctgagagacgagaactccagcaggtcattccgtatcacaatcctgcctcagctttacattcagcccatgatgggggccggcctgaattatgaatgttaccgattcggcatttccccatccacaaatgcgctggtgatcggtgccacggtgatggagggcttctacgtcatcttcgacagagcccagaagagggtgggcttcgcagcgagcccctgtgcagaaattgcaggtgctgcagtgtctgaaatttccgggcctttctcaacagaggatgtagccagcaactgtgtccccgctcagtctttgagcgagcccattttgtggattgtgtcctatgcgctcatgagcgtctgtggagccatcctccttgtcttaatcgtcctgctgctgctgccgttccggtgtcagcgtcgcccccgtgaccctgaggtcgtcaatgatgagtcctctctggtcagacatcgctggaaatgaatagccaggcctgacctcaagcaaccatgaactcagctattaagaaaatcacatttccagggcagcagccgggatcgatggtggcgctttctcctgtgcccacccgtcttcaatctctgttctgctcccagatgccttctagattcactgtcttttgattcttgattttcaagctttcaaatcctccctacttccaagaaaaataattaaaaaaaaaacttcattctaaaccaaaacagagtggattgggctgcaggctctatggggttcgttatgccaaagtgtctacatgtgccaccaacataaaacaaaaccaagccttggctcgttctcttctctcttcaatctctggaaaaataagtacatatagttgataacccctcttagcttacaggaagctttttgtattaattgcctttgaggttattttccgccagacctcaacctgggtcaaagtggtacaggaaggcttgcagtatgatggcaggagaatcagcctggggcctggggatgtaaccaagctgtacccttgagacctggaaccagagccacaggccccttttgtgggtttctctgtgctctgaatgggagccagaattcactaggaggtcatcaaccgatggtcctcacaagcctcttctgaagatggaaggccttttgcccgttgaggtagaggggaaggaaatctcctcttttgtacccaatacttatgttgtattgttggtgcgaaagtaaaaacactacctcttttgagactttgcccagggtcctgtgcctggatgggggtgcaggcagccttgaccacggctgttcccctcacccaaaagaattatcatcccaacagccaagacccaacaggtgctgaactgtgcatcaaccaggaagagttctatccccaagctggccactatcacatatgcttactcttgcttaaaattaataaatcatgttttgatgagaaaaaa

SEQ ID NO: 421376 - DNA, 2189 bp, Homo sapiens
cttcaacagaactgtaaggtttcttcttggctgaatcagatgtgacgcatcccacttctgcgtttgaggtctagcacataccgctccaagggctttgacgtcacagtgaagtacacacaaggaagctggacgggcttcgttggggaagacctcgtcaccatccccaaaggcttcaatacttcttttcttgtcaacattgccactatttttgaatcagagaatttctttttgcctgggattaaatggaatggaatacttggcctagcttatgccacacttgccaagccatcaagttctctggagaccttcttcgactccctggtgacacaagcaaacatccccaacgttttctccatgcagatgtgtggagccggcttgcccgttgctggatctgggaccaacggaggtagtcttgtcttgggtggaattgaaccaagtttgtataaaggagacatctggtatacccctattaaggaagagtggtactaccagatagaaattctgaaattggaaattggaggccaaagccttaatctggactgcagagagtataacgcagacaaggccatcgtggacagtggcaccacgctgctgcgcctgccccagaaggtgtttgatgcggtggtggaagctgtggcccgcgcatctctgattccagaattctctgatggtttctggactgggtcccagctggcgtgctggacgaattcggaaacaccttggtcttacttccctaaaatctccatctacctgagagacgagaactccagcaggtcattccgtatcacaatcctgcctcagctttacattcagcccatgatgggggccggcctgaattatgaatgttaccgattcggcatttccccatccacaaatgcgctggtgatcggtgccacggtgatggagggcttctacgtcatcttcgacagagcccagaagagggtgggcttcgcagcgagcccctgtgcagaaattgcaggtgctgcagtgtctgaaatttccgggcctttctcaacagaggatgtagccagcaactgtgtccccgctcagtctttgagcgagcccattttgtggattgtgtcctatgcgctcatgagcgtctgtggagccatcctccttgtcttaatcgtcctgctgctgctgccgttccggtgtcagcgtcgcccccgtgaccctgaggtcgtcaatgatgagtcctctctggtcagacatcgctggaaatgaatagccaggcctgacctcaagcaaccatgaactcagctattaagaaaatcacatttccagggcagcagccgggatcgatggtggcgctttctcctgtgcccacccgtcttcaatctctgttctgctcccagatgccttctagattcactgtcttttgattcttgattttcaagctttcaaatcctccctacttccaagaaaaataattaaaaaaaaaacttcattctaaaccaaaacagagtggattgggctgcaggctctatggggttcgttatgccaaagtgtctacatgtgccaccaacataaaacaaaaccaagccttggctcgttctcttctctcttcaatctctggaaaaataagtacatatagttgataacccctcttagcttacaggaagctttttgtattaattgcctttgaggttattttccgccagacctcaacctgggtcaaagtggtacaggaaggcttgcagtatgatggcaggagaatcagcctggggcctggggatgtaaccaagctgtacccttgagacctggaaccagagccacaggccccttttgtgggtttctctgtgctctgaatgggagccagaattcactaggaggtcatcaaccgatggtcctcacaagcctcttctgaagatggaaggccttttgcccgttgaggtagaggggaaggaaatctcctcttttgtacccaatacttatgttgtattgttggtgcgaaagtaaaaacactacctcttttgagactttgcccagggtcctgtgcctggatgggggtgcaggcagccttgaccacggctgttcccctcacccaaaagaattatcatcccaacagccaagacccaacaggtgctgaactgtgcatcaaccaggaagagttctatccccaagctggccactatcacatatgcttactcttgcttaaaattaataaatcatgttttgatgagaaaaaa

SEQ ID NO: 421377 - DNA, 2340 bp, Homo sapiens
tggaatcaagtcccgcctcctgcctcaccaggagtcgcagctacagattctcgttgacactggaagcagtaactttgccgtggcaggaaccccgcactcctacatagacacgtactttgacacagagaggtctagcacataccgctccaagggctttgacgtcacagtgaagtacacacaaggaagctggacgggcttcgttggggaagacctcgtcaccatccccaaaggcttcaatacttcttttcttgtcaacattgccactatttttgaatcagagaatttctttttgcctgggattaaatggaatggaatacttggcctagcttatgccacacttgccaagggaaggaagcaaaggaacaagtcactcggctggcaagtggcagagcctgtctcccatcgtgtttgctttgctttaccgcctctcaagaagccatcaagttctctggagaccttcttcgactccctggtgacacaagcaaacatccccaacgttttctccatgcagatgtgtggagccggcttgcccgttgctggatctgggaccaacggaggtagtcttgtcttgggtggaattgaaccaagtttgtataaaggagacatctggtatacccctattaaggaagagtggtactaccagatagaaattctgaaattggaaattggaggccaaagccttaatctggactgcagagagtataacgcagacaaggccatcgtggacagtggcaccacgctgctgcgcctgccccagaaggtgtttgatgcggtggtggaagctgtggcccgcgcatctctgattccagaattctctgatggtttctggactgggtcccagctggcgtgctggacgaattcggaaacaccttggtcttacttccctaaaatctccatctacctgagagacgagaactccagcaggtcattccgtatcacaatcctgcctcagctttacattcagcccatgatgggggccggcctgaattatgaatgttaccgattcggcatttccccatccacaaatgcgctggtgatcggtgccacggtgatggagggcttctacgtcatcttcgacagagcccagaagagggtgggcttcgcagcgagcccctgtgcagaaattgcaggtgctgcagtgtctgaaatttccgggcctttctcaacagaggatgtagccagcaactgtgtccccgctcagtctttgagcgagcccattttgtggattgtgtcctatgcgctcatgagcgtctgtggagccatcctccttgtcttaatcgtcctgctgctgctgccgttccggtgtcagcgtcgcccccgtgaccctgaggtcgtcaatgatgagtcctctctggtcagacatcgctggaaatgaatagccaggcctgacctcaagcaaccatgaactcagctattaagaaaatcacatttccagggcagcagccgggatcgatggtggcgctttctcctgtgcccacccgtcttcaatctctgttctgctcccagatgccttctagattcactgtcttttgattcttgattttcaagctttcaaatcctccctacttccaagaaaaataattaaaaaaaaaacttcattctaaaccaaaacagagtggattgggctgcaggctctatggggttcgttatgccaaagtgtctacatgtgccaccaacataaaacaaaaccaagccttggctcgttctcttctctcttcaatctctggaaaaataagtacatatagttgataacccctcttagcttacaggaagctttttgtattaattgcctttgaggttattttccgccagacctcaacctgggtcaaagtggtacaggaaggcttgcagtatgatggcaggagaatcagcctggggcctggggatgtaaccaagctgtacccttgagacctggaaccagagccacaggccccttttgtgggtttctctgtgctctgaatgggagccagaattcactaggaggtcatcaaccgatggtcctcacaagcctcttctgaagatggaaggccttttgcccgttgaggtagaggggaaggaaatctcctcttttgtacccaatacttatgttgtattgttggtgcgaaagtaaaaacactacctcttttgagactttgcccagggtcctgtgcctggatgggggtgcaggcagccttgaccacggctgttcccctcacccaaaagaattatcatcccaacagccaagacccaacaggtgctgaactgtgcatcaaccaggaagagttctatccccaagctggccactatcacatatgcttactcttgcttaaaattaataaatcatgttttgatgagaaaaaa

SEQ ID NO: 421378 - DNA, 1653 bp, Homo sapiens
ttaaacattgtttatccctgtgggcatctggcgaggtggctaggaaagcctggagctgtttcctgttgacgtgccagactagtcatggtttctgatgtgatcttgttttgtctagattccagaattctctgatggtttctggactgggtcccagctggcgtgctggacgaattcggaaacaccttggtcttacttccctaaaatctccatctacctgagagacgagaactccagcaggtcattccgtatcacaatcctgcctcagctttacattcagcccatgatgggggccggcctgaattatgaatgttaccgattcggcatttccccatccacaaatgcgctggtgatcggtgccacggtgatggagggcttctacgtcatcttcgacagagcccagaagagggtgggcttcgcagcgagcccctgtgcagaaattgcaggtgctgcagtgtctgaaatttccgggcctttctcaacagaggatgtagccagcaactgtgtccccgctcagtctttgagcgagcccattttgtggattgtgtcctatgcgctcatgagcgtctgtggagccatcctccttgtcttaatcgtcctgctgctgctgccgttccggtgtcagcgtcgcccccgtgaccctgaggtcgtcaatgatgagtcctctctggtcagacatcgctggaaatgaatagccaggcctgacctcaagcaaccatgaactcagctattaagaaaatcacatttccagggcagcagccgggatcgatggtggcgctttctcctgtgcccacccgtcttcaatctctgttctgctcccagatgccttctagattcactgtcttttgattcttgattttcaagctttcaaatcctccctacttccaagaaaaataattaaaaaaaaaacttcattctaaaccaaaacagagtggattgggctgcaggctctatggggttcgttatgccaaagtgtctacatgtgccaccaacataaaacaaaaccaagccttggctcgttctcttctctcttcaatctctggaaaaataagtacatatagttgataacccctcttagcttacaggaagctttttgtattaattgcctttgaggttattttccgccagacctcaacctgggtcaaagtggtacaggaaggcttgcagtatgatggcaggagaatcagcctggggcctggggatgtaaccaagctgtacccttgagacctggaaccagagccacaggccccttttgtgggtttctctgtgctctgaatgggagccagaattcactaggaggtcatcaaccgatggtcctcacaagcctcttctgaagatggaaggccttttgcccgttgaggtagaggggaaggaaatctcctcttttgtacccaatacttatgttgtattgttggtgcgaaagtaaaaacactacctcttttgagactttgcccagggtcctgtgcctggatgggggtgcaggcagccttgaccacggctgttcccctcacccaaaagaattatcatcccaacagccaagacccaacaggtgctgaactgtgcatcaaccaggaagagttctatccccaagctggccactatcacatatgcttactcttgcttaaaattaataaatcatgttttgatgagaaaaaa

SEQ ID NO: 421379 - DNA, 1667 bp, Homo sapiens
cgctggggcgctttccgaggaaattcgggactcgagtttcccggggaagaggcgcggcctgagcccggcgagggtggggagggcaggcgcaggtggaccccggcgccccccgagccccgctgtgaccttggccgcgggggaggggctgggccgctgcggggcagtcgcggccgccagagggggcagcggagaagaacttgcccaacttggcggcgcgggctggggcggttctgcgcctccgcgcccgcctccccggcctccgccttctcccctcccgcgagcctcctcccctcccgcgagcctcctcccctgggccctcctcccgtcctccccgccgccgccggtcccggtgcgcgcccatccctgcccgcagccccgcgcgccggccgagtcgctgagccgcggctgccggacgggacgggaccggctaggctgggcgcgccccccgggccccgccgtgggcatgggcgcactggcccgggcgctgctgctgcctctgctggcccagtggctcctgcgcgccgccccggagctggcccccgcgcccttcacgctgcccctccgggtggccgcggccacgaaccgcgtagttgcgcccaccccgggacccgggacccctgccgagcgccacgccgacggcttggcgctcgccctggagcctgccctggcgtcccccgcgggcgccgccaacttcttggccatggtagacaacctgcagggggactctggccgcggctactacctggagatgctgatcgggacccccccgcagaagctacagattctcgttgacactggaagcagtaactttgccgtggcaggaaccccgcactcctacatagacacgtactttgacacagagaggtctagcacataccgctccaagggctttgacgtcacagtgaagtacacacaaggaagctggacgggcttcgttggggaagacctcgtcaccatccccaaaggcttcaatacttcttttcttgtcaacattgccactatttttgaatcagagaatttctttttgcctgggattaaatggaatggaatacttggcctagcttatgccacacttgccaagccatcaagttctctggagaccttcttcgactccctggtgacacaagcaaacatccccaacgttttctccatgcagatgtgtggagccggcttgcccgttgctggatctgggaccaacggaggtagtcttgtcttgggtggaattgaaccaagtttgtataaaggagacatctggtatacccctattaaggaagagtggtactaccagatagaaattctgaaattggaaattggaggccaaagccttaatctggactgcagagagtataacgcagacaaggccatcgtggacagtggcaccacgctgctgcgcctgccccagaaggtgtttgatgcggtggtggaagctgtggcccgcgcatctctggtgagtcctcgggacactcacgggtccccgagttgctgagttacagtcacctgctgaggagcagcactgcgtgttctgagcatctctgaactattgcgccatgtatttccaattttcatattgtgtatttgtatattttatatgtaatagtataggtgtaatatgtaaatatattttatatgtatttaaaatctttatattttgaagggttttgtttcaa

SEQ ID NO: 421380 - DNA, 688 bp, Homo sapiens
  misc_feature (10)..(10): n is a, c, g, or t
tgggtagtgncctgactggccattgcacagcctcacctgctgctgcccctctaggtctgggcagccatgacctgcagggcccagagacactgtccttcccctcatccacccaaggccccagccagcgctcataccctgtcctttctccctgaccccaagggcacagaggcaaggcctcctgtctacagcagcttcctcagtttcctactgccttaggaggcccctgcttgtgctcagggaaggcctcttcatgggcatgttcctgctggggcggtgcggtttggtcccaactctgctaagttttctgagatgagggtctagccctgttggggacagcttctggtggacaaggctgtgccaaccctgtacagaatcgagtgctgtagcctggccagaccccagagcccttgtgccatctttcttcctggccagagtgatggggttccagccatggggaagcaacccaatcctctgtctccttgctccaatggaggcagaagagcccaggacccaagcgtcttggcaggggtgctgtgaatgtccagtggtcccagctccccaccctggccctgccccagcctgtgtagctcttcctgcatgtggatgctgcatgtctggtctggggcttggatgttgcactgccccactgcctgtcccttctggtaaaataaagaactcttaatgccca

SEQ ID NO: 421381 - DNA, 544 bp, Homo sapiens
  misc_feature (2)..(2): n is a, c, g, or t
gngcacgagcggcacgagtcggcacgagagacaacagtaaggtcacatcagaagtgaaccgactgctggccgagctgcctgcctctgtgcatgccctcacaggcgtggacctgtctaagatacccctgatcaagaaggccactggtgtgcaggtgtgaggctcctgcaggcccactctcttcagcagccacccggccctccctccagcacccgttttaatcccacagaacaacgggaacgttactgactctggtgccttatctcgaagggaccagaagtgctgtgtgttcaggccatctctggctgtcttcctgtctctcctgtctgtccacctcctcctcttcctctcctttaccccactttcactgccactttcatcaggtttgtgtctcatctccctgcgtgtcttttcctttgtctgtctttttctttcccccatgcacatcatgtagattaagctgaagatgtttattacaatcactctctgtggggggtggccctgctgctcctcagaatcctggtgcagatacctacgatccttaga

SEQ ID NO: 421382 - DNA, 370 bp, Homo sapiens
  misc_feature (12)..(12): n is a, c, g, or t
gatttcggcacnagggacactcagaggatttccctagagattatgacgttgcagccccgctgcgaggacgtagagacggccgagggggtagctttaactgtgacgggtgtcgcccaggtgaagatcatgacggagaaggaactcctggccgtggcttgtgagcagtttctgggtaagaatgtgcaggacatcaaaaacgtcgtcctgcagaccctggagggacatctgcgctccatcctcggtgaggccctgttcagcctttgaggagcctcacggggcccctaagccaaggcagggaggtgtgcagggctgggcagggggcctgtttcacaggagtttcaagctaaaacacttttcctcaaatatttaa

SEQ ID NO: 421383 - DNA, 2758 bp, Homo sapiens
ctgtatctgaagcccctcggaataaagcgcgttgaccgccgaagctgcgctcactcctgcctcaacgcgccggccccgccctccgccgccacacttccggcggggctgcgaccgcagaggggcgcgggcgagcgagcgggcggccggccgctgggggtggcgggataggctgggcgcggccggcgctgcagacccgctgctgttgtccgggtctgtgcggtcccgagggccctccgtgccgccggcgccatgggcaattgccacacggtggggcccaacgaggcgctggtggtttcagggggctgttgtggttccgactataaacagtacgtgtttggcggctgggcctgggcctggtggtgtatctccgacactcagaggatttccctagagattatgacgttgcagccccgctgcgaggacgtagagacggccgagggggtagctttaactgtgacgggtgtcgcccaggtgaagatcatgacggagaaggaactcctggccgtggcttgtgagcagtttctgggtaagaatgtgcaggacatcaaaaacgtcgtcctgcagaccctggagggacatctgcgctccatcctcgggaccctgacagtggagcagatttatcaggaccgggaccagtttgccaagctggtgcgggaggtggcagcccctgatgttggccgcatgggcattgagatcctcagcttcaccatcaaggacgtgtatgacaaagtggactatctgagctccctgggcaagacgcagactgccgtggtgcagagagatgctgacattggcgtggccgaggctgaacgggacgcaggcatccgggaagctgagtgcaagaaggagatgctggatgtgaagttcatggcagacaccaagattgctgactctaagcgagccttcgagctgcaaaagtcagccttcagtgaggaggttaacatcaagacagctgaggcccagttggcctatgagctgcagggggcccgtgaacagcagaagatccggcaggaagagattgagattgaggttgtgcagcgcaagaaacagattgccgtggaggcacaggagatcctgcgtacggacaaggagctcatcgctacagtgcgccggcctgccgaggccgaggcccaccgcatccagcagattgccgagggtgaaaaggtgaagcaggtcctcttggcacaggcagaggctgagaagatccgcaaaatcggggaggcggaagcggcagtcatcgaggcgatgggcaaggcagaggctgagcggatgaagctcaaggcagaagcctaccagaaatacggggatgcagccaagatggccttggtgctagaggccctgccccagattgctgccaaaatcgctgccccacttaccaaggtcgatgagattgtggtcctcagtggagacaacagtaaggtcacatcagaagtgaaccgactgctggccgagctgcctgcctctgtgcatgccctcacaggcgtggacctgtctaagatacccctgatcaagaaggccactggtgtgcaggtgtgaggctcctgcaggcccactctcttcagcagccacccggccctccctccagcacccgttttaatcccacagaacaacgggaacgttactgactctggtgccttatctcgaagggaccagaagtgctgtgtgttcaggccatctctggctgtcttcctgtctctcctgtctgtccacctcctcctcttcctctcctttaccccactttcactgccactttcatcaggtttgtgtctcatctccctgcgtgtcttttcctttgtctgtctttttctttcccccatgcacatcatgtagattaagctgaagatgtttattacaatcactctctgtggggggtggccctgctgctcctcagaatcctggtgccttgaagttctctgtgcatctgtccatcctccctatggccctggccagagctcagcatgggcaggggttctgggtaggacggtcactgtcctctctcctggactggtcttcccagccctaaaccctgccccaggaagcccacagcctcacctgctgctgcccctctaggtctgggcagccatgacctgcagggcccagagacactgtccttcccctcatccacccaaggccccagccagcgctcataccctgtcctttctccctgaccccaagggcacagaggcaaggcctcctgtctacagcagcttcctcagtttcctactgccttaggaggcccctgcttgtgctcagggaaggcctcttcatgggcatgttcctgctggggcggtgcggtttggtcccaactctgctaagttttctgagatgagggtctagccctgttggggacagaaaagtgtgtagaccttcttcctgctagggctgcactgtcctgggtgttgggcccttctggtggacaaggctgtgccaaccctgtacagaatcgagtgctgtagcctggccagaccccagagcccttgtgccatctttcttcctggccagagtgatggggttccagccatggggaagcaacccaatcctctgtctccttgctccaatggaggcagaagagcccaggacccaagcgtcttggcaggggtgctgtgaatgtccagtggtcccagctccccaccctggccctgccccagcctgtgtagctcttcctgcatgtggatgctgcatgtctggtctggggcttggatgttgcactgccccactgcctgtcccttctggtaaaataaagaactcttaatgccca

SEQ ID NO: 421384 - DNA, 3087 bp, Homo sapiens
ctgtatctgaagcccctcggaataaagcgcgttgaccgccgaagctgcgctcactcctgcctcaacgcgccggccccgccctccgccgccacacttccggcggggctgcgaccgcagaggggcgcgggcgagcgagcgggcggccggccgctgggggtggcgggataggctgggcgcggccggcgctgcagacccgctgctgttgtccgggtctgtgcggtcccgagggccctccgtgccgccggcgccatgggcaattgccacacggtggggcccaacgaggcgctggtggtttcagggggctgttgtggttccgactataaacagtacgtgtttggcggctgggcctgggcctggtggtgtatctccgacactcagaggatttccctagagattatgacgttgcagccccgctgcgaggacgtagagacggccgagggggtagctttaactgtgacgggtgtcgcccaggtgaagatcatgacggagaaggaactcctggccgtggcttgtgagcagtttctgggtaagaatgtgcaggacatcaaaaacgtcgtcctgcagaccctggagggacatctgcgctccatcctcgggaccctgacagtggagcagatttatcaggaccgggaccagtttgccaagctggtgcgggaggtggcagcccctgatgttggccgcatgggcattgagatcctcagcttcaccatcaaggacgtgtatgacaaagtggactatctgagctccctgggcaagacgcagactgccgtggtgcagagagatgctgacattggcgtggccgaggctgaacgggacgcaggcatccgggaagctgagtgcaagaaggagatgctggatgtgaagttcatggcagacaccaagattgctgactctaagcgagccttcgagctgcaaaagtcagccttcagtgaggaggttaacatcaagacagctgaggcccagttggcctatgagctgcagggggcccgtgaacagcagaagatccggcaggaagagattgagattgaggttgtgcagcgcaagaaacagattgccgtggaggcacaggagatcctgcgtacggacaaggagctcatcgctacagtgcgccggcctgccgaggccgaggcccaccgcatccagcagattgccgagggtgaaaaggtgaagcaggtcctcttggcacaggcagaggctgagaagatccgcaaaatcggggaggcggaagcggcagtcatcgaggcgatgggcaaggcagaggctgagcggatgaagctcaaggcagaagcctaccagaaatacggggatgcagccaagatggccttggtgctagaggccctgccccaggtgaggcttccacccaagcgggtcctagggttcaagtgtccttgcttgacaagctgggcaagtgccagaacttctctgggccttgcgagtaacacagggacagatggctagaagggttaaatgaggagcatcctcagcagggggcaggaaccctacaaaggcctaagccatccctggcccacagggcgtctcttaccatggctcgagactaagggccacccaggctgctttggggttggagtgagttaaggaagggagggagagatgctggaccgggctgagaacagagtcagcgccaaccaggctgtcctcccactcttacctcctagattgctgccaaaatcgctgccccacttaccaaggtcgatgagattgtggtcctcagtggagacaacagtaaggtcacatcagaagtgaaccgactgctggccgagctgcctgcctctgtgcatgccctcacaggcgtggacctgtctaagatacccctgatcaagaaggccactggtgtgcaggtgtgaggctcctgcaggcccactctcttcagcagccacccggccctccctccagcacccgttttaatcccacagaacaacgggaacgttactgactctggtgccttatctcgaagggaccagaagtgctgtgtgttcaggccatctctggctgtcttcctgtctctcctgtctgtccacctcctcctcttcctctcctttaccccactttcactgccactttcatcaggtttgtgtctcatctccctgcgtgtcttttcctttgtctgtctttttctttcccccatgcacatcatgtagattaagctgaagatgtttattacaatcactctctgtggggggtggccctgctgctcctcagaatcctggtgccttgaagttctctgtgcatctgtccatcctccctatggccctggccagagctcagcatgggcaggggttctgggtaggacggtcactgtcctctctcctggactggtcttcccagccctaaaccctgccccaggaagcccacagcctcacctgctgctgcccctctaggtctgggcagccatgacctgcagggcccagagacactgtccttcccctcatccacccaaggccccagccagcgctcataccctgtcctttctccctgaccccaagggcacagaggcaaggcctcctgtctacagcagcttcctcagtttcctactgccttaggaggcccctgcttgtgctcagggaaggcctcttcatgggcatgttcctgctggggcggtgcggtttggtcccaactctgctaagttttctgagatgagggtctagccctgttggggacagaaaagtgtgtagaccttcttcctgctagggctgcactgtcctgggtgttgggcccttctggtggacaaggctgtgccaaccctgtacagaatcgagtgctgtagcctggccagaccccagagcccttgtgccatctttcttcctggccagagtgatggggttccagccatggggaagcaacccaatcctctgtctccttgctccaatggaggcagaagagcccaggacccaagcgtcttggcaggggtgctgtgaatgtccagtggtcccagctccccaccctggccctgccccagcctgtgtagctcttcctgcatgtggatgctgcatgtctggtctggggcttggatgttgcactgccccactgcctgtcccttctggtaaaataaagaactcttaatgccca

SEQ ID NO: 421385 - DNA, 3142 bp, Homo sapiens
ctgtatctgaagcccctcggaataaagcgcgttgaccgccgaagctgcgctcactcctgcctcaacgcgccggccccgccctccgccgccacacttccggcggggctgcgaccgcagaggggcgcgggcgagcgagcgggcggccggccgctgggggtggcgggataggctgggcgcggccggcgctgcagacccgctgctgttgtccgggtctgtgcggtcccgagggccctccgtgccgccggcgccatgggcaattgccacacggtggggcccaacgaggcgctggtggtttcagggggctgttgtggttccgactataaacagtacgtgtttggcggctgggcctgggcctggtggtgtatctccgacactcagaggatttccctagagattatgacgttgcagccccgctgcgaggacgtagagacggccgagggggtagctttaactgtgacgggtgtcgcccaggtgaagatcatgacggagaaggaactcctggccgtggcttgtgagcagtttctgggtaagaatgtgcaggacatcaaaaacgtcgtcctgcagaccctggagggacatctgcgctccatcctcgggaccctgacagtggagcagatttatcaggaccgggaccagtttgccaagctggtgcgggaggtggcagcccctgatgttggccgcatgggcattgagatcctcagcttcaccatcaaggacgtgtatgacaaagtggactatctgagctccctgggcaagacgcagactgccgtggtgcagagagatgctgacattggcgtggccgaggctgaacgggacgcaggcatccgggaagctgagtgcaagaaggagatgctggatgtgaagttcatggcagacaccaagattgctgactctaagcgagccttcgagctgcaaaagtcagccttcagtgaggaggttaacatcaagacagctgaggcccagttggcctatgagctgcagggggcccgtgaacagcagaagatccggcaggaagagattgagattgaggttgtgcagcgcaagaaacagattgccgtggaggcacaggagatcctgcgtacggacaaggagctcatcgctacagtgcgccggcctgccgaggccgaggcccaccgcatccagcagattgccgagggtgaaaaggtgaagcaggtcctcttggcacaggcagaggctgagaagatccgcaaaatcggggaggcggaagcggcagtcatcgaggcgatgggcaaggcagaggctgagcggatgaagctcaaggcagaagcctaccagaaatacggggatgcagccaagatggccttggtgctagaggccctgccccagattgctgccaaaatcgctgccccacttaccaaggtcgatgagattgtggtcctcagtggagacaacagtaaggtcacatcagaagtgaaccgactgctggccgagctgcctgcctctgtgcatgccctcacaggcgtggacctgtctaagatacccctgatcaagaaggccactggtgtgcaggtgtgaggctcctgcaggcccactctcttcagcagccacccggccctccctccagcacccgttttaatcccacagaacaacgggaacgttactgactctggtgccttatctcgaagggaccagaagtgctgtgtgttcaggccatctctggctgtcttcctgtctctcctgtctgtccacctcctcctcttcctctcctttaccccactttcactgccactttcatcaggtttgtgtctcatctccctgcgtgtcttttcctttgtctgtctttttctttcccccatgcacatcatgtagattaagctgaagatgtttattacaatcactctctgtggggggtggccctgctgctcctcagaatcctggtgccttgaagttctctgtgcatctgtccatcctccctatggccctggccagagctcagcatgggcaggggttctgggtaggacggtcactgtcctctctcctggactggtcttcccagccctaaaccctgccccaggaagcccacagcctcacctgctgctgcccctctaggtctgggcagccatgacctgcagggcccagagacactgtccttcccctcatccacccaaggccccagccagcgctcataccctgtcctttctccctgaccccaagggcacagaggcaaggcctcctgtctacagcagcttcctcagtttcctactgccttaggaggcccctgcttgtgctcagggaaggcctcttcatgggcatgttcctgctggggcggtgcggtttggtcccaactctgctaagttttctgagatgagggtctagccctgttggggacagaaaagtgtgtagaccttcttcctgctagggctgcactgtcctgggtgttgggcccttctggtggacaaggctgtgccaaccctgtacagaatcgagtgctgtagcctggccagaccccagagcccttgtgccatctttcttcctggccagagtgatggggttccagccatggggaagcaacccaatcctctgtctccttgctccaatggaggcagaagagcccaggacccaagcgtcttggcaggggtgctgtgaatgtccagtggtcccagctccccaccctggccctgccccagcctgtgtagctcttcctgcatgtggatgctgcatgtctggtctggggcttggatgttgcactgccccactgcctgtcccttctggtaaaataaagaactcttaatgcccaaaaaaaaaaaaaaaaaaaaaaaaaaaaaaaaaaaaggggggggagaaaaaattttccccggggggcccaatttgttccccttttttttttaaggggggcccgttaggggagcggatttataaagcaaggcaggccgatctttaaacgtcgtgtcgagacaccggccctgggactctggggaaggacctcttggcgtggttctatttcggacacactccccgagattagccgggaactatataggttttgtgtaaccccggcttttgtggtgaatggcctgttttatacgaccatataaccagggggagcggagtggagcggaaaaagaacgggaacgaaacaaggaaagagagacacagaagacaagtaataaataacagggtg

SEQ ID NO: 421386 - DNA, 2533 bp, Homo sapiens
gtttgctgtgtcccctccttcccttcctgtccctacctctccccaccccctggctgctcctcagactgtctctggaggttatgaccatcctgtgtcgctgtgagaatattgagacgtcggagggggttccactattcgtaacaggggttgcacaggatttccctagagattatgacgttgcagccccgctgcgaggacgtagagacggccgagggggtagctttaactgtgacgggtgtcgcccaggtgaagatcatgacggagaaggaactcctggccgtggcttgtgagcagtttctgggtaagaatgtgcaggacatcaaaaacgtcgtcctgcagaccctggagggacatctgcgctccatcctcgggaccctgacagtggagcagatttatcaggaccgggaccagtttgccaagctggtgcgggaggtggcagcccctgatgttggccgcatgggcattgagatcctcagcttcaccatcaaggacgtgtatgacaaagtggactatctgagctccctgggcaagacgcagactgccgtggtgcagagagatgctgacattggcgtggccgaggctgaacgggacgcaggcatccgggaagctgagtgcaagaaggagatgctggatgtgaagttcatggcagacaccaagattgctgactctaagcgagccttcgagctgcaaaagtcagccttcagtgaggaggttaacatcaagacagctgaggcccagttggcctatgagctgcagggggcccgtgaacagcagaagatccggcaggaagagattgagattgaggttgtgcagcgcaagaaacagattgccgtggaggcacaggagatcctgcgtacggacaaggagctcatcgctacagtgcgccggcctgccgaggccgaggcccaccgcatccagcagattgccgagggtgaaaaggtgaagcaggtcctcttggcacaggcagaggctgagaagatccgcaaaatcggggaggcggaagcggcagtcatcgaggcgatgggcaaggcagaggctgagcggatgaagctcaaggcagaagcctaccagaaatacggggatgcagccaagatggccttggtgctagaggccctgccccagattgctgccaaaatcgctgccccacttaccaaggtcgatgagattgtggtcctcagtggagacaacagtaaggtcacatcagaagtgaaccgactgctggccgagctgcctgcctctgtgcatgccctcacaggcgtggacctgtctaagatacccctgatcaagaaggccactggtgtgcaggtgtgaggctcctgcaggcccactctcttcagcagccacccggccctccctccagcacccgttttaatcccacagaacaacgggaacgttactgactctggtgccttatctcgaagggaccagaagtgctgtgtgttcaggccatctctggctgtcttcctgtctctcctgtctgtccacctcctcctcttcctctcctttaccccactttcactgccactttcatcaggtttgtgtctcatctccctgcgtgtcttttcctttgtctgtctttttctttcccccatgcacatcatgtagattaagctgaagatgtttattacaatcactctctgtggggggtggccctgctgctcctcagaatcctggtgccttgaagttctctgtgcatctgtccatcctccctatggccctggccagagctcagcatgggcaggggttctgggtaggacggtcactgtcctctctcctggactggtcttcccagccctaaaccctgccccaggaagcccacagcctcacctgctgctgcccctctaggtctgggcagccatgacctgcagggcccagagacactgtccttcccctcatccacccaaggccccagccagcgctcataccctgtcctttctccctgaccccaagggcacagaggcaaggcctcctgtctacagcagcttcctcagtttcctactgccttaggaggcccctgcttgtgctcagggaaggcctcttcatgggcatgttcctgctggggcggtgcggtttggtcccaactctgctaagttttctgagatgagggtctagccctgttggggacagaaaagtgtgtagaccttcttcctgctagggctgcactgtcctgggtgttgggcccttctggtggacaaggctgtgccaaccctgtacagaatcgagtgctgtagcctggccagaccccagagcccttgtgccatctttcttcctggccagagtgatggggttccagccatggggaagcaacccaatcctctgtctccttgctccaatggaggcagaagagcccaggacccaagcgtcttggcaggggtgctgtgaatgtccagtggtcccagctccccaccctggccctgccccagcctgtgtagctcttcctgcatgtggatgctgcatgtctggtctggggcttggatgttgcactgccccactgcctgtcccttctggtaaaataaagaactcttaatgccca

SEQ ID NO: 421387 - DNA, 2923 bp, Homo sapiens
ctgtatctgaagcccctcggaataaagcgcgttgaccgccgaagctgcgctcactcctgcctcaacgcgccggccccgccctccgccgccacacttccggcggggctgcgaccgcagaggggcgcgggcgagcgagcgggcggccggccgctgggggtggcgggataggctgggcgcggccggcgctgcagacccgctgctgttgtccgggtctgtgcggtcccgagggccctccgtgccgccggcgccatgggcaattgccacacggtggggcccaacgaggcgctggtggtttcagggggctgttgtggttccgactataaacagtacgtgtttggcggctgggcctgggcctggtggtgtatctccgacactcagagactgtctctggaggttatgaccatcctgtgtcgctgtgagaatattgagacgtcggagggggttccactattcgtaacaggggttgcacaggtcccttgcccttgcctattggactgcaagtggggaaacagcaagggattctggaagctctgccaagtctgccagatttccctagagattatgacgttgcagccccgctgcgaggacgtagagacggccgagggggtagctttaactgtgacgggtgtcgcccaggtgaagatcatgacggagaaggaactcctggccgtggcttgtgagcagtttctgggtaagaatgtgcaggacatcaaaaacgtcgtcctgcagaccctggagggacatctgcgctccatcctcgggaccctgacagtggagcagatttatcaggaccgggaccagtttgccaagctggtgcgggaggtggcagcccctgatgttggccgcatgggcattgagatcctcagcttcaccatcaaggacgtgtatgacaaagtggactatctgagctccctgggcaagacgcagactgccgtggtgcagagagatgctgacattggcgtggccgaggctgaacgggacgcaggcatccgggaagctgagtgcaagaaggagatgctggatgtgaagttcatggcagacaccaagattgctgactctaagcgagccttcgagctgcaaaagtcagccttcagtgaggaggttaacatcaagacagctgaggcccagttggcctatgagctgcagggggcccgtgaacagcagaagatccggcaggaagagattgagattgaggttgtgcagcgcaagaaacagattgccgtggaggcacaggagatcctgcgtacggacaaggagctcatcgctacagtgcgccggcctgccgaggccgaggcccaccgcatccagcagattgccgagggtgaaaaggtgaagcaggtcctcttggcacaggcagaggctgagaagatccgcaaaatcggggaggcggaagcggcagtcatcgaggcgatgggcaaggcagaggctgagcggatgaagctcaaggcagaagcctaccagaaatacggggatgcagccaagatggccttggtgctagaggccctgccccagattgctgccaaaatcgctgccccacttaccaaggtcgatgagattgtggtcctcagtggagacaacagtaaggtcacatcagaagtgaaccgactgctggccgagctgcctgcctctgtgcatgccctcacaggcgtggacctgtctaagatacccctgatcaagaaggccactggtgtgcaggtgtgaggctcctgcaggcccactctcttcagcagccacccggccctccctccagcacccgttttaatcccacagaacaacgggaacgttactgactctggtgccttatctcgaagggaccagaagtgctgtgtgttcaggccatctctggctgtcttcctgtctctcctgtctgtccacctcctcctcttcctctcctttaccccactttcactgccactttcatcaggtttgtgtctcatctccctgcgtgtcttttcctttgtctgtctttttctttcccccatgcacatcatgtagattaagctgaagatgtttattacaatcactctctgtggggggtggccctgctgctcctcagaatcctggtgccttgaagttctctgtgcatctgtccatcctccctatggccctggccagagctcagcatgggcaggggttctgggtaggacggtcactgtcctctctcctggactggtcttcccagccctaaaccctgccccaggaagcccacagcctcacctgctgctgcccctctaggtctgggcagccatgacctgcagggcccagagacactgtccttcccctcatccacccaaggccccagccagcgctcataccctgtcctttctccctgaccccaagggcacagaggcaaggcctcctgtctacagcagcttcctcagtttcctactgccttaggaggcccctgcttgtgctcagggaaggcctcttcatgggcatgttcctgctggggcggtgcggtttggtcccaactctgctaagttttctgagatgagggtctagccctgttggggacagaaaagtgtgtagaccttcttcctgctagggctgcactgtcctgggtgttgggcccttctggtggacaaggctgtgccaaccctgtacagaatcgagtgctgtagcctggccagaccccagagcccttgtgccatctttcttcctggccagagtgatggggttccagccatggggaagcaacccaatcctctgtctccttgctccaatggaggcagaagagcccaggacccaagcgtcttggcaggggtgctgtgaatgtccagtggtcccagctccccaccctggccctgccccagcctgtgtagctcttcctgcatgtggatgctgcatgtctggtctggggcttggatgttgcactgccccactgcctgtcccttctggtaaaataaagaactcttaatgccca

SEQ ID NO: 421388 - DNA, 2001 bp, Homo sapiens
cgacagtggacaatctgctcggcagaagctctgagtcctggaaggacatgaatgccacggagcaggtgcacacgtgcaccatgctcctcgacgtcctggaggagggcgccttcctgctggccgacaatgtcagggagcctgcccgcttcctggctgccaaggagaacgtggtcctggaggttaacatcaagacagctgaggcccagttggcctatgagctgcagggggcccgtgaacagcagaagatccggcaggaagagattgagattgaggttgtgcagcgcaagaaacagattgccgtggaggcacaggagatcctgcgtacggacaaggagctcatcgctacagtgcgccggcctgccgaggccgaggcccaccgcatccagcagattgccgagggtgaaaaggtgaagcaggtcctcttggcacaggcagaggctgagaagatccgcaaaatcggggaggcggaagcggcagtcatcgaggcgatgggcaaggcagaggctgagcggatgaagctcaaggcagaagcctaccagaaatacggggatgcagccaagatggccttggtgctagaggccctgccccagattgctgccaaaatcgctgccccacttaccaaggtcgatgagattgtggtcctcagtggagacaacagtaaggtcacatcagaagtgaaccgactgctggccgagctgcctgcctctgtgcatgccctcacaggcgtggacctgtctaagatacccctgatcaagaaggccactggtgtgcaggtgtgaggctcctgcaggcccactctcttcagcagccacccggccctccctccagcacccgttttaatcccacagaacaacgggaacgttactgactctggtgccttatctcgaagggaccagaagtgctgtgtgttcaggccatctctggctgtcttcctgtctctcctgtctgtccacctcctcctcttcctctcctttaccccactttcactgccactttcatcaggtttgtgtctcatctccctgcgtgtcttttcctttgtctgtctttttctttcccccatgcacatcatgtagattaagctgaagatgtttattacaatcactctctgtggggggtggccctgctgctcctcagaatcctggtgccttgaagttctctgtgcatctgtccatcctccctatggccctggccagagctcagcatgggcaggggttctgggtaggacggtcactgtcctctctcctggactggtcttcccagccctaaaccctgccccaggaagcccacagcctcacctgctgctgcccctctaggtctgggcagccatgacctgcagggcccagagacactgtccttcccctcatccacccaaggccccagccagcgctcataccctgtcctttctccctgaccccaagggcacagaggcaaggcctcctgtctacagcagcttcctcagtttcctactgccttaggaggcccctgcttgtgctcagggaaggcctcttcatgggcatgttcctgctggggcggtgcggtttggtcccaactctgctaagttttctgagatgagggtctagccctgttggggacagaaaagtgtgtagaccttcttcctgctagggctgcactgtcctgggtgttgggcccttctggtggacaaggctgtgccaaccctgtacagaatcgagtgctgtagcctggccagaccccagagcccttgtgccatctttcttcctggccagagtgatggggttccagccatggggaagcaacccaatcctctgtctccttgctccaatggaggcagaagagcccaggacccaagcgtcttggcaggggtgctgtgaatgtccagtggtcccagctccccaccctggccctgccccagcctgtgtagctcttcctgcatgtggatgctgcatgtctggtctggggcttggatgttgcactgccccactgcctgtcccttctggtaaaataaagaactcttaatgccca

SEQ ID NO: 421389 - DNA, 1558 bp, Homo sapiens
ggtatcgcctcgtcggtttttgcggaagcggcagtcatcgaggcgatgggcaaggcagaggctgagcggatgaagctcaaggcagaagcctaccagaaatacggggatgcagccaagatggccttggtgctagaggccctgccccagattgctgccaaaatcgctgccccacttaccaaggtcgatgagattgtggtcctcagtggagacaacagtaaggtcacatcagaagtgaaccgactgctggccgagctgcctgcctctgtgcatgccctcacaggcgtggacctgtctaagatacccctgatcaagaaggccactggtgtgcaggtgtgaggctcctgcaggcccactctcttcagcagccacccggccctccctccagcacccgttttaatcccacagaacaacgggaacgttactgactctggtgccttatctcgaagggaccagaagtgctgtgtgttcaggccatctctggctgtcttcctgtctctcctgtctgtccacctcctcctcttcctctcctttaccccactttcactgccactttcatcaggtttgtgtctcatctccctgcgtgtcttttcctttgtctgtctttttctttcccccatgcacatcatgtagattaagctgaagatgtttattacaatcactctctgtggggggtggccctgctgctcctcagaatcctggtgccttgaagttctctgtgcatctgtccatcctccctatggccctggccagagctcagcatgggcaggggttctgggtaggacggtcactgtcctctctcctggactggtcttcccagccctaaaccctgccccaggaagcccacagcctcacctgctgctgcccctctaggtctgggcagccatgacctgcagggcccagagacactgtccttcccctcatccacccaaggccccagccagcgctcataccctgtcctttctccctgaccccaagggcacagaggcaaggcctcctgtctacagcagcttcctcagtttcctactgccttaggaggcccctgcttgtgctcagggaaggcctcttcatgggcatgttcctgctggggcggtgcggtttggtcccaactctgctaagttttctgagatgagggtctagccctgttggggacagaaaagtgtgtagaccttcttcctgctagggctgcactgtcctgggtgttgggcccttctggtggacaaggctgtgccaaccctgtacagaatcgagtgctgtagcctggccagaccccagagcccttgtgccatctttcttcctggccagagtgatggggttccagccatggggaagcaacccaatcctctgtctccttgctccaatggaggcagaagagcccaggacccaagcgtcttggcaggggtgctgtgaatgtccagtggtcccagctccccaccctggccctgccccagcctgtgtagctcttcctgcatgtggatgctgcatgtctggtctggggcttggatgttgcactgccccactgcctgtcccttctggtaaaataaagaactcttaatgccca

SEQ ID NO: 421390 - DNA, 1380 bp, Homo sapiens
  misc_feature (2)..(2): n is a, c, g, or t
gngcacgagcggcacgagtcggcacgagagacaacagtaaggtcacatcagaagtgaaccgactgctggccgagctgcctgcctctgtgcatgccctcacaggcgtggacctgtctaagatacccctgatcaagaaggccactggtgtgcaggtgtgaggctcctgcaggcccactctcttcagcagccacccggccctccctccagcacccgttttaatcccacagaacaacgggaacgttactgactctggtgccttatctcgaagggaccagaagtgctgtgtgttcaggccatctctggctgtcttcctgtctctcctgtctgtccacctcctcctcttcctctcctttaccccactttcactgccactttcatcaggtttgtgtctcatctccctgcgtgtcttttcctttgtctgtctttttctttcccccatgcacatcatgtagattaagctgaagatgtttattacaatcactctctgtggggggtggccctgctgctcctcagaatcctggtgccttgaagttctctgtgcatctgtccatcctccctatggccctggccagagctcagcatgggcaggggttctgggtaggacggtcactgtcctctctcctggactggtcttcccagccctaaaccctgccccaggaagcccacagcctcacctgctgctgcccctctaggtctgggcagccatgacctgcagggcccagagacactgtccttcccctcatccacccaaggccccagccagcgctcataccctgtcctttctccctgaccccaagggcacagaggcaaggcctcctgtctacagcagcttcctcagtttcctactgccttaggaggcccctgcttgtgctcagggaaggcctcttcatgggcatgttcctgctggggcggtgcggtttggtcccaactctgctaagttttctgagatgagggtctagccctgttggggacagaaaagtgtgtagaccttcttcctgctagggctgcactgtcctgggtgttgggcccttctggtggacaaggctgtgccaaccctgtacagaatcgagtgctgtagcctggccagaccccagagcccttgtgccatctttcttcctggccagagtgatggggttccagccatggggaagcaacccaatcctctgtctccttgctccaatggaggcagaagagcccaggacccaagcgtcttggcaggggtgctgtgaatgtccagtggtcccagctccccaccctggccctgccccagcctgtgtagctcttcctgcatgtggatgctgcatgtctggtctggggcttggatgttgcactgccccactgcctgtcccttctggtaaaataaagaactcttaatgccca

SEQ ID NO: 421391 - DNA, 1353 bp, Homo sapiens
taactaggctaggtagaggcgggtgtttatcaggcgaggggcagagcctgcctgcctctgtgcatgccctcacaggcgtggacctgtctaagatacccctgatcaagaaggccactggtgtgcaggtgtgaggctcctgcaggcccactctcttcagcagccacccggccctccctccagcacccgttttaatcccacagaacaacgggaacgttactgactctggtgccttatctcgaagggaccagaagtgctgtgtgttcaggccatctctggctgtcttcctgtctctcctgtctgtccacctcctcctcttcctctcctttaccccactttcactgccactttcatcaggtttgtgtctcatctccctgcgtgtcttttcctttgtctgtctttttctttcccccatgcacatcatgtagattaagctgaagatgtttattacaatcactctctgtggggggtggccctgctgctcctcagaatcctggtgccttgaagttctctgtgcatctgtccatcctccctatggccctggccagagctcagcatgggcaggggttctgggtaggacggtcactgtcctctctcctggactggtcttcccagccctaaaccctgccccaggaagcccacagcctcacctgctgctgcccctctaggtctgggcagccatgacctgcagggcccagagacactgtccttcccctcatccacccaaggccccagccagcgctcataccctgtcctttctccctgaccccaagggcacagaggcaaggcctcctgtctacagcagcttcctcagtttcctactgccttaggaggcccctgcttgtgctcagggaaggcctcttcatgggcatgttcctgctggggcggtgcggtttggtcccaactctgctaagttttctgagatgagggtctagccctgttggggacagaaaagtgtgtagaccttcttcctgctagggctgcactgtcctgggtgttgggcccttctggtggacaaggctgtgccaaccctgtacagaatcgagtgctgtagcctggccagaccccagagcccttgtgccatctttcttcctggccagagtgatggggttccagccatggggaagcaacccaatcctctgtctccttgctccaatggaggcagaagagcccaggacccaagcgtcttggcaggggtgctgtgaatgtccagtggtcccagctccccaccctggccctgccccagcctgtgtagctcttcctgcatgtggatgctgcatgtctggtctggggcttggatgttgcactgccccactgcctgtcccttctggtaaaataaagaactcttaatgccca

SEQ ID NO: 421392 - DNA, 1152 bp, Homo sapiens
cttgcttgtacggcttgcatccgggtcttctgctgtcacgggccccctgcagctcataggccaactgggcctcagctgtcttcctgtctctcctgtctgtccacctcctcctcttcctctcctttaccccactttcactgccactttcatcaggtttgtgtctcatctccctgcgtgtcttttcctttgtctgtctttttctttcccccatgcacatcatgtagattaagctgaagatgtttattacaatcactctctgtggggggtggccctgctgctcctcagaatcctggtgccttgaagttctctgtgcatctgtccatcctccctatggccctggccagagctcagcatgggcaggggttctgggtaggacggtcactgtcctctctcctggactggtcttcccagccctaaaccctgccccaggaagcccacagcctcacctgctgctgcccctctaggtctgggcagccatgacctgcagggcccagagacactgtccttcccctcatccacccaaggccccagccagcgctcataccctgtcctttctccctgaccccaagggcacagaggcaaggcctcctgtctacagcagcttcctcagtttcctactgccttaggaggcccctgcttgtgctcagggaaggcctcttcatgggcatgttcctgctggggcggtgcggtttggtcccaactctgctaagttttctgagatgagggtctagccctgttggggacagaaaagtgtgtagaccttcttcctgctagggctgcactgtcctgggtgttgggcccttctggtggacaaggctgtgccaaccctgtacagaatcgagtgctgtagcctggccagaccccagagcccttgtgccatctttcttcctggccagagtgatggggttccagccatggggaagcaacccaatcctctgtctccttgctccaatggaggcagaagagcccaggacccaagcgtcttggcaggggtgctgtgaatgtccagtggtcccagctccccaccctggccctgccccagcctgtgtagctcttcctgcatgtggatgctgcatgtctggtctggggcttggatgttgcactgccccactgcctgtcccttctggtaaaataaagaactcttaatgccca

SEQ ID NO: 421393 - DNA, 1100 bp, Homo sapiens
ggggatgccgcggcgatctagaggatcccggttaagagaatattctgtccacctcctcctcttcctctcctttaccccactttcactgccactttcatcaggtttgtgtctcatctccctgcgtgtcttttcctttgtctgtctttttctttcccccatgcacatcatgtagattaagctgaagatgtttattacaatcactctctgtggggggtggccctgctgctcctcagaatcctggtgccttgaagttctctgtgcatctgtccatcctccctatggccctggccagagctcagcatgggcaggggttctgggtaggacggtcactgtcctctctcctggactggtcttcccagccctaaaccctgccccaggaagcccacagcctcacctgctgctgcccctctaggtctgggcagccatgacctgcagggcccagagacactgtccttcccctcatccacccaaggccccagccagcgctcataccctgtcctttctccctgaccccaagggcacagaggcaaggcctcctgtctacagcagcttcctcagtttcctactgccttaggaggcccctgcttgtgctcagggaaggcctcttcatgggcatgttcctgctggggcggtgcggtttggtcccaactctgctaagttttctgagatgagggtctagccctgttggggacagaaaagtgtgtagaccttcttcctgctagggctgcactgtcctgggtgttgggcccttctggtggacaaggctgtgccaaccctgtacagaatcgagtgctgtagcctggccagaccccagagcccttgtgccatctttcttcctggccagagtgatggggttccagccatggggaagcaacccaatcctctgtctccttgctccaatggaggcagaagagcccaggacccaagcgtcttggcaggggtgctgtgaatgtccagtggtcccagctccccaccctggccctgccccagcctgtgtagctcttcctgcatgtggatgctgcatgtctggtctggggcttggatgttgcactgccccactgcctgtcccttctggtaaaataaagaactcttaatgccca

SEQ ID NO: 421394 - DNA, 1179 bp, Homo sapiens
ctgtatctgaagcccctcggaataaagcgcgttgaccgccgaagctgcgctcactcctgcctcaacgcgccggccccgccctccgccgccacacttccggcggggctgcgaccgcagaggggcgcgggcgagcgagcgggcggccggccgctgggggtggcgggataggctgggcgcggccggcgctgcagacccgctgctgtgtcttttcctttgtctgtctttttctttcccccatgcacatcatgtagattaagctgaagatgtttattacaatcactctctgtggggggtggccctgctgctcctcagaatcctggtgccttgaagttctctgtgcatctgtccatcctccctatggccctggccagagctcagcatgggcaggggttctgggtaggacggtcactgtcctctctcctggactggtcttcccagccctaaaccctgccccaggaagcccacagcctcacctgctgctgcccctctaggtctgggcagccatgacctgcagggcccagagacactgtccttcccctcatccacccaaggccccagccagcgctcataccctgtcctttctccctgaccccaagggcacagaggcaaggcctcctgtctacagcagcttcctcagtttcctactgccttaggaggcccctgcttgtgctcagggaaggcctcttcatgggcatgttcctgctggggcggtgcggtttggtcccaactctgctaagttttctgagatgagggtctagccctgttggggacagaaaagtgtgtagaccttcttcctgctagggctgcactgtcctgggtgttgggcccttctggtggacaaggctgtgccaaccctgtacagaatcgagtgctgtagcctggccagaccccagagcccttgtgccatctttcttcctggccagagtgatggggttccagccatggggaagcaacccaatcctctgtctccttgctccaatggaggcagaagagcccaggacccaagcgtcttggcaggggtgctgtgaatgtccagtggtcccagctccccaccctggccctgccccagcctgtgtagctcttcctgcatgtggatgctgcatgtctggtctggggcttggatgttgcactgccccactgcctgtcccttctggtaaaataaagaactcttaatgccca

SEQ ID NO: 421395 - DNA, 1417 bp, Homo sapiens
ctgtatctgaagcccctcggaataaagcgcgttgaccgccgaagctgcgctcactcctgcctcaacgcgccggccccgccctccgccgccacacttccggcggggctgcgaccgcagaggggcgcgggcgagcgagcgggcggccggccgctgggggtggcgggataggctgggcgcggccggcgctgcagacccgctgctgttgtccgggtctgtgcggtcccgagggccctccgtgccgccggcgccatgggcaattgccacacggtggggcccaacgaggcgctggtggtttcagggggctgttgtggttccgactataaacagtacgtgtttggcggctgggcctgggcctggtggtgtatctccgacactcagaggatttccctagagattatgacgttgcagccccgctgcgaggacgtagagacggccgagggggtagctttaactgtgacgggtgtcgcccaggtgaagatcatgacggagaaggaactcctggccgtggcttgtgagcagtttctgggtaagaatgtgcaggacatcaaaaacgtcgtcctgcagaccctggagggacatctgcgctccatcctcgggaccctgacagtggagcagatttatcaggaccgggaccagtttgccaagctggtgcgggaggtggcagcccctgatgttggccgcatgggcattgagatcctcagcttcaccatcaaggacgtgtatgacaaagtggactatctgagctccctgggcaagacgcagactgccgtggtgcagagagatgctgacattggcgtggccgaggctgaacgggacgcaggcatccgggaagctgagtgcaagaaggagatgctggatgtgaagttcatggcagacaccaagattgctgactctaagcgagccttcgagctgcaaaagtcagccttcagtgaggaggttaacatcaagacagctgaggcccagttggcctatgagctgcagggggcccgtgaacagcagaagatccggcaggaagagattgagattgaggttgtgcagcgcaagaaacagattgccgtggaggcacaggagatcctgcgtacggacaaggagctcatcgctacagtgcgccggcctgccgaggccgaggcccaccgcatccagcagattgccgagggtgaaaaggtgaagcaggtcctcttggcacaggcagaggctgagaagatccgcaaaatcggggaggcggaagcggcagtcatcgaggcgatgggcaaggcagaggctgagcggatgaagctcaaggcagaagcctaccagaaatacggggatgcagccaagatggccttggtgctagaggccctgccccaggtgaggcttccacccaagcggtgccccactgcctgtcccttctggtaaaataaagaactcttaatgccca

SEQ ID NO: 421396 - DNA, 926 bp, Homo sapiens
actcgtccctcttgctgctgtcctcctcctgctgctgtcctcctcctgctgctcctcagaatcctggtgccttgaagttctctgtgcatctgtccatcctccctatggccctggccagagctcagcatgggcaggggttctgggtaggacggtcactgtcctctctcctggactggtcttcccagccctaaaccctgccccaggaagcccacagcctcacctgctgctgcccctctaggtctgggcagccatgacctgcagggcccagagacactgtccttcccctcatccacccaaggccccagccagcgctcataccctgtcctttctccctgaccccaagggcacagaggcaaggcctcctgtctacagcagcttcctcagtttcctactgccttaggaggcccctgcttgtgctcagggaaggcctcttcatgggcatgttcctgctggggcggtgcggtttggtcccaactctgctaagttttctgagatgagggtctagccctgttggggacagaaaagtgtgtagaccttcttcctgctagggctgcactgtcctgggtgttgggcccttctggtggacaaggctgtgccaaccctgtacagaatcgagtgctgtagcctggccagaccccagagcccttgtgccatctttcttcctggccagagtgatggggttccagccatggggaagcaacccaatcctctgtctccttgctccaatggaggcagaagagcccaggacccaagcgtcttggcaggggtgctgtgaatgtccagtggtcccagctccccaccctggccctgccccagcctgtgtagctcttcctgcatgtggatgctgcatgtctggtctggggcttggatgttgcactgccccactgcctgtcccttctggtaaaataaagaactcttaatgccca

SEQ ID NO: 421397 - DNA, 2061 bp, Homo sapiens
ctgtatctgaagcccctcggaataaagcgcgttgaccgccgaagctgcgctcactcctgcctcaacgcgccggccccgccctccgccgccacacttccggcggggctgcgaccgcagaggggcgcgggcgagcgagcgggcggccggccgctgggggtggcgggataggctgggcgcggccggcgctgcagacccgctgctgttgtccgggtctgtgcggtcccgagggccctccgtgccgccggcgccatgggcaattgccacacggtggggcccaacgaggcgctggtggtttcagggggctgttgtggttccgactataaacagtacgtgtttggcggctgggcctgggcctggtggtgtatctccgacactcagaggatttccctagagattatgacgttgcagccccgctgcgaggacgtagagacggccgagggggtagctttaactgtgacgggtgtcgcccaggtgaagatcatgacggagaaggaactcctggccgtggcttgtgagcagtttctgggtaagaatgtgcaggacatcaaaaacgtcgtcctgcagaccctggagggacatctgcgctccatcctcgggaccctgacagtggagcagatttatcaggaccgggaccagtttgccaagctggtgcgggaggtggcagcccctgatgttggccgcatgggcattgagatcctcagcttcaccatcaaggacgtgtatgacaaagtggactatctgagctccctgggcaagacgcagactgccgtggtgcagagagatgctgacattggcgtggccgaggctgaacgggacgcaggcatccgggaagctgagtgcaagaaggagatgctggatgtgaagttcatggcagacaccaagattgctgactctaagcgagccttcgagctgcaaaagtcagccttcagtgaggaggttaacatcaagacagctgaggcccagttggcctatgagctgcagggggcccgtgaacagcagaagatccggcaggaagagattgagattgaggttgtgcagcgcaagaaacagattgccgtggaggcacaggagatcctgcgtacggacaaggagctcatcgctacagtgcgccggcctgccgaggccgaggcccaccgcatccagcagattgccgagggtgaaaaggtgaagcaggtcctcttggcacaggcagaggctgagaagatccgcaaaatcggggaggcggaagcggcagtcatcgaggcgatgggcaaggcagaggctgagcggatgaagctcaaggcagaagcctaccagaaatacggggatgcagccaagatggccttggtgctagaggccctgccccaggtgaggcttccacccaagcgggtcctagggttcaagtgtccttgcttgacaagctgggcaagtgccagaacttctctgggccttgcgagtaacacagggacagatggctagaagggttaaatgaggagcatcctcagcagggggcaggaaccctacaaaggcctaagccatccctggcccacagggcgtctcttaccatggctcgagactaagggccacccaggctgctttggggttggagtgagttaaggaagggagggagagatgctggaccgggctgagaacagagtcagcgccaaccaggctgtcctcccactcttacctcctagattgctgccaaaatcgctgccccacttaccaaggtcgatgagattgtggtcctcagtggagacaacagtaaggtcacatcagaagtgaaccgactgctggccgagctgcctgcctctgtgcatgccctcacaggcgtggacctgtctaagatacccctgatcaagaaggccactggtgtgcaggtgtgaggctcctgcaggcccactctcttcagcagccacccggccctccctccagcacccgttttaatcccacagaacaacgggaacgttactgactctggtgccttatctcgaagggaccagaagtacatgactcatcaaccaatctctaactctactcccatctctcaatgtctcacacctccatcctcatctcttacat

SEQ ID NO: 421398 - DNA, 895 bp, Homo sapiens
ctgtatctgaagcccctcggaataaagcgcgttgaccgccgaagctgcgctcactcctgcctcaacgcgccggccccgccctccgccgccacacttccggcggggctgcgaccgcagaggggcgcgggcgagcgagcgggcggccggccgctgggggtggcgggataggctgggcgcggccggcgctgcagacccgctgctgttgtccgggtctgtgcggtcccgagggccctccgtgccgccggcgccatgggcaattgccacacggtggggcccaacgaggcgctggtggtttcagggggctgttgtggttccgactataaacagtacgtgtttggcggctgggcctgggcctggtggtgtatctccgacactcagaggatttccctagagattatgacgttgcagccccgctgcgaggacgtagagacggccgagggggtagctttaactgtgacgggtgtcgcccaggtgaagatcatgacggagaaggaactcctggccgtggcttgtgagcagtttctgggtaagaatgtgcaggacatcaaaaacgtcgtcctgcagaccctggagggacatctgcgctccatcctcgggaccctgacagtggagcagatttatcaggaccgggaccagtttgccaagctggtgcgggaggtggcagcccctgatgttggccgcatgggcattgagatcctcagcttcaccatcaaggacccaagcgtcttggcaggggtgctgtgaatgtccagtggtcccagctccccaccctggccctgccccagcctgtgtagctcttcctgcatgtggatgctgcatgtctggtctggggcttggatgttgcactgccccactgcctgtcccttctggtaaaataaagaactcttaatgccca

SEQ ID NO: 421399 - DNA, 1026 bp, Homo sapiens
ctgtatctgaagcccctcggaataaagcgcgttgaccgccgaagctgcgctcactcctgcctcaacgcgccggccccgccctccgccgccacacttccggcggggctgcgaccgcagaggggcgcgggcgagcgagcgggcggccggccgctgggggtggcgggataggctgggcgcggccggcgctgcagacccgctgctgttgtccgggtctgtgcggtcccgagggccctccgtgccgccggcgccatgggcaattgccacacggtggggcccaacgaggcgctggtggtttcagggggctgttgtggttccgactataaacagtacgtgtttggcggctgggcctgggcctggtggtgtatctccgacactcagagactgtctctggaggttatgaccatcctgtgtcgctgtgagaatattgagacgtcggagggggttccactattcgtaacaggggttgcacaggtcccttgcccttgcctattggactgcaagtggggaaacagcaagggattctggaagctctgccaagtctgccagtgagtgtccctggatgccaggccttctttaccatgcagccatagctggtgaaatctattcttgggcttgggtgttaattagctccaaatgcttactctgtcatgtgtgggttcccctcttcattgcttcattcaccagctctctactgagcaccttctcagtttgaggcatgtggactgcaggagcgaacaataaaaagcccctgccccctcagagcctgtgtgccagcgggttcccagcctggaagaggcctgaaccacatctttctcaccccctccctctgcattcagttgcccttcagcctctgcttaggcaaaaacactacaccaccactcccttcttcacccatcctgccatctctaatggggaaggggaccatccccatccccttagcccttgtagccatgggaggtgcagaggcctgggaggcttggagcaccttgtgtggaaggggtagggtccaggcctccttcaatactc

SEQ ID NO: 421400 - DNA, 2780 bp, Homo sapiens
  misc_feature (2779)..(2779): n is a, c, g, or t
ctgtatctgaagcccctcggaataaagcgcgttgaccgccgaagctgcgctcactcctgcctcaacgcgccggccccgccctccgccgccacacttccggcggggctgcgaccgcagaggggcgcgggcgagcgagcgggcggccggccgctgggggtggcgggataggctgggcgcggccggcgctgcagacccgctgctgttgtccgggtctgtgcggtcccgagggccctccgtgccgccggcgccatgggcaattgccacacggtggggcccaacgaggcgctggtggtttcagggggctgttgtggttccgactataaacagtacgtgtttggcggctgggcctgggcctggtggtgtatctccgacactcagaggatttccctagagattatgacgttgcagccccgctgcgaggacgtagagacggccgagggggtagctttaactgtgacgggtgtcgcccaggtgaagatcatgacggagaaggaactcctggccgtggcttgtgagcagtttctgggtaagaatgtgcaggacatcaaaaacgtcgtcctgcagaccctggagggacatctgcgctccatcctcgggaccctgacagtggagcagatttatcaggaccgggaccagtttgccaagctggtgcgggaggtggcagcccctgatgttggccgcatgggcattgagatcctcagcttcaccatcaaggacgtgtatgacaaagtggactatctgagctccctgggcaagacgcagactgccgtggtgcagagagatgctgacattggcgtggccgaggctgaacgggacgcaggcatccgggaagctgagtgcaagaaggagatgctggatgtgaagttcatggcagacaccaagattgctgactctaagcgagccttcgagctgcaaaagtcagccttcagtgaggaggttaacatcaagacagctgaggcccagttggcctatgagctgcagggggcccgtgaacagcagaagatccggcaggaagagattgagattgaggttgtgcagcgcaagaaacagattgccgtggaggcacaggagatcctgcgtacggacaaggagctcatcgctacagtgcgccggcctgccgaggccgaggcccaccgcatccagcagattgccgagggtgaaaaggtgaagcaggtcctcttggcacaggcagaggctgagaagatccgcaaaatcggggaggcggaagcggcagtcatcgaggcgatgggcaaggcagaggctgagcggatgaagctcaaggcagaagcctaccagaaatacggggatgcagccaagatggccttggtgctagaggccctgccccagattgctgccaaaatcgctgccccacttaccaaggtcgatgagattgtggtcctcagtggagacaacagtaaggtcacatcagaagtgaaccgactgctggccgagctgcctgcctctgtgcatgccctcacaggcgtggacctgtctaagatacccctgatcaagaaggccactggtgtgcaggtgtgaggctcctgcaggcccactctcttcagcagccacccggccctccctccagcacccgttttaatcccacagaacaacgggaacgttactgactctggtgccttatctcgaagggaccagaagtgctgtgtgttcaggccatctctggctgtcttcctgtctctcctgtctgtccacctcctcctcttcctctcctttaccccactttcactgccactttcatcaggtttgtgtctcatctccctgcgtgtcttttcctttgtctgtctttttctttcccccatgcacatcatgtagattaagctgaagatgtttattacaatcactctctgtggggggtggccctgctgctcctcagaatcctggtgccttgaagttctctgtgcatctgtccatcctccctatggccctggccagagctcagcatgggcaggggttctgggtaggacggtcactgtcctctctcctggactggtcttcccagccctaaaccctgccccaggaagcccacagcctcacctgctgctgcccctctaggtctgggcagccatgacctgcagggcccagagacactgtccttcccctcatccacccaaggccccagccagcgctcataccctgtcctttctccctgaccccaagggcacagaggcaaggcctcctgtctacagcagcttcctcagtttcctactgccttaggaggcccctgcttgtgctcagggaaggcctcttcatgggcatgttcctgctggggcggtgcggtttggtcccaactctgctaagttttctgagatgagggtctagccctgttggggacagaaaagtgtgtagaccttcttcctgctagggctgcactgtcctgggtgttgggcccttctggtggacaaggctgtgccaaccctgtacagaatcgagtgctgtagcctggccagaccccagagcccttgtgccatctttcttcctggccagagtgatggggttccagccatggggaagcaacccaatcctctgtctccttgctccaatggaggcagaagagcccaggacccaagcgtcttggcaggggtgctgtgaatgtccagtggtcccagctccccaccctggccctgccccagcctgtgtagctcttcctgcatgtggatgctgcatgtctggtctggggcttggatgttgcactgccccactgcctgtcccttctggtaaaataaagaactcttaatgcccaaaaagaggaaaggggaaaaant

SEQ ID NO: 421401 - DNA, 3409 bp, Homo sapiens
ctgtatctgaagcccctcggaataaagcgcgttgaccgccgaagctgcgctcactcctgcctcaacgcgccggccccgccctccgccgccacacttccggcggggctgcgaccgcagaggggcgcgggcgagcgagcgggcggccggccgctgggggtggcgggataggctgggcgcggccggcgctgcagacccgctgctgttgtccgggtctgtgcggtcccgagggccctccgtgccgccggcgccatgggcaattgccacacggtggggcccaacgaggcgctggtggtttcagggggctgttgtggttccgactataaacagtacgtgtttggcggctgggcctgggcctggtggtgtatctccgacactcagaggatttccctagagattatgacgttgcagccccgctgcgaggacgtagagacggccgagggggtagctttaactgtgacgggtgtcgcccaggtgaagatcatgacggagaaggaactcctggccgtggcttgtgagcagtttctgggtaagaatgtgcaggacatcaaaaacgtcgtcctgcagaccctggagggacatctgcgctccatcctcgggaccctgacagtggagcagatttatcaggaccgggaccagtttgccaagctggtgcgggaggtggcagcccctgatgttggccgcatgggcattgagatcctcagcttcaccatcaaggacgtgtatgacaaagtggactatctgagctccctgggcaagacgcagactgccgtggtgcagagagatgctgacattggcgtggccgaggctgaacgggacgcaggcatccgggaagctgagtgcaagaaggagatgctggatgtgaagttcatggcagacaccaagattgctgactctaagcgagccttcgagctgcaaaagtcagccttcagtgaggaggttaacatcaagacagctgaggcccagttggcctatgagctgcagggggcccgtgaacagcagaagatccggcaggaagagattgagattgaggttgtgcagcgcaagaaacagattgccgtggaggcacaggagatcctgcgtacggacaaggagctcatcgctacagtgcgccggcctgccgaggccgaggcccaccgcatccagcagattgccgagggtgaaaaggtgaagcaggtcctcttggcacaggcagaggctgagaagatccgcaaaatcggggaggcggaagcggcagtcatcgaggcgatgggcaaggcagaggctgagcggatgaagctcaaggcagaagcctaccagaaatacggggatgcagccaagatggccttggtgctagaggccctgccccagattgctgccaaaatcgctgccccacttaccaaggtcgatgagattgtggtcctcagtggagacaacagtaaggtcacatcagaagtgaaccgactgctggccgagctgcctgcctctgtgcatgccctcacaggcgtggacctgtctaagatacccctgatcaagaaggccactggtgtgcaggtgtgaggctcctgcaggcccactctcttcagcagccacccggccctccctccagcacccgttttaatcccacagaacaacgggaacgttactgactctggtgccttatctcgaagggaccagaagtgctgtgtgttcaggccatctctggctgtcttcctgtctctcctgtctgtccacctcctcctcttcctctcctttaccccactttcactgccactttcatcaggtttgtgtctcatctccctgcgtgtcttttcctttgtctgtctttttctttcccccatgcacatcatgtagattaagctgaagatgtttattacaatcactctctgtggggggtggccctgctgctcctcagaatcctggtgccttgaagttctctgtgcatctgtccatcctccctatggccctggccagagctcagcatgggcaggggttctgggtaggacggtcactgtcctctctcctggactggtcttcccagccctaaaccctgccccaggaagcccacagcctcacctgctgctgcccctctaggtctgggcagccatgacctgcagggcccagagacactgtccttcccctcatccacccaaggccccagccagcgctcataccctgtcctttctccctgaccccaagggcacagaggcaaggcctcctgtctacagcagcttcctcagtttcctactgccttaggaggcccctgcttgtgctcagggaaggcctcttcatgggcatgttcctgctggggcggtgcggtttggtcccaactctgctaagttttctgagatgagggtctagccctgttggggacagaaaagtgtgtagaccttcttcctgctagggctgcactgtcctgggtgttgggcccttctggtggacaaggctgtgccaaccctgtacagaatcgagtgctgtagcctggccagaccccagagcccttgtgccatctttcttcctggccagagtgatggggttccagccatggggaagcaacccaatcctctgtctccttgctccaatggaggcagaagagcccaggacccaagcgtcttggcaggggtgctgtgaatgtccagtggtcccagctccccaccctggccctgccccagcctgtgtagctcttcctgcatgtggatgctgcatgtctggtctggggcttggatgttgcactgccccactgcctgtcccttctggtaaaataaagaactcttaatgcccacaatccagcacactccttacatgcgcccaaacaccacacacaacacacaccccctcgccagcgccctgcctcatgctccgcgcgctgcccgcgcaccaacgcaggctccgtggcaagtggccccacgcccccactcagcccgctctccccgtgaactcgccacccctcccctcgcctaccaacccgcggggcccccgcactcctgcccgggctcctcccccataactaggcgcagcccgccctccaccccgcccggcaatcacggccccagcgtcaaccccctcgccactcagggcaccgcggcgggcacaaacgcaccaccgccccaccgccccccacccccaccacccccaccaccgcaccccccacccccccccccccccccacccggcacaccccacccccaccccacccgcggccacccccccgcgcaacgcccagcccggcacgccccccccccggcccacccccggacccacgcgcgcgcgcgagaaaccgcgccgcgcccgcctcacgccccagctcccgcccgcgccccaccacaccccgcccccccacccacgccgcccccgccgacgccgcgcccgaccgcagcgccccggcgccggccggcggcgaacgccaccgcgcgcccgcgcgccaagccgaccc

SEQ ID NO: 421402 - DNA, 2785 bp, Homo sapiens
ctgtatctgaagcccctcggaataaagcgcgttgaccgccgaagctgcgctcactcctgcctcaacgcgccggccccgccctccgccgccacacttccggcggggctgcgaccgcagaggggcgcgggcgagcgagcgggcggccggccgctgggggtggcgggataggctgggcgcggccggcgctgcagacccgctgctgttgtccgggtctgtgcggtcccgagggccctccgtgccgccggcgccatgggcaattgccacacggtggggcccaacgaggcgctggtggtttcagggggctgttgtggttccgactataaacagtacgtgtttggcggctgggcctgggcctggtggtgtatctccgacactcagaggatttccctagagattatgacgttgcagccccgctgcgaggacgtagagacggccgagggggtagctttaactgtgacgggtgtcgcccaggtgaagatcatgacggagaaggaactcctggccgtggcttgtgagcagtttctgggtaagaatgtgcaggacatcaaaaacgtcgtcctgcagaccctggagggacatctgcgctccatcctcgggaccctgacagtggagcagatttatcaggaccgggaccagtttgccaagctggtgcgggaggtggcagcccctgatgttggccgcatgggcattgagatcctcagcttcaccatcaaggacgtgtatgacaaagtggactatctgagctccctgggcaagacgcagactgccgtggtgcagagagatgctgacattggcgtggccgaggctgaacgggacgcaggcatccgggaagctgagtgcaagaaggagatgctggatgtgaagttcatggcagacaccaagattgctgactctaagcgagccttcgagctgcaaaagtcagccttcagtgaggaggttaacatcaagacagctgaggcccagttggcctatgagctgcagggggcccgtgaacagcagaagatccggcaggaagagattgagattgaggttgtgcagcgcaagaaacagattgccgtggaggcacaggagatcctgcgtacggacaaggagctcatcgctacagtgcgccggcctgccgaggccgaggcccaccgcatccagcagattgccgagggtgaaaaggtgaagcaggtcctcttggcacaggcagaggctgagaagatccgcaaaatcggggaggcggaagcggcagtcatcgaggcgatgggcaaggcagaggctgagcggatgaagctcaaggcagaagcctaccagaaatacggggatgcagccaagatggccttggtgctagaggccctgccccagattgctgccaaaatcgctgccccacttaccaaggtcgatgagattgtggtcctcagtggagacaacagtaaggtcacatcagaagtgaaccgactgctggccgagctgcctgcctctgtgcatgccctcacaggcgtggacctgtctaagatacccctgatcaagaaggccactggtgtgcaggtgtgaggctcctgcaggcccactctcttcagcagccacccggccctccctccagcacccgttttaatcccacagaacaacgggaacgttactgactctggtgccttatctcgaagggaccagaagtgctgtgtgttcaggccatctctggctgtcttcctgtctctcctgtctgtccacctcctcctcttcctctcctttaccccactttcactgccactttcatcaggtttgtgtctcatctccctgcgtgtcttttcctttgtctgtctttttctttcccccatgcacatcatgtagattaagctgaagatgtttattacaatcactctctgtggggggtggccctgctgctcctcagaatcctggtgccttgaagttctctgtgcatctgtccatcctccctatggccctggccagagctcagcatgggcaggggttctgggtaggacggtcactgtcctctctcctggactggtcttcccagccctaaaccctgccccaggaagcccacagcctcacctgctgctgcccctctaggtctgggcagccatgacctgcagggcccagagacactgtccttcccctcatccacccaaggccccagccagcgctcataccctgtcctttctccctgaccccaagggcacagaggcaaggcctcctgtctacagcagcttcctcagtttcctactgccttaggaggcccctgcttgtgctcagggaaggcctcttcatgggcatgttcctgctggggcggtgcggtttggtcccaactctgctaagttttctgagatgagggtctagccctgttggggacagaaaagtgtgtagaccttcttcctgctagggctgcactgtcctgggtgttgggcccttctggtggacaaggctgtgccaaccctgtacagaatcgagtgctgtagcctggccagaccccagagcccttgtgccatctttcttcctggccagagtgatggggttccagccatggggaagcaacccaatcctctgtctccttgctccaatggaggcagaagagcccaggacccaagcgtcttggcaggggtgctgtgaatgtccagtggtcccagctccccaccctggccctgccccagcctgtgtagctcttcctgcatgtggatgctgcatgtctggtctggggcttggatgttgcactgccccactgcctgtcccttctggtaaaataaagaactcttaatgcccaaggatgcttcttgacggggatcctcta

SEQ ID NO: 421403 - DNA, 2598 bp, Homo sapiens
ctgtatctgaagcccctcggaataaagcgcgttgaccgccgaagctgcgctcactcctgcctcaacgcgccggccccgccctccgccgccacacttccggcggggctgcgaccgcagaggggcgcgggcgagcgagcgggcggccggccgctgggggtggcgggataggctgggcgcggccggcgctgcagacccgctgctgttgtccgggtctgtgcggtcccgagggccctccgtgccgccggcgccatgggcaattgccacacggtggggcccaacgaggcgctggtggtttcagggggctgttgtggttccgactataaacagtacgtgtttggcggctgggcctgggcctggtggtgtatctccgacactcagaggtgaagatcatgacggagaaggaactcctggccgtggcttgtgagcagtttctggggaccctgacagtggagcagatttatcaggaccgggaccagtttgccaagctggtgcgggaggtggcagcccctgatgttggccgcatgggcattgagatcctcagcttcaccatcaaggacgtgtatgacaaagtggactatctgagctccctgggcaagacgcagactgccgtggtgcagagagatgctgacattggcgtggccgaggctgaacgggacgcaggcatccgggaagctgagtgcaagaaggagatgctggatgtgaagttcatggcagacaccaagattgctgactctaagcgagccttcgagctgcaaaagtcagccttcagtgaggaggttaacatcaagacagctgaggcccagttggcctatgagctgcagggggcccgtgaacagcagaagatccggcaggaagagattgagattgaggttgtgcagcgcaagaaacagattgccgtggaggcacaggagatcctgcgtacggacaaggagctcatcgctacagtgcgccggcctgccgaggccgaggcccaccgcatccagcagattgccgagggtgaaaaggtgaagcaggtcctcttggcacaggcagaggctgagaagatccgcaaaatcggggaggcggaagcggcagtcatcgaggcgatgggcaaggcagaggctgagcggatgaagctcaaggcagaagcctaccagaaatacggggatgcagccaagatggccttggtgctagaggccctgccccagattgctgccaaaatcgctgccccacttaccaaggtcgatgagattgtggtcctcagtggagacaacagtaaggtcacatcagaagtgaaccgactgctggccgagctgcctgcctctgtgcatgccctcacaggcgtggacctgtctaagatacccctgatcaagaaggccactggtgtgcaggtgtgaggctcctgcaggcccactctcttcagcagccacccggccctccctccagcacccgttttaatcccacagaacaacgggaacgttactgactctggtgccttatctcgaagggaccagaagtgctgtgtgttcaggccatctctggctgtcttcctgtctctcctgtctgtccacctcctcctcttcctctcctttaccccactttcactgccactttcatcaggtttgtgtctcatctccctgcgtgtcttttcctttgtctgtctttttctttcccccatgcacatcatgtagattaagctgaagatgtttattacaatcactctctgtggggggtggccctgctgctcctcagaatcctggtgccttgaagttctctgtgcatctgtccatcctccctatggccctggccagagctcagcatgggcaggggttctgggtaggacggtcactgtcctctctcctggactggtcttcccagccctaaaccctgccccaggaagcccacagcctcacctgctgctgcccctctaggtctgggcagccatgacctgcagggcccagagacactgtccttcccctcatccacccaaggccccagccagcgctcataccctgtcctttctccctgaccccaagggcacagaggcaaggcctcctgtctacagcagcttcctcagtttcctactgccttaggaggcccctgcttgtgctcagggaaggcctcttcatgggcatgttcctgctggggcggtgcggtttggtcccaactctgctaagttttctgagatgagggtctagccctgttggggacagaaaagtgtgtagaccttcttcctgctagggctgcactgtcctgggtgttgggcccttctggtggacaaggctgtgccaaccctgtacagaatcgagtgctgtagcctggccagaccccagagcccttgtgccatctttcttcctggccagagtgatggggttccagccatggggaagcaacccaatcctctgtctccttgctccaatggaggcagaagagcccaggacccaagcgtcttggcaggggtgctgtgaatgtccagtggtcccagctccccaccctggccctgccccagcctgtgtagctcttcctgcatgtggatgctgcatgtctggtctggggcttggatgttgcactgccccactgcctgtcccttctggtaaaataaagaactcttaatgccca

SEQ ID NO: 421404 - DNA, 2714 bp, Homo sapiens
ctgtatctgaagcccctcggaataaagcgcgttgaccgccgaagctgcgctcactcctgcctcaacgcgccggccccgccctccgccgccacacttccggcggggctgcgaccgcagaggggcgcgggcgagcgagcgggcggccggccgctgggggtggcgggataggctgggcgcggccggcgctgcagacccgctgctgttgtccgggtctgtgcggtcccgagggccctccgtgccgccggcgccatgggcaattgccacacggtggggcccaacgaggcgctggtggtttcagggggctgttgtggttccgactataaacagtacgtgtttggcggctgggcctgggcctggtggtgtatctccgacactcagaggatttccctagagattatgacgttgcagccccgctgcgaggacgtagagacggccgagggggtagctttaactgtgacgggtgtcgcccaggtgaagatcatgacggagaaggaactcctggccgtggcttgtgagcagtttctgggtaagaatgtgcaggacatcaaaaacgtcgtcctgcagaccctggagggacatctgcgctccatcctcgggaccctgacagtggagcagatttatcaggaccgggaccagtttgccaagctggtgcgggaggtggcagcccctgatgttggccgcatgggcattgagatcctcagcttcaccatcaaggacgtgtatgacaaagtggactatctgagctccctgggcaagacgcagactgccgtggtgcagagagatgctgacattggcgtggccgaggctgaacgggacgcaggcatccgggaagctgagtgcaagaaggagatgctggatgtgaagttcatggcagacaccaagattgctgactctaagcgagccttcgagctgcaaaagtcagccttcagtgaggaggttaacatcaagacagctgaggcccagttggcctatgagctgcagggggcccgtgaacagcagaagatccggcaggaagagattgagattgaggttgtgcagcgcaagaaacagattgccgtggaggcacaggagatcctgcgtacggacaaggagctcatcgctacagtgcgccggcctgccgaggccgaggcccaccgcatccagcagattgccgagggtgaaaaggtgaagcaggtcctcttggcacaggcagaggctgagaagatccgcaaaatcggggaggcggaagcggcagtcatcgaggcgatgggcaaggcagaggctgagcggatgaagctcaaggcagaagcctaccagaaatacggggatgcagccaagatggccttggtgctagaggccctgccccagattgctgccaaaatcgctgccccacttaccaaggtcgatgagattgtggtcctcagtggagacaacagtaaggtcacatcagaagtgaaccgactgctggccgagctgcctgcctctgtgcatgccctcacaggcgtggacctgtctaagatacccctgatcaagaaggccactggtgtgcaggtgtgaggctcctgcaggcccactctcttcagcagccacccggccctccctccagcacccgttttaatcccacagaacaacgggaacgttactgactctggtgccttatctcgaagggaccagaagtgctgtgtgttcaggccatctctggctgtcttcctgtctctcctgtctgtccacctcctcctcttcctctcctttaccccactttcactgccactttcatcaggtttgtgtctcatctccctgcgtgtcttttcctttgtctgtctttttctttcccccatgcacatcatgtagattaagctgaagatgtttattacaatcacttgaagttctctgtgcatctgtccatcctccctatggccctggccagagctcagcatgggcaggggttctgggtaggacggtcactgtcctctctcctggactggtcttcccagccctaaaccctgccccaggaagcccacagcctcacctgctgctgcccctctaggtctgggcagccatgacctgcagggcccagagacactgtccttcccctcatccacccaaggccccagccagcgctcataccctgtcctttctccctgaccccaagggcacagaggcaaggcctcctgtctacagcagcttcctcagtttcctactgccttaggaggcccctgcttgtgctcagggaaggcctcttcatgggcatgttcctgctggggcggtgcggtttggtcccaactctgctaagttttctgagatgagggtctagccctgttggggacagaaaagtgtgtagaccttcttcctgctagggctgcactgtcctgggtgttgggcccttctggtggacaaggctgtgccaaccctgtacagaatcgagtgctgtagcctggccagaccccagagcccttgtgccatctttcttcctggccagagtgatggggttccagccatggggaagcaacccaatcctctgtctccttgctccaatggaggcagaagagcccaggacccaagcgtcttggcaggggtgctgtgaatgtccagtggtcccagctccccaccctggccctgccccagcctgtgtagctcttcctgcatgtggatgctgcatgtctggtctggggcttggatgttgcactgccccactgcctgtcccttctggtaaaataaagaactcttaatgccca

SEQ ID NO: 421405 - DNA, 2441 bp, Homo sapiens
ctgtatctgaagcccctcggaataaagcgcgttgaccgccgaagctgcgctcactcctgcctcaacgcgccggccccgccctccgccgccacacttccggcggggctgcgaccgcagaggggcgcgggcgagcgagcgggcggccggccgctgggggtggcgggataggctgggcgcggccggcgctgcagacccgctgctgttgtccgggtctgtgcggtcccgagggccctccgtgccgccggcgccatgggcaattgccacacggtggggcccaacgaggcgctggtggtttcagggggctgttgtggttccgactataaacagtacgtgtttggcggctgggcctgggcctggtggtgtatctccgacactcagaggatttccctagagattatgacgttgcagccccgctgcgaggacgtagagacggccgagggggtagctttaactgtgacgggtgtcgcccaggtgaagatcatgacggagaaggaactcctggccgtggcttgtgagcagtttctgggtaagaatgtgcaggacatcaaaaacgtcgtcctgcagaccctggagggacatctgcgctccatcctcgggaccctgacagtggagcagatttatcaggaccgggaccagtttgccaagctggtgcgggaggtggcagcccctgatgttggccgcatgggcattgagatcctcagcttcaccatcaaggacgtgtatgacaaagtggactatctgagctccctgggcaagacgcagactgccgtggtgcagagagatgctgacattggcgtggccgaggctgaacgggacgcaggcatccgggaagctgagtgcaagaaggagatgctggatgtgaagttcatggcagacaccaagattgctgactctaagcgagccttcgagctgcaaaagtcagccttcagtgaggaggttaacatcaagacagctgaggcccagttggcctatgagctgcagggggcccgtgaacagcagaagatccggcaggaagagattgagattgaggttgtgcagcgcaagaaacagattgccgtggaggcacaggagatcctgcgtacggacaaggagctcatcgctacagtgcgccggcctgccgaggccgaggcccaccgcatccagcagattgccgagggtgaaaaggtgaagcaggtcctcttggcacaggcagaggctgagaagatccgcaaaatcggggaggcggaagcggcagtcatcgaggcgatgggcaaggcagaggctgagcggatgaagctcaaggcagaagcctaccagaaatacggggatgcagccaagatggccttggtgctagaggccctgccccagattgctgccaaaatcgctgccccacttaccaaggtcgatgagattgtggtcctcagtggagacaacagtaaggtcacatcagaagtgaaccgactgctggccgagctgcctgcctctgtgcatgccctcacaggcgtggacctgtctaagatacccctgatcaagaaggccactggtgtgcaggtgtgaggctcctgcaggcccactctcttcagcagccacccggccctccctccagcacccgttttaatcccacagaacaacgggaacgttactgactctggtgccttatctcgaagggaccagaagtgctgtgtgttcaggccatctctggctgtcttcctgtctctcctgtctgtccacctcctcctcttcctctcctttaccccactttcactgccactttcatcaggtttgtgtctcatctccctgcgtgtcttttcctttgtctgtctttttctttcccccatgcacatcatgtagattaagctgaagatgtttattacaatcactctctgtggggggtggccctgctgctcctcagaatcctggtgccttgaagttctctgtgcatctgtccatcctccctatggccctggccagagctcagcatgggcaggggttctgggtaggacggtcactgtcctctctcctggactggtcttcccagccctaaaccctgccccaggaagcccacagcctcacctgctgctgcccctctaggtctgggcagccatgacctgcagggcccagagacactgtccttcccctcatccacccaaggccccagccagcgctcataccctgtcctttctccctgaccccaagggcacagaggcaaggcctcctgtctacagcagcttcctcagtttcctactgccttaggaggcccctgcttgtgctcagggaaggcctcttcatgggcatgttcctgctggggcggtgcggtttggtcccaacttccccaccctggccctgccccagcctgtgtagctcttcctgcatgtggatgctgcatgtctggtctggggcttggatgttgcactgccccactgcctgtcccttctggtaaaataaagaactcttaatgccca

SEQ ID NO: 421406 - DNA, 909 bp, Homo sapiens
ggtatcgcctcgtcggtttttgcggaagcggcagtcatcgaggcgatgggcaaggcagaggctgagcggatgaagctcaaggcagaagcctaccagaaatacggggatgcagccaagatggccttggtgctagaggccctgccccagattgctgccaaaatcgctgccccacttaccaaggtcgatgagattgtggtcctcagtggagacaacagtaaggtcacatcagaagtgaaccgactgctggccgagctgcctgcctctgtgcatgccctcacaggcgtggacctgtctaagataccctgtcctttctccctgaccccaagggcacagaggcaaggcctcctgtctacagcagcttcctcagtttcctactgccttaggaggcccctgcttgtgctcagggaaggcctcttcatgggcatgttcctgctggggcggtgcggtttggtcccaactctgctaagttttctgagatgagggtctagccctgttggggacagaaaagtgtgtagaccttcttcctgctagggctgcactgtcctgggtgttgggcccttctggtggacaaggctgtgccaaccctgtacagaatcgagtgctgtagcctggccagaccccagagcccttgtgccatctttcttcctggccagagtgatggggttccagccatggggaagcaacccaatcctctgtctccttgctccaatggaggcagaagagcccaggacccaagcgtcttggcaggggtgctgtgaatgtccagtggtcccagctccccaccctggccctgccccagcctgtgtagctcttcctgcatgtggatgctgcatgtctggtctggggcttggatgttgcactgccccactgcctgtcccttctggtaaaataaagaactcttaatgccca

SEQ ID NO: 421407 - DNA, 641 bp, Homo sapiens
ctgtatctgaagcccctcggaataaagcgcgttgaccgccgaagctgcgctcactcctgcctcaacgcgccggccccgccctccgccgccacacttccggcggggctgcgaccgcagaggggcgcgggcgagcgagcgggcggccggccgctgggggtggcgggataggctgggcgcggccggcgctgcagacccgctgctgttgtccgggtctgtgcggtcccgagggccctccgtgccgccggcgccatgggcaattgccacacggtggggcccaacgaggcgctggtggtttcagggggctgttgtggttccgactataaacagtacgtgtttggcggctgggcctgggcctggtggtgtatctccgacactcagaggatttccctagagattatgacgttgcagccccgctgcgaggacgtagagacggccgagggggtagctttaactgtgacgggtgtcgcccaggtgaagatcatgacggagaaggaactcctggccgtggcttgtgagcagtttctgggtaagaatgtgcaggacatcaaaaacgtcgtcctgcagaccctggagggacatctgcgctccatcctcggacccattcattctcataaattctcactagacataagagctgcctg

SEQ ID NO: 421408 - DNA, 942 bp, Homo sapiens
ctgtatctgaagcccctcggaataaagcgcgttgaccgccgaagctgcgctcactcctgcctcaacgcgccggccccgccctccgccgccacacttccggcggggctgcgaccgcagaggggcgcgggcgagcgagcgggcggccggccgctgggggtggcgggataggctgggcgcggccggcgctgcagacccgctgctgttgtccgggtctgtgcggtcccgagggccctccgtgccgccggcgccatgggcaattgccacacggtggggcccaacgaggcgctggtggtttcagggggctgttgtggttccgactataaacagtacgtgtttggcggctgggcctgggcctggtggtgtatctccgacactcagagactgtctctggaggttatgaccatcctgtgtcgctgtgagaatattgagacgtcggagggggttccactattcgtaacaggggttgcacagaaccaacagaggagatttaagagtgttaaaagcaagaaaaaaccctgaagcctcaggcagttcgtcgtgggaggtcacgttatttacaagaagtttctgctacctttcacacatttctgttgttccatctcaagtattcccaaagatcctcactgaggaaagtaggccatcaaagagacattgatgtatactcaggataggccctctagttttcaaactgagatatcaccatgttcaccgaaatttaatccagacaccctgaatttgagtcctcccctcctgccccccaactcttgcgcttggcaggtggccacttcccgaaaatgcaaaggaaagcttccaggagtgaattccaatcaggttctatttactgaatgttcattttggcaatgttctggtgcaaattgtagccagaaatgctggccctcttaagatttcaaaaaaattctaataaactaaaaaatgaacctg

SEQ ID NO: 421409 - DNA, 3143 bp, Homo sapiens
agagttcctattgggttaacactggaggctctaagatggcggcagtggcaacctgcggtagtgttgccgcgagtactgggtctgcagtggcgacagccagcaagagcaacgtcaccagtttccagaggaggggtcctagagccagcgtgaccaacgacagcggccctcgactggtgtccattgcgggcacgcgaccgtcggtgcggaatggacagctgctggtatcaaccgggctcccagccctagaccagctcttaggtggaggtttagccgttggaacagttcttctaattgaggaggataaatataatatttactcacctttgctcttcaagtatttcctggcagaaggaattgtcaatgggcatactttgttggttgcatctgctaaagaggatcctgccaacattttacaggaacttccagcaccattacttgatgataaatgtaaaaaggaatttgatgaagatgtatacaatcataaaacaccagaatctaatattaagatgaaaatagcttggcgttaccagttattacccaagatggagattggaccagtatcatcttcaagatttggtcactattatgatgcatcaaaaagaatgccacaagaactaattgaggcttcaaattggcatggattttttcttccagagaaaatatcttcaactctcaaagtagaaccctgttctttgacccctggctacacaaagctgcttcagtttatccagaacatcatttatgaggaaggatttgatggatccaatcctcagaaaaaacagagaaacattttaagaataggaattcagaatcttggctcacctttatggggagacgatatttgctgtgcagaaaatggtggcaacagtcacagccttaccaagttcctctatgttctccgtggtcttctgagaacctctctttcagcctgcatcatcacaatgccaacacatctgatccagaataaagccattattgcccgtgtcacaaccttgtcagatgtagtagttggtctggaatcatttattggttctgagagagaaactaacccattgtataaggattatcatggattgattcatatacggcagattcctcggcttaataacttgatctgtgatgaatcagatgtcaaagacttagcttttaaattaaaaaggaagctattcaccattgagcgactgcatttgcctccagacttgtcagacacagtgagccgctcaagcaaaatggatctggcagaatccgccaagcggctgggcccaggctgtggcatgatggccggaggcaagaagcacctggacttctagggattcctccttagtcgctgcatgcagaattctatgacactctaattatgattgctaatagcttatgtaaatatttttcttaacaatttgaccctccactccttgaaaaacacaggattataaaatggtgccgccatttctcattttttaactttttacagaactagcacagcagaaatacttttaaatttttccttcatgctctagagaaaataattttatttttaaataaacgccaaaaaatgtcaaaatctcaagattcctgacagtggtcattcgtgtgtgtactaaggcatttagtgtcatggtaaagtgcatgtcacagcaggtagcatacaaaacatgatgaaattcaagattgtatgtgaaaacatactttctctttattacagaaacagtcacttgccaccaaaaatgctgttttttaaatgaaaatgtgtttactaatatataaaataaatttgcatttatgtatccagttattaaattgataaagacaaagtaatattttgggatttagattccactagagataattagtctaccatagtagttattaaatataaagaacttcagtgataggaaacatagaaaaaagaagtggatggtctttagtttagtaatcctaaacaattgaagtcagtactatgaaattatgtcaacaggcatcattcaggattgaaattcaaactgacagctacattaatgctaggataccaggagaaaaacatatactgaagcttgttgagagattttacagaacataggtctgagacaaagtgaaaaaatgaaactaactcagatttccattgcatcacataaatattttgttaataatgaacattggttgagtgtgtaaatttctaaccatgtaaacatgtctttggggggtatagcatatcgaaccagttttcatatgaaacattaggtgttttaattacaattctatattctcaaagcttttgacagataatggataaaaaatgaaagttgaaaagtaacttgcatatttaagagtcttgattttttaaaaggtgtttaacatccattgggagaaactgaatttccaaaatacattttcaaatgtatttaatattttgaagcagttataactagcatttttaagcagcttgcttttaatataccacaaattatactttatttgttcttgacaacattgtagaaaacaaagactaggtttttaaaactgtctaaccaatatgatgaatgtcagtcacttaaaaaaacccactgtagcataaacacatactgtatacagcttttattcagaattagaataattgaatcaatgacagtgatttgccaggatgtcaaatctctccatcatatcctgtcactaccagtttattttttgtgatcaaaatcaaaaagacaactattttgtcacccgctatttcattagtactaaaaatcaggtttcttattctatttttttagaatgtcgggtttatttttttcatttcttttaattctaaagacacagattcttccccattttcttttcaaaataaagtttcagaattgatctgtcagttaaaattaaagggctttatattaagcaaaggtgcttttaaattttaaagcaacttcaaaaaattgatttagtccatagataataaataatgttgtgcggatactccacaaaagctctgctatgtcctttgaaagcattatgaacattctgaataaattcaaatgagtattttagtcagtttattattttaataactctaacctttttcttaccgtgttgattcattttatacaacacacaatggaacaattacatagcatttgacttgctgaaaaaga

SEQ ID NO: 421410 - DNA, 3571 bp, Homo sapiens
  misc_feature (1196)..(1196): n is a, c, g, or t
  misc_feature (1213)..(1214): n is a, c, g, or t
  misc_feature (1233)..(1233): n is a, c, g, or t
  misc_feature (1236)..(1237): n is a, c, g, or t
  misc_feature (1250)..(1250): n is a, c, g, or t
  misc_feature (1259)..(1259): n is a, c, g, or t
  misc_feature (1290)..(1290): n is a, c, g, or t
  misc_feature (1407)..(1407): n is a, c, g, or t
agagttcctattgggttaacactggaggctctaagatggcggcagtggcaacctgcggtagtgttgccgcgagtactgggtctgcagtggcgacagccagcaagagcaacgtcaccagtttccagaggaggggtcctagagccagcgtgaccaacgacagcggccctcgactggtgtccattgcgggcacgcgaccgtcggtgcggaatggacagctgctggtatcaaccgggctcccagccctagaccagctcttaggtggaggtttagccgttggaacagttcttctaattgaggaggataaatataatatttactcacctttgctcttcaagtatttcctggcagaaggaattgtcaatgggcatactttgttggttgcatctgctaaagaggatcctgccaacattttacaggaacttccagcaccattacttgatgataaatgtaaaaaggaatttgatgaagatgtatacaatcataaaacaccagaatctaatattaagatgaaaatagcttggcgttaccagttattacccaagatggagattggaccagtatcatcttcaagatttggtcactattatgatgcatcaaaaagaatgccacaagaactaattgaggcttcaaattggcatggattttttcttccagagaaaatatcttcaactctcaaagtagaaccctgttctttgacccctggctacacaaagctgcttcagtttatccagaacatcatttatgaggaaggatttgatggatccaatcctcagaaaaaacagagaaacattttaagaataggaattcagaatcttggctcacctttatggggagacgatatttgctgtgcagaaaatggtggcaacagtcacagccttaccaagttcctctatgttctccgtggtcttctgagaacctctctttcagcctgcatcatcacaatgccaacacatctgatccagaataaagccattattgcccgtgtcacaaccttgtcagatgtagtagttggtctggaatcatttattggttctgagagagaaactaacccattgtataaggattatcatggattgattcatatacggcagattcctcggcttaataacttgatctgtgatgaatcagatgtcaaagacttagcttttaaattaaaaaggaagctattcaccattgaggctggagtgcagtggcangatctcggctcacggcnncctcgcctcctgggttcangcnnttctcccgcctcngcctccctngtagctgggattacaggcgcccaccaccacncccagctaatttttgtatttttagtagagatggggttccaccatgttggccaggctggtctcgaactcctgacctcaggtgattcatccgcctcagcctcccaaagtgctggaattncaggcatgagctaccgcgcccggcctagggctttgtatttcaaagagaacaagtctaaagtgggtgcaagacaactacttgagacaagagaggaacatttatcctccaggcttctcatacttactcaagcagaaagactctgcatggggagaaggttctttacagcattccacatttttaatgagcttccttgcaaaggcgactgcatttgcctccagacttgtcagacacagtgagccgctcaagcaaaatggatctggcagaatccgccaagcggctgggcccaggctgtggcatgatggccggaggcaagaagcacctggacttctagggattcctccttagtcgctgcatgcagaattctatgacactctaattatgattgctaatagcttatgtaaatatttttcttaacaatttgaccctccactccttgaaaaacacaggattataaaatggtgccgccatttctcattttttaactttttacagaactagcacagcagaaatacttttaaatttttccttcatgctctagagaaaataattttatttttaaataaacgccaaaaaatgtcaaaatctcaagattcctgacagtggtcattcgtgtgtgtactaaggcatttagtgtcatggtaaagtgcatgtcacagcaggtagcatacaaaacatgatgaaattcaagattgtatgtgaaaacatactttctctttattacagaaacagtcacttgccaccaaaaatgctgttttttaaatgaaaatgtgtttactaatatataaaataaatttgcatttatgtatccagttattaaattgataaagacaaagtaatattttgggatttagattccactagagataattagtctaccatagtagttattaaatataaagaacttcagtgataggaaacatagaaaaaagaagtggatggtctttagtttagtaatcctaaacaattgaagtcagtactatgaaattatgtcaacaggcatcattcaggattgaaattcaaactgacagctacattaatgctaggataccaggagaaaaacatatactgaagcttgttgagagattttacagaacataggtctgagacaaagtgaaaaaatgaaactaactcagatttccattgcatcacataaatattttgttaataatgaacattggttgagtgtgtaaatttctaaccatgtaaacatgtctttggggggtatagcatatcgaaccagttttcatatgaaacattaggtgttttaattacaattctatattctcaaagcttttgacagataatggataaaaaatgaaagttgaaaagtaacttgcatatttaagagtcttgattttttaaaaggtgtttaacatccattgggagaaactgaatttccaaaatacattttcaaatgtatttaatattttgaagcagttataactagcatttttaagcagcttgcttttaatataccacaaattatactttatttgttcttgacaacattgtagaaaacaaagactaggtttttaaaactgtctaaccaatatgatgaatgtcagtcacttaaaaaaacccactgtagcataaacacatactgtatacagcttttattcagaattagaataattgaatcaatgacagtgatttgccaggatgtcaaatctctccatcatatcctgtcactaccagtttattttttgtgatcaaaatcaaaaagacaactattttgtcacccgctatttcattagtactaaaaatcaggtttcttattctatttttttagaatgtcgggtttatttttttcatttcttttaattctaaagacacagattcttccccattttcttttcaaaataaagtttcagaattgatctgtcagttaaaattaaagggctttatattaagcaaaggtgcttttaaattttaaagcaacttcaaaaaattgatttagtccatagataataaataatgttgtgcggatactccacaaaagctctgctatgtcctttgaaagcattatgaacattctgaataaattcaaatgagtattttagtcagtttattattttaataactctaacctttttcttaccgtgttgattcattttatacaacacacaatggaacaattacatagcatttgacttgctgaaaaaga

SEQ ID NO: 421411 - DNA, 2945 bp, Homo sapiens
gaggtgagaaaggcccacctgtgtcctggttgagggtctccaggttctttggggcccgaggtggaggtttagccgttggaacagttcttctaattgaggaggataaatataatatttactcacctttgctcttcaagtatttcctggcagaaggaattgtcaatgggcatactttgttggttgcatctgctaaagaggatcctgccaacattttacaggaacttccagcaccattacttgatgataaatgtaaaaaggaatttgatgaagatgtatacaatcataaaacaccagaatctaatattaagatgaaaatagcttggcgttaccagttattacccaagatggagattggaccagtatcatcttcaagatttggtcactattatgatgcatcaaaaagaatgccacaagaactaattgaggcttcaaattggcatggattttttcttccagagaaaatatcttcaactctcaaagtagaaccctgttctttgacccctggctacacaaagctgcttcagtttatccagaacatcatttatgaggaaggatttgatggatccaatcctcagaaaaaacagagaaacattttaagaataggaattcagaatcttggctcacctttatggggagacgatatttgctgtgcagaaaatggtggcaacagtcacagccttaccaagttcctctatgttctccgtggtcttctgagaacctctctttcagcctgcatcatcacaatgccaacacatctgatccagaataaagccattattgcccgtgtcacaaccttgtcagatgtagtagttggtctggaatcatttattggttctgagagagaaactaacccattgtataaggattatcatggattgattcatatacggcagattcctcggcttaataacttgatctgtgatgaatcagatgtcaaagacttagcttttaaattaaaaaggaagctattcaccattgagcgactgcatttgcctccagacttgtcagacacagtgagccgctcaagcaaaatggatctggcagaatccgccaagcggctgggcccaggctgtggcatgatggccggaggcaagaagcacctggacttctagggattcctccttagtcgctgcatgcagaattctatgacactctaattatgattgctaatagcttatgtaaatatttttcttaacaatttgaccctccactccttgaaaaacacaggattataaaatggtgccgccatttctcattttttaactttttacagaactagcacagcagaaatacttttaaatttttccttcatgctctagagaaaataattttatttttaaataaacgccaaaaaatgtcaaaatctcaagattcctgacagtggtcattcgtgtgtgtactaaggcatttagtgtcatggtaaagtgcatgtcacagcaggtagcatacaaaacatgatgaaattcaagattgtatgtgaaaacatactttctctttattacagaaacagtcacttgccaccaaaaatgctgttttttaaatgaaaatgtgtttactaatatataaaataaatttgcatttatgtatccagttattaaattgataaagacaaagtaatattttgggatttagattccactagagataattagtctaccatagtagttattaaatataaagaacttcagtgataggaaacatagaaaaaagaagtggatggtctttagtttagtaatcctaaacaattgaagtcagtactatgaaattatgtcaacaggcatcattcaggattgaaattcaaactgacagctacattaatgctaggataccaggagaaaaacatatactgaagcttgttgagagattttacagaacataggtctgagacaaagtgaaaaaatgaaactaactcagatttccattgcatcacataaatattttgttaataatgaacattggttgagtgtgtaaatttctaaccatgtaaacatgtctttggggggtatagcatatcgaaccagttttcatatgaaacattaggtgttttaattacaattctatattctcaaagcttttgacagataatggataaaaaatgaaagttgaaaagtaacttgcatatttaagagtcttgattttttaaaaggtgtttaacatccattgggagaaactgaatttccaaaatacattttcaaatgtatttaatattttgaagcagttataactagcatttttaagcagcttgcttttaatataccacaaattatactttatttgttcttgacaacattgtagaaaacaaagactaggtttttaaaactgtctaaccaatatgatgaatgtcagtcacttaaaaaaacccactgtagcataaacacatactgtatacagcttttattcagaattagaataattgaatcaatgacagtgatttgccaggatgtcaaatctctccatcatatcctgtcactaccagtttattttttgtgatcaaaatcaaaaagacaactattttgtcacccgctatttcattagtactaaaaatcaggtttcttattctatttttttagaatgtcgggtttatttttttcatttcttttaattctaaagacacagattcttccccattttcttttcaaaataaagtttcagaattgatctgtcagttaaaattaaagggctttatattaagcaaaggtgcttttaaattttaaagcaacttcaaaaaattgatttagtccatagataataaataatgttgtgcggatactccacaaaagctctgctatgtcctttgaaagcattatgaacattctgaataaattcaaatgagtattttagtcagtttattattttaataactctaacctttttcttaccgtgttgattcattttatacaacacacaatggaacaattacatagcatttgacttgctgaaaaaga

SEQ ID NO: 421412 - DNA, 2022 bp, Homo sapiens
  misc_feature (1196)..(1196): n is a, c, g, or t
  misc_feature (1213)..(1214): n is a, c, g, or t
  misc_feature (1233)..(1233): n is a, c, g, or t
  misc_feature (1236)..(1237): n is a, c, g, or t
  misc_feature (1250)..(1250): n is a, c, g, or t
  misc_feature (1259)..(1259): n is a, c, g, or t
  misc_feature (1290)..(1290): n is a, c, g, or t
  misc_feature (1407)..(1407): n is a, c, g, or t
agagttcctattgggttaacactggaggctctaagatggcggcagtggcaacctgcggtagtgttgccgcgagtactgggtctgcagtggcgacagccagcaagagcaacgtcaccagtttccagaggaggggtcctagagccagcgtgaccaacgacagcggccctcgactggtgtccattgcgggcacgcgaccgtcggtgcggaatggacagctgctggtatcaaccgggctcccagccctagaccagctcttaggtggaggtttagccgttggaacagttcttctaattgaggaggataaatataatatttactcacctttgctcttcaagtatttcctggcagaaggaattgtcaatgggcatactttgttggttgcatctgctaaagaggatcctgccaacattttacaggaacttccagcaccattacttgatgataaatgtaaaaaggaatttgatgaagatgtatacaatcataaaacaccagaatctaatattaagatgaaaatagcttggcgttaccagttattacccaagatggagattggaccagtatcatcttcaagatttggtcactattatgatgcatcaaaaagaatgccacaagaactaattgaggcttcaaattggcatggattttttcttccagagaaaatatcttcaactctcaaagtagaaccctgttctttgacccctggctacacaaagctgcttcagtttatccagaacatcatttatgaggaaggatttgatggatccaatcctcagaaaaaacagagaaacattttaagaataggaattcagaatcttggctcacctttatggggagacgatatttgctgtgcagaaaatggtggcaacagtcacagccttaccaagttcctctatgttctccgtggtcttctgagaacctctctttcagcctgcatcatcacaatgccaacacatctgatccagaataaagccattattgcccgtgtcacaaccttgtcagatgtagtagttggtctggaatcatttattggttctgagagagaaactaacccattgtataaggattatcatggattgattcatatacggcagattcctcggcttaataacttgatctgtgatgaatcagatgtcaaagacttagcttttaaattaaaaaggaagctattcaccattgaggctggagtgcagtggcangatctcggctcacggcnncctcgcctcctgggttcangcnnttctcccgcctcngcctccctngtagctgggattacaggcgcccaccaccacncccagctaatttttgtatttttagtagagatggggttccaccatgttggccaggctggtctcgaactcctgacctcaggtgattcatccgcctcagcctcccaaagtgctggaattncaggcatgagctaccgcgcccggcctagggctttgtatttcaaagagaacaagtctaaagtgggtgcaagacaactacttgagacaagagaggaacatttatcctccaggcttctcatacttactcaagcagaaagactctgcatggggagaaggttctttacagcattccacatttttaatgagcttccttgcaaaggcgactgcatttgcctccagacttgtcagacacagtgagccgctcaagcaaaatggatctggcagaatccgccaagcggctgggcccaggctgtggcatgatggccggaggcaagaagcacctggacttctagggattcctccttagtcgctgcatgcagaattctatgacactctaattatgattgctaatagcttatgtaaatatttttcttaacaatttgaccctccactccttgaaaaacacaggattataaaatggtgccgccatttctcattttttaactttttacagaactagcacagcagaaatacttttaaatttttccttcatgctctagagaaaataattttatttttaaaccgatgcggccgaaaatctcttgcgtattgataaggatccacgataagatcgggg

SEQ ID NO: 421413 - DNA, 1005 bp, Homo sapiens
agagttcctattgggttaacactggaggctctaagatggcggcagtggcaacctgcggtagtgttgccgcgagtactgggtctgcagtggcgacagccagcaagagcaacgtcaccagtttccagaggaggggtcctagagccagcgtgaccaacgacagcggccctcgactggtgtccattgcgggcacgcgaccgtcggtgcggaatggacagctgctggtatcaaccgggctcccagccctagaccagctcttaggtggaggtttagccgttggaacagttcttctaattgaggaggataaatataatatttactcacctttgctcttcaagtatttcctggcagaaggaattgtcaatgggcatactttgttggttgcatctgctaaagaggatcctgccaacattttacaggaacttccagcaccattacttgatgataaatgtaaaaaggaatttgatgaagatgtatacaatcataaaacaccagaatctaatattaagatgaaaatagcttggcgttaccagttattacccaagatggagattggaccagtatcatcttcaagatttggtcactattatgatgcatcaaaaagaatgccacaagaactaattgaggcttcaaattggcatggattttttcttccagagaaaatatcttcaactctcaaagtagaaccctgttctttgacccctggctacacaaagctgcttcagtttatccagaacatcatttatgaggaaggatttgatggatccaatcctcagaaaaaacagagaaacattttaagaataggaattcagaatcttggctcacctttatggggagacgatatttgctgtgcagaaaatggtggcaacagtcacagccttaccaagttcctctatgttctccgtggtcttctgagaacctctctttcagcctgcatcatcacaatgccaacacatctgatccagaataaagccattagtgaacgtgtgcatctctcatgacggtccc

SEQ ID NO: 421414 - DNA, 2198 bp, Homo sapiens
cgttgatccagtgggattacagcaaatcaccctggcctgtgcaggaaccgtggaagttgtcacacctttcccagatccgtttgcctacacagaaatcattgttttagacaaggcattaatggaaaaagtaggcagccagccagccagccagctatccatctcctgcatcacacagtctcttcctcccagaatctgagaaaagaaaatcaagtggaaaaatttcagctcaagaacgactgcatttgcctccagacttgtcagacacagtgagccgctcaagcaaaatggatctggcagaatccgccaagcggctgggcccaggctgtggcatgatggccggaggcaagaagcacctggacttctagggattcctccttagtcgctgcatgcagaattctatgacactctaattatgattgctaatagcttatgtaaatatttttcttaacaatttgaccctccactccttgaaaaacacaggattataaaatggtgccgccatttctcattttttaactttttacagaactagcacagcagaaatacttttaaatttttccttcatgctctagagaaaataattttatttttaaataaacgccaaaaaatgtcaaaatctcaagattcctgacagtggtcattcgtgtgtgtactaaggcatttagtgtcatggtaaagtgcatgtcacagcaggtagcatacaaaacatgatgaaattcaagattgtatgtgaaaacatactttctctttattacagaaacagtcacttgccaccaaaaatgctgttttttaaatgaaaatgtgtttactaatatataaaataaatttgcatttatgtatccagttattaaattgataaagacaaagtaatattttgggatttagattccactagagataattagtctaccatagtagttattaaatataaagaacttcagtgataggaaacatagaaaaaagaagtggatggtctttagtttagtaatcctaaacaattgaagtcagtactatgaaattatgtcaacaggcatcattcaggattgaaattcaaactgacagctacattaatgctaggataccaggagaaaaacatatactgaagcttgttgagagattttacagaacataggtctgagacaaagtgaaaaaatgaaactaactcagatttccattgcatcacataaatattttgttaataatgaacattggttgagtgtgtaaatttctaaccatgtaaacatgtctttggggggtatagcatatcgaaccagttttcatatgaaacattaggtgttttaattacaattctatattctcaaagcttttgacagataatggataaaaaatgaaagttgaaaagtaacttgcatatttaagagtcttgattttttaaaaggtgtttaacatccattgggagaaactgaatttccaaaatacattttcaaatgtatttaatattttgaagcagttataactagcatttttaagcagcttgcttttaatataccacaaattatactttatttgttcttgacaacattgtagaaaacaaagactaggtttttaaaactgtctaaccaatatgatgaatgtcagtcacttaaaaaaacccactgtagcataaacacatactgtatacagcttttattcagaattagaataattgaatcaatgacagtgatttgccaggatgtcaaatctctccatcatatcctgtcactaccagtttattttttgtgatcaaaatcaaaaagacaactattttgtcacccgctatttcattagtactaaaaatcaggtttcttattctatttttttagaatgtcgggtttatttttttcatttcttttaattctaaagacacagattcttccccattttcttttcaaaataaagtttcagaattgatctgtcagttaaaattaaagggctttatattaagcaaaggtgcttttaaattttaaagcaacttcaaaaaattgatttagtccatagataataaataatgttgtgcggatactccacaaaagctctgctatgtcctttgaaagcattatgaacattctgaataaattcaaatgagtattttagtcagtttattattttaataactctaacctttttcttaccgtgttgattcattttatacaacacacaatggaacaattacatagcatttgacttgctgaaaaaga

SEQ ID NO: 421415 - DNA, 2847 bp, Homo sapiens
agggtcttgctctgtcacccaggctggagtgcagtggcacagtcttggctcactgcagcccctgcctccaggactcaagagatcttcccacctcagcctcccaagtagctgagactgtaggaacttccagcaccattacttgatgataaatgtaaaaaggaatttgatgaagatgtatacaatcataaaacaccagaatctaatattaagatgaaaatagcttggcgttaccagttattacccaagatggagattggaccagtatcatcttcaagatttggtcactattatgatgcatcaaaaagaatgccacaagaactaattgaggcttcaaattggcatggattttttcttccagagaaaatatcttcaactctcaaagtagaaccctgttctttgacccctggctacacaaagctgcttcagtttatccagaacatcatttatgaggaaggatttgatggatccaatcctcagaaaaaacagagaaacattttaagaataggaattcagaatcttggctcacctttatggggagacgatatttgctgtgcagaaaatggtggcaacagtcacagccttaccaagttcctctatgttctccgtggtcttctgagaacctctctttcagcctgcatcatcacaatgccaacacatctgatccagaataaagccattattgcccgtgtcacaaccttgtcagatgtagtagttggtctggaatcatttattggttctgagagagaaactaacccattgtataaggattatcatggattgattcatatacggcagattcctcggcttaataacttgatctgtgatgaatcagatgtcaaagacttagcttttaaattaaaaaggaagctattcaccattgagcgactgcatttgcctccagacttgtcagacacagtgagccgctcaagcaaaatggatctggcagaatccgccaagcggctgggcccaggctgtggcatgatggccggaggcaagaagcacctggacttctagggattcctccttagtcgctgcatgcagaattctatgacactctaattatgattgctaatagcttatgtaaatatttttcttaacaatttgaccctccactccttgaaaaacacaggattataaaatggtgccgccatttctcattttttaactttttacagaactagcacagcagaaatacttttaaatttttccttcatgctctagagaaaataattttatttttaaataaacgccaaaaaatgtcaaaatctcaagattcctgacagtggtcattcgtgtgtgtactaaggcatttagtgtcatggtaaagtgcatgtcacagcaggtagcatacaaaacatgatgaaattcaagattgtatgtgaaaacatactttctctttattacagaaacagtcacttgccaccaaaaatgctgttttttaaatgaaaatgtgtttactaatatataaaataaatttgcatttatgtatccagttattaaattgataaagacaaagtaatattttgggatttagattccactagagataattagtctaccatagtagttattaaatataaagaacttcagtgataggaaacatagaaaaaagaagtggatggtctttagtttagtaatcctaaacaattgaagtcagtactatgaaattatgtcaacaggcatcattcaggattgaaattcaaactgacagctacattaatgctaggataccaggagaaaaacatatactgaagcttgttgagagattttacagaacataggtctgagacaaagtgaaaaaatgaaactaactcagatttccattgcatcacataaatattttgttaataatgaacattggttgagtgtgtaaatttctaaccatgtaaacatgtctttggggggtatagcatatcgaaccagttttcatatgaaacattaggtgttttaattacaattctatattctcaaagcttttgacagataatggataaaaaatgaaagttgaaaagtaacttgcatatttaagagtcttgattttttaaaaggtgtttaacatccattgggagaaactgaatttccaaaatacattttcaaatgtatttaatattttgaagcagttataactagcatttttaagcagcttgcttttaatataccacaaattatactttatttgttcttgacaacattgtagaaaacaaagactaggtttttaaaactgtctaaccaatatgatgaatgtcagtcacttaaaaaaacccactgtagcataaacacatactgtatacagcttttattcagaattagaataattgaatcaatgacagtgatttgccaggatgtcaaatctctccatcatatcctgtcactaccagtttattttttgtgatcaaaatcaaaaagacaactattttgtcacccgctatttcattagtactaaaaatcaggtttcttattctatttttttagaatgtcgggtttatttttttcatttcttttaattctaaagacacagattcttccccattttcttttcaaaataaagtttcagaattgatctgtcagttaaaattaaagggctttatattaagcaaaggtgcttttaaattttaaagcaacttcaaaaaattgatttagtccatagataataaataatgttgtgcggatactccacaaaagctctgctatgtcctttgaaagcattatgaacattctgaataaattcaaatgagtattttagtcagtttattattttaataactctaacctttttcttaccgtgttgattcattttatacaacacacaatggaacaattacatagcatttgacttgctgaaaaaga

SEQ ID NO: 421416 - DNA, 3185 bp, Homo sapiens
agagttcctattgggttaacactggaggctctaagatggcggcagtggcaacctgcggtagtgttgccgcgagtactgggtctgcagtggcgacagccagcaagagcaacgtcaccagtttccagaggaggggtcctagagccagcgtgaccaacgacagcggccctcgactggtgtccattgcgggcacgcgaccgtcggtgcggaatggacagctgctggtatcaaccgggctcccagccctagaccagctcttaggtggaggtttagccgttggaacagttcttctaattgaggaggataaatataatatttactcacctttgctcttcaagtatttcctggcagaaggaattgtcaatgggcatactttgttggttgcatctgctaaagaggatcctgccaacattttacaggaacttccagcaccattacttgatgataaatgtaaaaaggaatttgatgaagatgtatacaatcataaaacaccagaatctaatattaagatgaaaatagcttggcgttaccagttattacccaagatggagattggaccagtatcatcttcaagatttggtcactattatgatgcatcaaaaagaatgccacaagaactaattgaggcttcaaattggcatggattttttcttccagagaaaatatcttcaactctcaaagtagaaccctgttctttgacccctggctacacaaagctgcttcagtttatccagaacatcatttatgaggaaggatttgatggatccaatcctcagaaaaaacagagaaacattttaagaataggaattcagaatcttggctcacctttatggggagacgatatttgctgtgcagaaaatggtggcaacagtcacagccttaccaagttcctctatgttctccgtggtcttctgagaacctctctttcagcctgcatcatcacaatgccaacacatctgatccagaataaagccattattgcccgtgtcacaaccttgtcagatgtagtagttggtctggaatcatttattggttctgagagagaaactaacccattgtataaggattatcatggattgattcatatacggcagattcctcggcttaataacttgatctgtgatgaatcagatgtcaaagacttagcttttaaattaaaaaggaagctattcaccattgagattcttgagaatgaaagaaaggagaaggaaagaataatagagcgactgcatttgcctccagacttgtcagacacagtgagccgctcaagcaaaatggatctggcagaatccgccaagcggctgggcccaggctgtggcatgatggccggaggcaagaagcacctggacttctagggattcctccttagtcgctgcatgcagaattctatgacactctaattatgattgctaatagcttatgtaaatatttttcttaacaatttgaccctccactccttgaaaaacacaggattataaaatggtgccgccatttctcattttttaactttttacagaactagcacagcagaaatacttttaaatttttccttcatgctctagagaaaataattttatttttaaataaacgccaaaaaatgtcaaaatctcaagattcctgacagtggtcattcgtgtgtgtactaaggcatttagtgtcatggtaaagtgcatgtcacagcaggtagcatacaaaacatgatgaaattcaagattgtatgtgaaaacatactttctctttattacagaaacagtcacttgccaccaaaaatgctgttttttaaatgaaaatgtgtttactaatatataaaataaatttgcatttatgtatccagttattaaattgataaagacaaagtaatattttgggatttagattccactagagataattagtctaccatagtagttattaaatataaagaacttcagtgataggaaacatagaaaaaagaagtggatggtctttagtttagtaatcctaaacaattgaagtcagtactatgaaattatgtcaacaggcatcattcaggattgaaattcaaactgacagctacattaatgctaggataccaggagaaaaacatatactgaagcttgttgagagattttacagaacataggtctgagacaaagtgaaaaaatgaaactaactcagatttccattgcatcacataaatattttgttaataatgaacattggttgagtgtgtaaatttctaaccatgtaaacatgtctttggggggtatagcatatcgaaccagttttcatatgaaacattaggtgttttaattacaattctatattctcaaagcttttgacagataatggataaaaaatgaaagttgaaaagtaacttgcatatttaagagtcttgattttttaaaaggtgtttaacatccattgggagaaactgaatttccaaaatacattttcaaatgtatttaatattttgaagcagttataactagcatttttaagcagcttgcttttaatataccacaaattatactttatttgttcttgacaacattgtagaaaacaaagactaggtttttaaaactgtctaaccaatatgatgaatgtcagtcacttaaaaaaacccactgtagcataaacacatactgtatacagcttttattcagaattagaataattgaatcaatgacagtgatttgccaggatgtcaaatctctccatcatatcctgtcactaccagtttattttttgtgatcaaaatcaaaaagacaactattttgtcacccgctatttcattagtactaaaaatcaggtttcttattctatttttttagaatgtcgggtttatttttttcatttcttttaattctaaagacacagattcttccccattttcttttcaaaataaagtttcagaattgatctgtcagttaaaattaaagggctttatattaagcaaaggtgcttttaaattttaaagcaacttcaaaaaattgatttagtccatagataataaataatgttgtgcggatactccacaaaagctctgctatgtcctttgaaagcattatgaacattctgaataaattcaaatgagtattttagtcagtttattattttaataactctaacctttttcttaccgtgttgattcattttatacaacacacaatggaacaattacatagcatttgacttgctgaaaaaga

SEQ ID NO: 421417 - DNA, 1444 bp, Homo sapiens
agagttcctattgggttaacactggaggctctaagatggcggcagtggcaacctgcggtagtgttgccgcgagtactgggtctgcagtggcgacagccagcaagagcaacgtcaccagtttccagaggaggggtcctagagccagcgtgaccaacgacagcggccctcgactggtgtccattgcgggcacgcgaccgtcggtgcggaatggacagctgctggtatcaaccgggctcccagccctagaccagctcttaggtggaggtttagccgttggaacagttcttctaattgaggaggataaatataatatttactcacctttgctcttcaagtatttcctggcagaaggaattgtcaatgggcatactttgttggttgcatctgctaaagaggatcctgccaacattttacaggaacttccagcaccattacttgatgataaatgtaaaaaggaatttgatgaagatgtatacaatcataaaacaccagaatctaatattaagatgaaaatagcttggcgttaccagttattacccaagatggagattggaccagtatcatcttcaagatttggtcactattatgatgcatcaaaaagaatgccacaagaactaattgaggcttcaaattggcatggattttttcttccagagaaaatatcttcaactctcaaagtagaaccctgttctttgacccctggctacacaaagctgcttcagtttatccagaacatcatttatgaggaaggatttgatggatccaatcctcagaaaaaacagagaaacattttaagaataggaattcagaatcttggctcacctttatggggagacgatatttgctgtgcagaaaatggtggcaacagtcacagccttaccaagttcctctatgttctccgtggtcttctgagaacctctctttcagcctgcatcatcacaatgccaacacatctgatccagaataaagccattattgcccgtgtcacaaccttgtcagatgtagtagttggtctggaatcatttattggttctgagagagaaactaacccattgtataaggattatcatggattgattcatatacggcagattcctcggcttaataacttgatctgtgatgaatcagatgtcaaagacttagcttttaaattaaaaaggaagctattcaccattgaggcagaggtccaaaaaggggtcagcacagctacgttcctcctggatggtccaaggaagaagctatttccttgccttttccagcttctagaggttgcctgcattccttggctcatggcttcttcctccgttttcaaagcgagcaacattgggtttgagtccttatgttaccaactctctggttttttttctgcctctctccttcacttttaaggatccttgtaattacattggacccacttaaataaaccaagatcttcctattttaa

SEQ ID NO: 421418 - DNA, 420 bp, Homo sapiens
gaccaaagccttcaacacagaaacgtaaaatggatggcgcacctgatggtcgaggaagaaaaaagaagctgaaactatgaatatgtttttgtttcataatcactaactttaaaccagtagttctttaatttacgggtcttcataagatgtactgtacaatgctcaattgttatgtcatttaaagacatcaggttcatctgtttactgagctagaaacatagtatgtagtttcacttttttaaatgcaacagctgtgctgaaattttttttatcattaacacttgaagtaataaaataggcttcatttattactaagtgtttcatttgatttatttttctattgtagttcccatttgtgaagattgtgactttttgtttattagctataatttctacacttggtaaggccttaaaaaacaa

SEQ ID NO: 421419 - DNA, 974 bp, Homo sapiens
aaggaggaaacaacagcagctccaaccagggcagccttcctgagaagatgcaaccaatcctgcttctgctggccttcctcctgctgcccagggcagatgcaggggagatcatcgggggacatgaggccaagccccactcccgcccctacatggcttatcttatgatctgggatcagaagtctctgaagaggtgcggtggcttcctgatacaagacgacttcgtgctgacagctgctcactgttggggaagctccataaatgtcaccttgggggcccacaatatcaaagaacaggagccgacccagcagtttatccctgtgaaaagacccatcccccatccagcctataatcctaagaacttctccaacgacatcatgctactgcagctggagagaaaggccaagcggaccagagctgtgcagcccctcaggctacctagcaacaaggcccaggtgaagccagggcagacatgcagtgtggccggctgggggcagacggcccccctgggaaaacactcacacacactacaagaggtgaagatgacagtgcaggaagatcgaaagtgcgaatctgacttacgccattattacgacagtaccattgagttgtgcgtgggggacccagagattaaaaagacttcctttaagggggactctggaggccctcttgtgtgtaacaaggtggcccagggcattgtctcctatggacgaaacaatggcatgcctccacgagcctgcaccaaagtctcaagctttgtacactggataaagaaaaccatgaaacgctactaactacaggaagcaaactaagcccccgctgtaatgaaacaccttctctggagccaagtccagatttacactgggagaggtgccagcaactgaataaatacctctcccagtgtaaatctggagccaagtccagatttacactgggagaggtgccagcaactgaataaatacctcttagctgagtgg

SEQ ID NO: 421420 - DNA, 830 bp, Homo sapiens
aaggaggaaacaacagcagctccaaccagggcagccttcctgagaagatgcaaccaatcctgcttctgctggccttcctcctgctgcccagggcagatgcaggggagatcatcgggggacatgaggccaagccccactcccgcccctacatggcttatcttatgatctgggatcagaagtctctgaagaggtgcggtggcttcctgatacaagacgacttcgtgctgacagctgctcactgttggggaagctggagagaaaggccaagcggaccagagctgtgcagcccctcaggctacctagcaacaaggcccaggtgaagccagggcagacatgcagtgtggccggctgggggcagacggcccccctgggaaaacactcacacacactacaagaggtgaagatgacagtgcaggaagatcgaaagtgcgaatctgacttacgccattattacgacagtaccattgagttgtgcgtgggggacccagagattaaaaagacttcctttaaggtaagactatgcacctgcctggattggctcttgggagaaagatgtttggggaatatctgagacctggagactcaagtagtgggggactccttcacccactagactgtgatatttctctctggaaagagaagaggggactagactgagctggggagaaattagggcctctgcaaacttaccaggaggcttatggtggatggtgcttctttggaaggatgaatttgcaacactccacccactccaggtcacagatattaggaaactgtgcccactgggggtgcagtaattataaccaggtgtgtcttcagaggctggtacc

SEQ ID NO: 421421 - DNA, 799 bp, Homo sapiens
tgagaagatgcaaccaatcctgcttctgctggccttcctcctgctgcccagggcagatgcaggtgagtgaccgtctccaccctcgggggcccaaccccatcccacaggtctcctgccctttctccacattcctgatccatctatctaccaggaatgttctgaactccagctcccattctaccaagaccccccaagtgtgatgctggataagctatcagcaggaatggcagagcagcaggccattctcaagaagagccagtgggtactatcccttccccagagcccacctttgtcacctggagagtaggactttcctagaagtaaatggcagaggatgggaaactagaaaagagaaatattaaattattctagagtaggcctggcttctgtttctgggataagacaggtgcttctctcactgtctacttaggagagaaacccagagctcagctgacagcagaattggtacaatcactgtcctcagaacactgttaatgtgtttgctcagtcccattctccaactctgcttttcttccctggcctttggtggctcccctctttccaaggatgaggcactacggcaggccccagcttccctgctttctagaattccaccagcactgctctaccagccctcatccagaggctaactggagccagtccatcatgcagccatgaacatttactgggcacccactacatgtcaggctctaggaaacaggatatgacagtatctagatccctccacttacaccctggccattagaaagcagcactatcctagacaccacaggactca

SEQ ID NO: 421422 - DNA, 2365 bp, Homo sapiens
atcaaaaccaattcagagcctggcacaaaatgtatacttcctagtgaaagctgtctcaaaacacagcctttttgatggatcatattagctcatatctgccatagaaaggcaatcaagcttactccctgcaatcggagtcaatatcaattcttgctcaagcaaacatgttttacagtgttggcgcaatggcaggaactagtcaagggcactttcagatctggaaagaggaaagagaaaatcactcttttgtgtttcttaaactgtcaatcaagcaagaaaatttattccaccccttcatatttgctctaaaatctggggccagtagttgaaatgtgatcttgttctttctcagccttttggcaatttaatgccaaatattccaaatgttagatgaatggcagtaataaaatgattcaaatgtttgataaatacaagctgagagcaaaatctggactctgaaaaatcggaactattttatcatgttgctaaaatgagagcatcattttcttccctctctgtaagtgcggtagtttaatttcctagaaaaagttgctagtgccttgtttaagatgatcatgttatcatttcatgtggatattattggtctaattagaaggagaagattgattggatttactttaaagaaaattattctcctatgtctctttgaactcaggaatagaaaatgaccaagaagcacatcatcttcagatatgatttttgccctcactggggatgtagaaccagaataggtacaacatatgctcagaagagaggtgacttcagtattagccttctagaaactaacatcactttaatttttacatgttccaaaaaaaatcatagtgattgttctgtaataagaatgttaacgtgatgcctatagaagttagaggtttttgtttctgtttctcttcaggcaagtccatagatagaggaaaatcagacacaggctggtgacaactggtatagatacagtgagcatggaatgagaaccacctacaacattgcctgattatttttaagtttatatcaaaactgcttcacaagttcacaaaagttgtcactcttaatttgggttaagaaaagtaatagtattatctctgctgaagttgattgtttttctcttttaccatgactgttggccaaaagcaagctgaacctctgcactttggaaacaaagcacagtatggaatctttaacccaagcacttagtttcaccactgaggattctacatcatctgcaaggaaaatgcacaaacttttgggtcccaatgttggattcttcaaaagtgcatagcaaaacttttgtgctatgccgcttgatgtaacttttaaagatgttatcaaatgttaaatgcctcattctgcgttaatttgctgttggctgttttgtgaacacaaaataaacttgagatttttttttttttttttttttgtgaaactcctccaaagccaatttcagcccttggtaagcttgcagacagttactgatcttaaatttaattttaaaagacaatgtatcttaattataatttagctttttaaaacaatgagatagctttacatttcccctttgtttgaatgagaaaatggatcttgggttgctatgctagaacacttgtagattgctgggtcctttgtaagggggccatggacacaccacactttctttcaatccttacatttgaagcattgatattcttcaaaaccttcttgttacatgtgcgcaatagaaatttctaatgttcatgacttttatctttcctgtccatcaattcactggttgtaaatgcttcctgagagctgtctaggtctgtatcccagattgttgcttaatgacatctgacagatgcattgttttctgaaatcagcttaagacaccaattgtggcaactggaaactcattacctgctgcattggatcaactatggaagttggagcaggggtgggcggaggtcacctaaccaatcaatggaaggcaactcacacctgctccaagcctcagctttgagaaacaaacacgtttataagaaaaaatatatagctattattacagaagtgaatatgttgtgctctcttactgctcttggtgcattgacagtttctgtatctcaaccctattcatctttatgaaaaagcattctgaagatctatcctcagcactgctgagtgtgcagtcacactttcctaccaacccccttcttaccatctctagctgccatttgtggggggaacaaaacaagggaatcctgattgtgtacagtataaattgtattatattttttgtacttatgttttatgtaaatagtttgtctcattcaattgtatgtgagcattgaaataaatcctaccatttagggga

SEQ ID NO: 421423 - DNA, 3141 bp, Homo sapiens
atcaaaaccaattcagagcctggcacaaaatgtatacttcctagtgaaagctgtctcaaaacacagcctttttgatggatcatattagctcatatctgccatagaaaggcaatcaagcttactccctgcaatcggagtcaatatcaattcttgctcaagcaaacatgttttacagtgttggcgcaatggcaggaactagtcaagggcactttcagatctggaaagaggaaagagaaaatcactcttttgtgtttcttaaactgtcaatcaagcaagaaaatttattccaccccttcatatttgctctaaaatctggggccagtagttgaaatgtgatcttgttctttctcagccttttggcaatttaatgccaaatattccaaatgttagatgaatggcagtaataaaatgattcaaatgtttgataaatacaagctgagagcaaaatctggactctgaaaaatcggaactattttatcatgttgctaaaatgagagcatcattttcttccctctctgtaagtgcggtagtttaatttcctagaaaaagttgctagtgccttgtttaagatgatcatgttatcatttcatgtggatattattggtctaattagaaggagaagattgattggatttactttaaagaaaattattctcctatgtctctttgaactcaggaatagaaaatgaccaagaagcacatcatcttcagatatgatttttgccctcactggggatgtagaaccagaataggtacaacatatgctcagaagagaggtgacttcagtattagccttctagaaactaacatcactttaatttttacatgttccaaaaaaaatcatagtgattgttctgtaataagaatgttaacgtgatgcctatagaagttagaggtttttgtttctgtttctcttcaggcaagtccatagatagaggaaaatcagacacaggctggtgacaactggtatagatacagtgagcatggaatgagaaccacctacaacattgcctgattatttttaagtttatatcaaaactgcttcacaagttcacaaaagttgtcactcttaatttgggttaagaaaagtaatagtattatctctgctgaagttgattgtttttctcttttaccatgactgttggccaaaagcaagctgaacctctgcactttggaaacaaagcacagtatggaatctttaacccaagcacttagtttcaccactgaggattctacatcatctgcaaggaaaatgcacaaacttttgggtcccaatgttggattcttcaaaagtgcatagcaaaacttttgtgctatgccgcttgatgtaacttttaaagatgttatcaaatgttaaatgcctcattctgcgttaatttgctgttggctgttttgtgaacacaaaataaacttgagatttttttttttttttttttttgtgaaactcctccaaagccaatttcagcccttggtaagcttgcagacagttactgatcttaaatttaattttaaaagacaatgtatcttaattataatttagctttttaaaacaatgagatagctttacatttcccctttgtttgaatgagaaaatggatcttgggttgctatgctagaacacttgtagattgctgggtcctttgtaagggggccatggacacaccacactttctttcaatccttacatttgaagcattgatattcttcaaaaccttcttgttacatgtgcgcaatagaaatttctaatgttcatgacttttatctttcctgtccatcaattcactggttgtaaatgcttcctgagagctgtctaggtctgtatcccagattgttgcttaatgacatctgacagatgcattgttttctgaaatcagcttaagacaccaattgtggcaactggaaactcattacctgctgcattggatcaactatggaagttggagcaggggtgggcggaggtcacctaaccaatcaatggaaggcaactcacacctgctccaagcctcagctttgagaaacaaacacgtttataagaaaaaatatatagctattattacagaagtgaatatgttgtgctctcttactgctcttggtgcattgacagtttctgtatctcaaccctattcatctttatgaaaaagcattctgaagatctatcctcagcactgctgagtgtgcagtcacactttcctaccaacccccttcttaccatctctagctgccatttgtggggggaacaaaacaagggaatcctgattgtgtacagtataaattgtattatattttttgtacttatgttttatgtaaatagtttgtctcattcaattgtatgtgagcattgaaataaatcctaccatttaggggacaatttagtggcatttttctttgtattgcctctgagtgtgcggtctccccagaggtgctaagcaatggccactgctcaaaggaatgaatttcatcagagtgaagtgcagaccacttcctgctgaggaaaactcataacactcctgtttatcttcaggccttttgaatggtggccaggacatgacataaggatgtattaaagcacttttagaaatatttccatgggcaacaggaaatatgtgataaggaaggccaattaggctttctgtttacaaagagttggtatcaggttgagctgatgaatgatgcattgagttgtattatacttaccctctctccaacacaccctattccattcttctttgcataaaacaaggtttttcttgaatgaactgctgtcagtcagcatgaacacaaagataagaagcttgacccaggaagaccaccctatttagtgaaagccatatttcaatgttcatgatcccattaaaggaaaaaatatacatgcatatgtatgtatttatatatgtcatatatacacatatatgtatacataaaagtatatgtgtataattattttatatatatttttcagttgaccaaaaagctgaaaaagcccacttaatatggggccaaaaattaacataatacaactatataaatatatgaactagtgaagcatgttataaagattaaactgttttaacccccaaattacttattttttcattaagcaatgaaaaattaaaattttaaagcattacatgaataacctat

SEQ ID NO: 421424 - DNA, 4171 bp, Homo sapiens
  misc_feature (1772)..(1772): n is a, c, g, or t
  misc_feature (1788)..(1788): n is a, c, g, or t
  misc_feature (1793)..(1793): n is a, c, g, or t
  misc_feature (4158)..(4158): n is a, c, g, or t
  misc_feature (4161)..(4161): n is a, c, g, or t
  misc_feature (4163)..(4166): n is a, c, g, or t
  misc_feature (4169)..(4170): n is a, c, g, or t
agcgggctcttccaagatggcggcgcgtccgtcgcgagcgaccgggccgaggggaggccagcgaagccgagtaaaaccgccgcccgggagaagactgaaggagcagttgccgccgttggcggcggcccgagcagttttcgctgctgctacggctgttgccatgaggcgaggctagggaggacctcacttccccggggtgtaataatgttaactgaggccagtctatccatatggggatggggaagccttggcattgtcctttttctgataacctttggaccctttgtaatattttatttgacattttatatcctctgctttgtgggtgggggtttagtggttactctcctgtttggaaaaacaaactcagagaagtacctagaacagtgtgaacactcatttcttcctccaacatcacctggggttcctaagtgcttagaagaaatgaaacgggaagccaggactattaagattgatagaagattgacgggtgccaatataattgatgaacctctccagcaagttatccagttttccttgagggattatgtccagtattggtattatacactaagcgatgatgaatcttttcttcttgaaattaggcagactcttcaaaacgcactcattcagtttgctactagagtctcgccctgtcgcccaggctggagtacaatggcgcaatctcggctcactgcaacctccgcttcctggaaccctgttttgtttaacaaaaccttggtctcactgtgtctcctagaatatgtaatttaaattctggctctgaaattacagggaattgtggtagtgatttgagaaccctttcagttctaaaatagtaagattctctggtcaggttgttactaatcttgatttcttttcaatcatgtttcctcccaaaacacacactaacatactccatcacactccacattttgaataccatttggggagttatttttttttaagtatataggattgctaattagagttaatttactttgggattaaagtactcttcatatctattgttttattagtaggggtcttatagtaggataacaaaatttatttaaaccttttaatatatttctaaatgatcagaaagaatgcttgattctaaacataaaatacatttactaatctcttctcgatgattaaaacccttgtatcaatgaaataaaaagtttttgtacaaccagactattgctgttctttatagaatgctgaaaacaataaatctgtagtgttatgagtttgattttttttaagttttctgaagtgtaagttctcccaccacgttcagttttaagctatcagcatgaagtcactgaacatggaaataggaagagatgtacacaattgtttgcctactccagctcacagttggagaggatacagctaagtgaagagggggcagaggcagatttgtaaacctgaagtaatgagttgtatttccttgtgtggttgctaatttagctcctatgaaagaattccccgtatatttttgaggactatggtagggggtactcatacattaactttaagttcaggaatgtttgtgaagaaggtcaaattagtttcattattttaatcaatactgacaactaaatccttaaagtggatgataaaaggagactctggagagatggttatggtaacatgtagtatttatgactgaattgacgtaggggggattgatttagtggattcaaaatgaagcttacaattctgtgcctttacaattttacccaaattcaatttcagcctgngtttttgacaccgttnacaangtagttcttcaaggactctgaaggatggaaacaagtaaaggattatgtatttagagtgaagagtagtatatcctttctaatagtgaattaagagggggacttagtatctgattcagagactcaggagaaggaatttttttctttcacagataagccactcagttgctttctctcaacaaaaaaaagtctgagtcagttgatcaaaaggccttctaatggagtaaaacttttctcaaaatctactcaaagttacttgtcaaaaatctacccaagaaaactaggaattctattttaatgatttttcaaaaatttctatttttttacatagaagataaagaccttttgttgaagattaatacatattattataattttatgtgattggttattatattgatcttattaacatacctttaaaaaggccaactcttaacgtgcgtgtgtgtgtgtgtgtttgtgtatgtgtatatgtatataccttttcccttgagattcctttcagttctaaaatactaagattctatggacctctgtgtgtgtgtgtgtgtgtgtgtgttgtacatatagtgtctatgtatacctacacattatgcagtatatagtatactctaccattcttactgtttttaaaaaaggtcttcgtagtcatttctctgaaaaactaatgtggcatcaggagcataacatttattataggattgttttctgtggaaaaagcagcttttacttttatcattttgacataaggcaccttttccaggaaaatattctgccatgaatgtgaagatcgcctttactgccaagcgatcaccctctcctctagtcaggcaagtctacaagatgacccttgcatatatatttatcatgctcatccccctcttctgctcattcctgtgtcctttcttctcccatataaatactgctctttcatcaagatttaagtgtagcctctttaatgaagcctctttaaattatgacatattccttaatctatagtctttgtgtgtgtggttctcgtcaacaaaattttaagctgattttgaaatggttcctattctgtgctattgcagtgaaagttctcttaactgatgtttggttagccagtgctctccattccctttgtatgctgtactgactgataaccttagcattaagactaggctctattacatctatccacttctgtttccacccttggagttgtatgcttatcaaaagtcagttgtgtgatacctggaccccacctccagaaaatctgatacaattagtctgtagtgtgacctgaatattggtgatttagaggagacagataatcaaacacgttgaaataaaagttgtatttgtttttgagcctaaatatcccagttacactttttatgataatcaggtcgtttaattaacagtcaacttagattgaagaaatatgaatatgacaaggtagtttctatgaaaaccaagtcacttgctttggaattactcgcagctggttgaagagtgtaattgaattaagtgagcgaaaggcagctatgaaatttgaaagtcttcaaggactctgcatgcagatttgttcacaaatgtctttattgccatgccattttaaagaaactggaaaccataggttttgcagtgtaggaacagttcatagttttttcaagacccaggtcatgttaataccactcagcagagccttaaccaaagaaaaagtcttattcctacacaggaagatttatataattgaacttaaagtgaaatatattcatggctccctcttttgatcgaatgtttaaatttacctactgcccaattaccagttttttatacactccatccctgtgtatgtatatgtgtggttttatgtagctaatataatcatagactcaaagatgtaatgagtgttgttagagaaaacaaactttgggaaatgatgtgacttgctgaatttcatagactggcactgatgcctttgatttgagtaaaagacccatcatttgggggagtcttttgttagaatcaaaggcatctgtgtcagtccagtgcgttttccagaaatacttgattttggtagtgttttgtgctactgatgatgagctgtacactgcttagaatagatggaacaagtgaggcaatttacaatcctaaactcaaccacatatttgggcctttacttgcctttttaagggattggcattaagtagccatgggacaaaaagagcttctcagtacatattctactttaacactttaaggagtaaggaagcaattgttgtttgtgcctcctgttgccattgtccaaacacccattgtaaacagtgctccgaccctgaaaaaggaatcaataaatcaatatgcattgagtgcctctaanaangnnnnaanna

SEQ ID NO: 421425 - DNA, 1207 bp, Homo sapiens
agcgggctcttccaagatggcggcgcgtccgtcgcgagcgaccgggccgaggggaggccagcgaagccgagtaaaaccgccgcccgggagaagactgaaggagcagttgccgccgttggcggcggcccgagcagttttcgctgctgctacggctgttgccatgaggcgaggctagggaggacctcacttccccggggtgtaataatgttaactgagttatattgggagctagtttcaagatgaaatactaattctaagccagtctatccatatggggatggggaagccttggcattgtcctttttctgataacctttggaccctttgtaatattttatttgacattttatatcctctgctttgtgggtgggggtttagtggttactctcctgtttggaaaaacaaactcagagaagtacctagaacagtgtgaacactcatttcttcctccaacatcacctggggttcctaagtgcttagaagaaatgaaacgggaagccaggactattaagattgatagaagattgacgggtgccaatataattgatgaacctctccagcaagttatccagttttccttgagggattatgtccagtattggtattatacactaagcgatgatgaatcttttcttcttgaaattaggcagactcttcaaaacgcactcattcagtttgctactaggtcaaaagaaatagactggcaaccttattttactacacgcattgtagatgactttggcacacacttacgagtattcagaaaggctcaacagaaaataacagagaaagatgatcaagtgaaaggtacagcagaagatcttgtagataccttctttgaagttgaagttgaaatggagaaggaggtttgccgtgatctagtgtgcacttcccccaaagatgaagaaggattcctaagggatttgtgtgaggtcttactatatttattgctacctcctggagatttccagaacaagatcatgcgatactttgtcagggaaatccttgcacgaggaattcttcttccattaataaatcaactcagtgatcctgattatattaatcagtatgtcatatggatggtaggtgccttttaaaattacaactctgttttagaaataatttttgaaatgtaaaaatatagttgggagatagggtgtttaagcagtaatttattaaagaaattaagtaaaaatgtttctgaagt

SEQ ID NO: 421426 - DNA, 1476 bp, Homo sapiens
caatatatttactgaaaaaaatccacatataagtggacctgagcagttcagactctttgttcaagggtcaatttatattacagtaacttagaatgtaacacatagatatactgatgtgcaatacttttatgtaagttgagctctcttaaatcagcagaatagaagagcatactctttttttcctttgttatagcctgctgagatgatggaggtgttttcttgaaagaagaattacagctatgtttttatatgtgtgaataacttttaagtatggaaagctaattaacgtgtggtagaattacagagtacctggtccatctaaaactattttgggaaaaaagacttgtaacgaaatttttttatgattcaaaaaactggttaaaacagcaaaattaaaaaaaattaagttgattaatgaatagttactacttggagaataatgaaggaatttttaatgaatactgatgtgtactaattactaaaataagccattgtaaccagggaactggttatttctgcctttttaaatgtatcttatatatcaagaggaagtgtagactttatattttctaatgttatgatagctactttttctacttttaggattcctaagggatttgtgtgaggtcttactatatttattgctacctcctggagatttccagaacaagatcatgcgatactttgtcagggtaagcttaaactcataccatatcatacctgcaaaaaaatgtagagcagtagttttcaaaatttttggtcttaagaccctgttacactcttaaaaattattgaagactccaaagagcttttgtttatgtgagttttctttaaaatatttacacaagtgaagactaagaaatttttaaaacatgaaaatatgcaagcatgtatttcattacctaatagctcgataccatcatagcattatgtaactttgtaaaggtcactgtgtgtacatgaaagaacaagagtgaaaagttaaataatgtcttagcattattatgaaaatggtgttgaaagggtcacctgaaacccaagcttcgggggaacttcaggttcatggaaacctcccactaatcccccagaagtctctggctgatagttaggtgctttggtttttggttatgacaaaagtttgttttaaattttcttataccctagtgttatctaaatcaggttagataaaaataacatttttggacagaaactttaaaaactgtacagttaagattatgttttttagcaattggaaaattaatgtcagatgagaatagtagtcttggacttgttattccctgagtataaaccttcagagtaaagttctgtgtgtaaatttaaaggaataacatttgtctttggctgctggtaatgatttagaaaggctagctacacaagaacatgtcctggttgaatgcgtaacgtgaaaagttttgaattttcctaaaaacaaaagcttatgatctctttagtctg

SEQ ID NO: 421427 - DNA, 470 bp, Homo sapiens
ctgagagataacttgctaggcaaaagttgagatttaaatccgtgtttgtttgccagcctgctatgaggaagagtacatgaggaagagaagggtttagtcctgtttcatccttcttaaacatcaaggcatctccaagagttactgttgatgactatttagtagcaaaattagcagatactttgaatcatgaagatccaacccctgaaatctttgatgacattcaaagaaaggtatatgaattgatgctacgagatgaaagattttatccttccttcagacagaatgcactttatgtgcgcatgttagctgagcttgacatgttaaaagatcctagtttcagaggatccgatgatggggatggagtcatccaattcttgattaaatgtcgaccaagattgattttatactgtatttctggatcttcttattgttgatcaagaaaataaactatgccctattttgctcccaaa

SEQ ID NO: 421428 - DNA, 8928 bp, Homo sapiens
  misc_feature (4327)..(4327): n is a, c, g, or t
  misc_feature (4624)..(4624): n is a, c, g, or t
agcgggctcttccaagatggcggcgcgtccgtcgcgagcgaccgggccgaggggaggccagcgaagccgagtaaaaccgccgcccgggagaagactgaaggagcagttgccgccgttggcggcggcccgagcagttttcgctgctgctacggctgttgccatgaggcgaggctagggaggacctcacttccccggggtgtaataatgttaactgaggccagtctatccatatggggatggggaagccttggcattgtcctttttctgataacctttggaccctttgtaatattttatttgacattttatatcctctgctttgtgggtgggggtttagtggttactctcctgtttggaaaaacaaactcagagaagtacctagaacagtgtgaacactcatttcttcctccaacatcacctggggttcctaagtgcttagaagaaatgaaacgggaagccaggactattaagattgatagaagattgacgggtgccaatataattgatgaacctctccagcaagttatccagttttccttgagggattatgtccagtattggtattatacactaagcgatgatgaatcttttcttcttgaaattaggcagactcttcaaaacgcactcattcagtttgctactaggtcaaaagaaatagactggcaaccttattttactacacgcattgtagatgactttggcacacacttacgagtattcagaaaggctcaacagaaaataacagagaaagatgatcaagtgaaaggtacagcagaagatcttgtagataccttctttgaagttgaagttgaaatggagaaggaggtttgccgtgatctagtgtgcacttcccccaaagatgaagaaggattcctaagggatttgtgtgaggtcttactatatttattgctacctcctggagatttccagaacaagatcatgcgatactttgtcagggaaatccttgcacgaggaattcttcttccattaataaatcaactcagtgatcctgattatattaatcagtatgtcatatggatgatccgtgattctaactgcaactatgaggcctttatgaacattattaaattgagtgacaatattggagagctagaagcagtcagagataaggcagcagaagaattacagtatcttagatctctagatacagctggtgatgatatcaacactatcaaaaatcaaataaatagcttactattcgtaaagaaggtatgtgactcaagaatacagcgattgcagtcaggcaaagaaataaatactgtgaaacttgcagcaaactttgggaaactttgcacagtccccctggacagcattcttgtagacaatgttgcactacaattttttatggattacatgcagcaaactggaggtcaagcacatctattcttttggatgacagtggaaggataccgggttaccgcccaacagcagctagaagttttattaagtcgtcagagagatggaaaacatcaaaccaaccaaaccaaaggtcttttaagagcagctgctgttggaatttatgaacagtatttatcagaaaaggcatctccaagagttactgttgatgactatttagtagcaaaattagcagatactttgaatcatgaagatccaacccctgaaatctttgatgacattcaaagaaaggtatatgaattgatgctacgagatgaaagattttatccttccttcagacagaatgcactttatgtgcgcatgttagctgagcttgacatgttaaaagatcctagtttcagaggatccgatgatggggatggagaatcttttaatgggtctcctacaggaagcataaatttgtctttagatgacctttcaaatgtttcttctgatgactcagtacaacttcatgcctacatttcagacacagtatatgctgactatgacccatatgctgtggcaggcgtttgtaatgatcatggcaagacatatgcattatatgccatcactgtacaccggcgcaacctaaacagtgaggagatgtggaaaacctatcgtcgttatagtgacttccatgacttccacatgagaatcactgaacagtttgaaagtctctcaagcatattgaaacttcctggaaaaaagacttttaataatatggatagagattttttagaaaagagaaaaaaggatctaaatgcatatttgcagttactgttagctcctgaaatgatgaaggcatcccccgctttagctcactatgtgtatgatttccttgagaacaaagcctacagtaaaggaaaaggggattttgctcgcaagatggacacttttgtaaatccacttcgcaattcaatgaggaatgtttcaaatgcagttaaatcccttcctgatagcttggcagagggaatgactaaaatgtcagacaacatgggcaaaatgtcagaaagattaggtcaagacataaagcaatcattttttaaggtgcctcctttaattcctaagactgattcagaccctgaacatcgccgagtttcggctcaacttgacgataatgtggatgacaatattccacttagggtaatgctgcttctcatggatgaagtattcgacttaaaagaaagaaatcagtggttgcgaaggaatatcaaaaacctacttcaacagcttattagagctacatatggcgatactattaatagaaaaatagttgaccatgttgactggatgacttcacctgaacaagtagccgactcagtgaaacgtttcagagatgcattttggccaaatggcattttagcagaggctgttccatgcagagataaaagtattcgaatgagaacaagagtagcaggaaaaacgaaattacttgcaattatgccaggtgagtgagcatgtatagttaaaaatctttataatttgtcattcttctgagtttttagcattcatcatgccagtgtaactgccttttgattataacaactaccttttgatggcttaatacatatcaggcactgtactaggcatttctcatatgttcttaatcagtcctcatgacagtactgtaaagctaaggactgttaacatcaccgctttatatgtgaggaaacggaagctcagagaggttaaataacctatccaaggtttatagctactaagcaacagttggtattctgacttggctttaagtgatgtgaaagcttatgcttttagccacttcgctctgctgccttgaaacatattgggagttaagttaaataaataaaatacatgacaggtgaaagggctaataaaatataaagtatgaatttttcaggaagaatatttgttgtacttaggaaaacaagttatttcaaaaactccatttacatagaaagaactgattggctgattattaatctttattacttaaaatacaatcccaaacaaagtatacttagtagcattttgttggtctgattttggttgcttcattagggtatagctatctcactaccttagatttactttttctcgtttttcttctttcaatcagagaagttatataatgtaaaaagcaatttaatgcggctgggaggtggtgatggttgttttgccccttgttaatgagtatctttgaaaatgcctgcatgtcttttctctgtattttaattctggatgtagagaatgaacagacatatttgtacattctttaatatcacacaataccaatttttttctctaattttgttttcttacctgtattttctctataaattttaatgaccagccttctcttctgtcaattaaattaaaaatttgccacaattttaattcttacctatataccgtttcatttgctgataaaaaagcaaattatagaaatgacattttagaaaaataagaaacaattgcttaggatattatttaatatactattatagtaaacctgattgtgctatatggactgactcagttatctagctggaagaaatctttattcactaaatatttattgaaagttattatgtgccaggtgctgttctttgcacttatgtttgccttcttggagcttactttccagtagaaatagagagactcaaaaacacacagaacaaataaatggaacgtagtttgttagataagtggtaagtactaaagagaaagatactgcaggaaaatggaatagatagtgtcagatgagttgcagttttagatggggtggccaggcaggcctcactgagatgatgatggtggtgtgaagatctgaaggaagtgagggtaaatatgaaagcatataaatttatatatacataatccttgcctattttttagtaaattctcaaaatttttgctttaaattatatcntacccctagttagataaagactttttggaaattgcatgtttctttccaaagcagcaaaataatatctatattatcagtattatgaataattatttgtaattatgaataagaatatgaataattaataatcatacatgttggtctcataacttggtgttatttatgattaaacaccaaatttgctcactcttagtcacagcaccatcggttttctattttctttgctttcttcactttgaatttaaataaaattcaacccaacttgtactatccctatttcttgagcatgctttgttnttctagttactgcttatttgctcattcatgttcttttcaccaaggctaatccttcatctcattgcacctatcaaaatcctgcccaagtagaaagtctcctttacctgccacttccttaaagggaacttttctttgttatcgcatctgaaagtctccccactaccaatattcttatacttttagcatttttatggtatagttactatgccaggggtttttgtagatcagggattaatttttttttttcctgtgttccaatgaaactttattcaccatcatggattagtttgtttccttacagcatttgtcactattcattaggcctactaagaatatttgtataatattacaaagtttacagatcactttttacattatttcattaaagacttataaatccttataaggatgttattataaatcctccttttcagatgagaaaagagagtcagggtggtgggtaagtatcacatgggtattaagggacatgtttgtaatcatagtttgggatctttgagactgttttttattttttatctcttacacctgtgctatattgtctcccagtagcttttgcattaagtgcgtaaatagatgcatgcatgcaaagatgcatattaagtttcagctatagtacatagctgaaatgcattaactggttacctactgttcatcagttactctgctgtgtaccttaatttaagaacatttaagagtttaggccttgtgtttcctttgaataattatgtgtgttttcctccacttcatttagatgagctgaagcacattattggggctgagacaacacggaaaggtattcttcgtgtttttgaaatgtttcagcacaaccaattaaataggagaatggtttatgtcttcttggaaggctttttagaaaccttatttccacagtataaattccgtgaacttttcaacaaactgcattcacggtcaaagcagatgcagaaatataaacagaaacttcaaactactcaagcgccttctttgcagaaaaggtgacactccactctatgaagctggtgttcattttgtccaggactaatggtatggacagatcttctggggcttaactcaaatactgttgtgtctgcaccagtcttttagtgtctcaaaatagattattaatacatccataagtctgtggttcttctcattctcatctataatccaccactaccaagagagatttctgtgtcttaaatgatttggtgcatattttgcaacattgagagaaaactgcccccatctcaagcaagaatggcgttggtttcttccatttcaaactaatcagcattctccagcaatgacaaagtgccagagtgtatatatgaaagctaaggaaagcacaaaacaatggttcagagataaattggctaatttgtttaacagttggagactgtgcaatgtacgacttggaggagtttgtttggcataatgattttgtaggtctgtcagcattttgatatattgtggattagccaggtgaatgatccttgaaacatctctttcaggtctggagaaagagacagaatgcccttaaagtgtgaaataaccttatacctgaattacagttttgtgatataaaataaagctgagtataaaataaaaccaatcaaacacagaatttgattggatttgttattcattggtatacaacaatttttattcttatgtgtgctttaagggctgtgttttgctcttagggtactcaattttatgtttccttttggcattctttgtgcaaaaagaagcatgtggtggctctcatttaaatttcaaaattattagttttatctttaacagattactgattatacagaagatataatttattggaagaactgccaaatacattttgtccttctaaaaatatggaaatttaaatagtagtctggaaagttaccatatgataatttttaattgtgtgatctagacatgccttaggtaactgcagaaatagcaaattaaatgattaatgagcttattagtcatagtaaacatacagattcctaattctatgacagtgtacatatatgaaaataaatgatgaaaaaagaactataatatttttaaaaatatgcttttatttatatttcacataatgtaaagttctacaaaataaagctagtaggcaagacccctcagtgtatacctttaaacccataaattaattttatatcaataaaataaaatactttctctagttttggagcttctgtatttcctatagttttctgactgtccattttatccatcttagaagtattcacatcccttctatgcaggatttctgcatagttttaaatactttcattgcctaagggtttgggtgtgtcagctttttttgttttaaaaatatttaacactaaaaccttaaaataatgaagctacttatcagaccactgagccaagatcctgggtattaaaagaaagtctgggtgcttaagataaagggacagagtattggtatcccagttatttgggagctttaagattggaacaagatatcactgtcttgttttcacttagatcctacttacaaagtgagggttattaacagaataaagccttcctttaaagctttataataatcatatttattaataatgctgttgtgcatacttatagtatgcatatattcagcatatgttgcatgtcttcagaattacataaaatgaaatccctttcattgcaacttgcaagtgagaaaagatccttagtggctctggtggaagaaatagtatttcttcttctcagggtgtctccctgccttggcccctccctgagccccaggctttaaaagtgaaaatgtttgaaacatgaaacatgtctgtaggaagcatcagcatggccataagtgcagtgattttcatatatgcctctgcccatttcaaatatatttttgacatgaataaatctaacagtatacagaataattcatgtaagaccctaacgtgtacatgtgaaaaagcatttctatataatgtgaggagcactggccatcaattagggaaataaaggtcatgtaatattgcaaattttcaaaatagagccctgcaagataactgcaatcataccaaaaactatttgagtaaatggatttttaaagtaatttttgtttagaagagtttatatttcagaagcagaaaatgtcaaatgatagtctttgtaaatggtggtgcaccttctctatgcacatctgtcttttacatcagaaagagctgtggtcatgctaaaattagagataactttttgaatgacttggtcaagctgtgtgtaaaatatttaaccataagtcaagtacagtgtactatgtttaataaagttacatttaatgcatttattgcatatatgaatatatacatgaagaggctttatgtcttctggtatttgattttgaatgttttttaagtcagtggtgcctttaggcaagaactttcgaaattaatcattctttgtgttttctgatttttcaggtaacatgtacactatttagaaaccatcatagtttattcaccttaaaaaattgattgtattatttaaatatatcacttagatgggcatttcctataattaggatattccaaatagttgctgaaatcaattgtgccattgaccaatggatgcacttggttagccttaatttttttaaaaaaaaaaaaacaaaaactttcttgaatatttcagtttgttcattttaagtttgtgctgctggtatttgggaagaaaaatcaatcagttaagtgctaccagaaagtgtaccaatttttataaaaattaagaatgatataaatttcacaatctaaaattttaattttgtgcaatattttcatttaatgcatgtgtatttgagtaattgtaagataaatgaatttttaattttttgagatgtagcttaaactgtcttcttaatccaacaacttacattccgttgttgctgcatccttttatttaaggacttgttttaaaagtctttttgtcactccttggaaaattcttttattagtagtaaattttgcttttaggagcatggctcctgtattacaagggaaaaaatatgaagagcacattttaggattataattgttaaaagataatgtgtgcatatcattgtacagtaagtgtcaactgtgtgcctaactgttctatcaatactttctttctttaacaaagaagaaacaacaatcagaatgtcagttatttttattcaactaaaaggattaaaaaatttatttggtttgtgttctgtccattagaaaatactaataaagtattaacaaaca

SEQ ID NO: 421429 - DNA, 8875 bp, Homo sapiens
  misc_feature (4327)..(4327): n is a, c, g, or t
  misc_feature (4624)..(4624): n is a, c, g, or t
agcgggctcttccaagatggcggcgcgtccgtcgcgagcgaccgggccgaggggaggccagcgaagccgagtaaaaccgccgcccgggagaagactgaaggagcagttgccgccgttggcggcggcccgagcagttttcgctgctgctacggctgttgccatgaggcgaggctagggaggacctcacttccccggggtgtaataatgttaactgaggccagtctatccatatggggatggggaagccttggcattgtcctttttctgataacctttggaccctttgtaatattttatttgacattttatatcctctgctttgtgggtgggggtttagtggttactctcctgtttggaaaaacaaactcagagaagtacctagaacagtgtgaacactcatttcttcctccaacatcacctggggttcctaagtgcttagaagaaatgaaacgggaagccaggactattaagattgatagaagattgacgggtgccaatataattgatgaacctctccagcaagttatccagttttccttgagggattatgtccagtattggtattatacactaagcgatgatgaatcttttcttcttgaaattaggcagactcttcaaaacgcactcattcagtttgctactaggtcaaaagaaatagactggcaaccttattttactacacgcattgtagatgactttggcacacacttacgagtattcagaaaggctcaacagaaaataacagagaaagatgatcaagtgaaaggtacagcagaagatcttgtagataccttctttgaagttgaagttgaaatggagaaggaggtttgccgtgatctagtgtgcacttcccccaaagatgaagaaggattcctaagggatttgtgtgaggtcttactatatttattgctacctcctggagatttccagaacaagatcatgcgatactttgtcagggaaatccttgcacgaggaattcttcttccattaataaatcaactcagtgatcctgattatattaatcagtatgtcatatggatgatccgtgattctaactgcaactatgaggcctttatgaacattattaaattgagtgacaatattggagagctagaagcagtcagagataaggcagcagaagaattacagtatcttagatctctagatacagctggtgatgatatcaacactatcaaaaatcaaataaatagcttactattcgtaaagaaggtatgtgactcaagaatacagcgattgcagtcaggcaaagaaataaatactgtgaaacttgcagcaaactttgggaaactttgcacagtccccctggacagcattcttgtagacaatgttgcactacaattttttatggattacatgcagcaaactggaggtcaagcacatctattcttttggatgacagtggaaggataccgggttaccgcccaacagcagctagaagttttattaagtcgtcagagagatggaaaacatcaaaccaaccaaaccaaaggtcttttaagagcagctgctgttggaatttatgaacagtatttatcagaaaaggcatctccaagagttactgttgatgactatttagtagcaaaattagcagatactttgaatcatgaagatccaacccctgaaatctttgatgacattcaaagaaaggtatatgaattgatgctacgagatgaaagattttatccttccttcagacagaatgcactttatgtgcgcatgttagctgagcttgacatgttaaaagatcctagtttcagaggatccgatgatggggatggagaatcttttaatgggtctcctacaggaagcataaatttgtctttagatgacctttcaaatgtttcttctgatgactcagtacaacttcatgcctacatttcagacacagtatatgctgactatgacccatatgctgtggcaggcgtttgtaatgatcatggcaagacatatgcattatatgccatcactgtacaccggcgcaacctaaacagtgaggagatgtggaaaacctatcgtcgttatagtgacttccatgacttccacatgagaatcactgaacagtttgaaagtctctcaagcatattgaaacttcctggaaaaaagacttttaataatatggatagagattttttagaaaagagaaaaaaggatctaaatgcatatttgcagttactgttagctcctgaaatgatgaaggcatcccccgctttagctcactatgtgtatgatttccttgagaacaaagcctacagtaaaggaaaaggggattttgctcgcaagatggacacttttgtaaatccacttcgcaattcaatgaggaatgtttcaaatgcagttaaatcccttcctgatagcttggcagagggaatgactaaaatgtcagacaacatgggcaaaatgtcagaaagattaggtcaagacataaagcaatcattttttaaggtgcctcctttaattcctaagactgattcagaccctgaacatcgccgagtttcggctcaacttgacgataatgtggatgacaatattccacttagggtaatgctgcttctcatggatgaagtattcgacttaaaagaaagaaatcagtggttgcgaaggaatatcaaaaacctacttcaacagcttattagagctacatatggcgatactattaatagaaaaatagttgaccatgttgactggatgacttcacctgaacaagtagccgactcagtgaaacgtttcagagatgcattttggccaaatggcattttagcagaggctgttccatgcagagataaaagtattcgaatgagaacaagagtagcaggaaaaacgaaattacttgcaattatgccaggtgagtgagcatgtatagttaaaaatctttataatttgtcattcttctgagtttttagcattcatcatgccagtgtaactgccttttgattataacaactaccttttgatggcttaatacatatcaggcactgtactaggcatttctcatatgttcttaatcagtcctcatgacagtactgtaaagctaaggactgttaacatcaccgctttatatgtgaggaaacggaagctcagagaggttaaataacctatccaaggtttatagctactaagcaacagttggtattctgacttggctttaagtgatgtgaaagcttatgcttttagccacttcgctctgctgccttgaaacatattgggagttaagttaaataaataaaatacatgacaggtgaaagggctaataaaatataaagtatgaatttttcaggaagaatatttgttgtacttaggaaaacaagttatttcaaaaactccatttacatagaaagaactgattggctgattattaatctttattacttaaaatacaatcccaaacaaagtatacttagtagcattttgttggtctgattttggttgcttcattagggtatagctatctcactaccttagatttactttttctcgtttttcttctttcaatcagagaagttatataatgtaaaaagcaatttaatgcggctgggaggtggtgatggttgttttgccccttgttaatgagtatctttgaaaatgcctgcatgtcttttctctgtattttaattctggatgtagagaatgaacagacatatttgtacattctttaatatcacacaataccaatttttttctctaattttgttttcttacctgtattttctctataaattttaatgaccagccttctcttctgtcaattaaattaaaaatttgccacaattttaattcttacctatataccgtttcatttgctgataaaaaagcaaattatagaaatgacattttagaaaaataagaaacaattgcttaggatattatttaatatactattatagtaaacctgattgtgctatatggactgactcagttatctagctggaagaaatctttattcactaaatatttattgaaagttattatgtgccaggtgctgttctttgcacttatgtttgccttcttggagcttactttccagtagaaatagagagactcaaaaacacacagaacaaataaatggaacgtagtttgttagataagtggtaagtactaaagagaaagatactgcaggaaaatggaatagatagtgtcagatgagttgcagttttagatggggtggccaggcaggcctcactgagatgatgatggtggtgtgaagatctgaaggaagtgagggtaaatatgaaagcatataaatttatatatacataatccttgcctattttttagtaaattctcaaaatttttgctttaaattatatcntacccctagttagataaagactttttggaaattgcatgtttctttccaaagcagcaaaataatatctatattatcagtattatgaataattatttgtaattatgaataagaatatgaataattaataatcatacatgttggtctcataacttggtgttatttatgattaaacaccaaatttgctcactcttagtcacagcaccatcggttttctattttctttgctttcttcactttgaatttaaataaaattcaacccaacttgtactatccctatttcttgagcatgctttgttnttctagttactgcttatttgctcattcatgttcttttcaccaaggctaatccttcatctcattgcacctatcaaaatcctgcccaagtagaaagtctcctttacctgccacttccttaaagggaacttttctttgttatcgcatctgaaagtctccccactaccaatattcttatacttttagcatttttatggtatagttactatgccaggggtttttgtagatcagggattaatttttttttttcctgtgttccaatgaaactttattcaccatcatggattagtttgtttccttacagcatttgtcactattcattaggcctactaagaatatttgtataatattacaaagtttacagatcactttttacattatttcattaaagacttataaatccttataaggatgttattataaatcctccttttcagatgagaaaagagagtcagggtggtgggtaagtatcacatgggtattaagggacatgtttgtaatcatagtttgggatctttgagactgttttttattttttatctcttacacctgtgctatattgtctcccagtagcttttgcattaagtgcgtaaatagatgcatgcatgcaaagatgcatattaagtttcagctatagtacatagctgaaatgcattaactggttacctactgttcatcagttactctgctgtgtaccttaatttaagaacatttaagagtttaggccttgtgtttcctttgaataattatgtgtgttttcctccacttcatttagatgagctgaagcacattattggggctgagacaacacggaaaggtattcttcgtgtttttgaaatgtttcagcacaaccaattaaataggagaatggtttatgtcttcttggaaggctttttagaaaccttatttccacagtataaattccgtgaacttttcaacaaactgcattcacggtcaaagcagatgcagaaatataaacagaaacttcaaactactcaagcgccttctttgcagaaaaggtgacactccactctatgaagctggtgttcattttgtccaggactaatggtatggacagatcttctggggcttaactcaaatactgttgtgtctgcaccagtcttttagtgtctcaaaatagattattaatacatccataagtctgtggttcttctcattctcatctataatccaccactaccaagagagatttctgtgtcttaaatgatttggtgcatattttgcaacattgagagaaaactgcccccatctcaagcaagaatggcgttggtttcttccatttcaaactaatcagcattctccagcaatgacaaagtgccagagtgtatatatgaaagctaaggaaagcacaaaacaatggttcagagataaattggctaatttgtttaacagttggagactgtgcaatgtacgacttggaggagtttgtttggcataatgattttgtaggtctgtcagcattttgatatattgtggattagccaggtgaatgatccttgaaacatctctttcaggtctggagaaagagacagaatgcccttaaagtgtgaaataaccttatacctgaattacagttttgtgatataaaataaagctgagtataaaataaaaccaatcaaacacagaatttgattggatttgttattcattggtatacaacaatttttattcttatgtgtgctttaagggctgtgttttgctcttagggtactcaattttatgtttccttttggcattctttgtgcaaaaagaagcatgtggtggctctcatttaaatttcaaaattattagttttatctttaacagattactgattatacagaagatataatttattggaagaactgccaaatacattttgtccttctaaaaatatggaaatttaaatagtagtctggaaagttaccatatgataatttttaattgtgtgatctagacatgccttaggtaactgcagaaatagcaaattaaatgattaatgagcttattagtcatagtaaacatacagattcctaattctatgacagtgtacatatatgaaaataaatgatgaaaaaagaactataatatttttaaaaatatgcttttatttatatttcacataatgtaaagttctacaaaataaagctagtaggcaagacccctcagtgtatacctttaaacccataaattaattttatatcaataaaataaaatactttctctagttttggagcttctgtatttcctatagttttctgactgtccattttatccatcttagaagtattcacatcccttctatgcaggatttctgcatagttttaaatactttcattgcctaagggtttgggtgtgtcagctttttttgttttaaaaatatttaacactaaaaccttaaaataatgaagctacttatcagaccactgagccaagatcctgggtattaaaagaaagtctgggtgcttaagataaagggacagagtattggtatcccagttatttgggagctttaagattggaacaagatatcactgtcttgttttcacttagatcctacttacaaagtgagggttattaacagaataaagccttcctttaaagctttataataatcatatttattaataatgctgttgtgcatacttatagtatgcatatattcagcatatgttgcatgtcttcagaattacataaaatgaaatccctttcattgcaacttgcaagtgagaaaagatccttagtggctctggtggaagaaatagtatttcttcttctcagggtgtctccctgccttggcccctccctgagccccaggctttaaaagtgaaaatgtttgaaacatgaaacatgtctgtaggaagcatcagcatggccataagtgcagtgattttcatatatgcctctgcccatttcaaatatatttttgacatgaataaatctaacagtatacagaataattcatgtaagaccctaacgtgtacatgtgaaaaagcatttctatataatgtgaggagcactggccatcaattagggaaataaaggtcatgtaatattgcaaattttcaaaatagagccctgcaagataactgcaatcataccaaaaactatttgagtaaatggatttttaaagtaatttttgtttagaagagtttatatttcagaagcagaaaatgtcaaatgatagtctttgtaaatggtggtgcaccttctctatgcacatctgtcttttacatcagaaagagctgtggtcatgctaaaattagagataactttttgaatgacttggtcaagctgtgtatttaatgcatttattgcatatatgaatatatacatgaagaggctttatgtcttctggtatttgattttgaatgttttttaagtcagtggtgcctttaggcaagaactttcgaaattaatcattctttgtgttttctgatttttcaggtaacatgtacactatttagaaaccatcatagtttattcaccttaaaaaattgattgtattatttaaatatatcacttagatgggcatttcctataattaggatattccaaatagttgctgaaatcaattgtgccattgaccaatggatgcacttggttagccttaatttttttaaaaaaaaaaaaacaaaaactttcttgaatatttcagtttgttcattttaagtttgtgctgctggtatttgggaagaaaaatcaatcagttaagtgctaccagaaagtgtaccaatttttataaaaattaagaatgatataaatttcacaatctaaaattttaattttgtgcaatattttcatttaatgcatgtgtatttgagtaattgtaagataaatgaatttttaattttttgagatgtagcttaaactgtcttcttaatccaacaacttacattccgttgttgctgcatccttttatttaaggacttgttttaaaagtctttttgtcactccttggaaaattcttttattagtagtaaattttgcttttaggagcatggctcctgtattacaagggaaaaaatatgaagagcacattttaggattataattgttaaaagataatgtgtgcatatcattgtacagtaagtgtcaactgtgtgcctaactgttctatcaatactttctttctttaacaaagaagaaacaacaatcagaatgtcagttatttttattcaactaaaaggattaaaaaatttatttggtttgtgttctgtccattagaaaatactaataaagtattaacaaaca

SEQ ID NO: 421430 - DNA, 3743 bp, Homo sapiens
agcgggctcttccaagatggcggcgcgtccgtcgcgagcgaccgggccgaggggaggccagcgaagccgagtaaaaccgccgcccgggagaagactgaaggagcagttgccgccgttggcggcggcccgagcagttttcgctgctgctacggctgttgccatgaggcgaggctagggaggacctcacttccccggggtgtaataatgttaactgagttatattgggagctagtttcaagatgaaatactaattctaagccagtctatccatatggggatggggaagccttggcattgtcctttttctgataacctttggaccctttgtaatattttatttgacattttatatcctctgctttgtgggtgggggtttagtggttactctcctgtttggaaaaacaaactcagagaagtacctagaacagtgtgaacactcatttcttcctccaacatcacctggggttcctaagtgcttagaagaaatgaaacgggaagccaggactattaagattgatagaagattgacgggtgccaatataattgatgaacctctccagcaagttatccagttttccttgagggattatgtccagtattggtattatacactaagcgatgatgaatcttttcttcttgaaattaggcagactcttcaaaacgcactcattcagtttgctactaggtcaaaagaaatagactggcaaccttattttactacacgcattgtagatgactttggcacacacttacgagtattcagaaaggctcaacagaaaataacagagaaagatgatcaagtgaaaggtacagcagaagatcttgtagataccttctttgaagttgaagttgaaatggagaaggaggtttgccgtgatctagtgtgcacttcccccaaagatgaagaaggattcctaagggatttgtgtgaggtcttactatatttattgctacctcctggagatttccagaacaagatcatgcgatactttgtcagggaaatccttgcacgaggaattcttcttccattaataaatcaactcagtgatcctgattatattaatcagtatgtcatatggatgatccgtgattctaactgcaactatgaggcctttatgaacattattaaattgagtgacaatattggagagctagaagcagtcagagataaggcagcagaagaattacagtatcttagatctctagatacagctggtgatgatatcaacactatcaaaaatcaaataaatagcttactattcgtaaagaaggtatgtgactcaagaatacagcgattgcagtcaggcaaagaaataaatactgtgaaacttgcagcaaactttgggaaactttgcacagtccccctggacagcattcttgtagacaatgttgcactacaattttttatggattacatgcagcaaactggaggtcaagcacatctattcttttggatgacagtggaaggataccgggttaccgcccaacagcagctagaagttttattaagtcgtcagagagatggaaaacatcaaaccaaccaaaccaaaggtcttttaagagcagctgctgttggaatttatgaacagtatttatcagaaaaggcatctccaagagttactgttgatgactatttagtagcaaaattagcagatactttgaatcatgaagatccaacccctgaaatctttgatgacattcaaagaaaggtatatgaattgatgctacgagatgaaagattttatccttccttcagacagaatgcactttatgtgcgcatgttagctgagcttgacatgttaaaagatcctagtttcagaggatccgatgatggggatggagaatcttttaatgggtctcctacaggaagcataaatttgtctttagatgacctttcaaatgtttcttctgatgactcagtacaacttcatgcctacatttcagacacaggcgtttgtaatgatcatggcaagacatatgcattatatgccatcactgtacaccggcgcaacctaaacagtgaggagatgtggaaaacctatcgtcgttatagtgacttccatgacttccacatgagaatcactgaacagtttgaaagtctctcaagcatattgaaacttcctggaaaaaagacttttaataatatggatagagattttttagaaaagagaaaaaaggatctaaatgcatatttgcagttactgttagctcctgaaatgatgaaggcatcccccgctttagctcactatgtgtatgatttccttgagaacaaagcctacagtaaaggaaaaggggattttgctcgcaagatggacacttttgtaaatccacttcgcaattcaatgaggaatgtttcaaatgcagttaaatcccttcctgatagcttggcagagggaatgactaaaatgtcagacaacatgggcaaaatgtcagaaagattaggtcaagacataaagcaatcattttttaaggtgcctcctttaattcctaagactgattcagaccctgaacatcgccgagtttcggctcaacttgacgataatgtggatgacaatattccacttagggtaatgctgcttctcatggatgaagtattcgacttaaaagaaagaaatcagtggttgcgaaggaatatcaaaaacctacttcaacagcttattagagctacatatggcgatactattaatagaaaaatagttgaccatgttgactggatgacttcacctgaacaagtagccgactcagtgaaacgtttcagagatgcattttggccaaatggcattttagcagaggctgttccatgcagagataaaagtattcgaatgagaacaagagtagcaggaaaaacgaaattacttgcaattatgccagatgagctgaagcacattattggggctgagacaacacggaaaggtattcttcgtgtttttgaaatgtttcagcacaaccaattaaataggagaatggtttatgtcttcttggaaggctttttagaaaccttatttccacagtataaattccgtgaacttttcaacaaactgcattcacggtcaaagcagatgcagaaatataaacagaaacttcaaactactcaagcgccttctttgcagaaaaggtgacactccactctatgaagctggtgttcattttgtccaggactaatggtatggacagatcttctggggcttaactcaaatactgttgtgtctgcaccagtcttttagtgtctcaaaatagattattaatacatccataagtctgtggttcttctcattctcatctataatccaccactaccaagagagatttctgtgtcttaaatgatttggtgcatattttgcaacattgagagaaaactgcccccatctcaagcaagaatggcgttggtttcttccatttcaaactaatcagcattctccagcaatgacaaagtgccagagtgtatatatgaaagctaaggaaagcacaaaacaatggttcagagataaattggctaatttgtttaacagttggagactgtgcaatgtacgacttggaggagtttgtttggcataatgattttgtaggtctgtcagcattttgatatattgtggattagccaggtgaatgatccttgaaacatctctttcaggtctggagaaagagacagaatgcccttaaagtgtgaaataaccttatacctgaattacagttttgtgatataaaataaagctgagtataaaataaaaccaatcaaacacaga

SEQ ID NO: 421431 - DNA, 3794 bp, Homo sapiens
agcgggctcttccaagatggcggcgcgtccgtcgcgagcgaccgggccgaggggaggccagcgaagccgagtaaaaccgccgcccgggagaagactgaaggagcagttgccgccgttggcggcggcccgagcagttttcgctgctgctacggctgttgccatgaggcgaggctagggaggacctcacttccccggggtgtaataatgttaactgaggatgaaagaaaaaacttgactggaagctccagaaaattatagtggaaaaggagacagactgagtccctgggcttagaagatttagagattgagccagtctatccatatggggatggggaagccttggcattgtcctttttctgataacctttggaccctttgtaatattttatttgacattttatatcctctgctttgtgggtgggggtttagtggttactctcctgtttggaaaaacaaactcagagaagtacctagaacagtgtgaacactcatttcttcctccaacatcacctggggttcctaagtgcttagaagaaatgaaacgggaagccaggactattaagattgatagaagattgacgggtgccaatataattgatgaacctctccagcaagttatccagttttccttgagggattatgtccagtattggtattatacactaagcgatgatgaatcttttcttcttgaaattaggcagactcttcaaaacgcactcattcagtttgctactaggtcaaaagaaatagactggcaaccttattttactacacgcattgtagatgactttggcacacacttacgagtattcagaaaggctcaacagaaaataacagagaaagatgatcaagtgaaaggtacagcagaagatcttgtagataccttctttgaagttgaagttgaaatggagaaggaggtttgccgtgatctagtgtgcacttcccccaaagatgaagaaggattcctaagggatttgtgtgaggtcttactatatttattgctacctcctggagatttccagaacaagatcatgcgatactttgtcagggaaatccttgcacgaggaattcttcttccattaataaatcaactcagtgatcctgattatattaatcagtatgtcatatggatgatccgtgattctaactgcaactatgaggcctttatgaacattattaaattgagtgacaatattggagagctagaagcagtcagagataaggcagcagaagaattacagtatcttagatctctagatacagctggtgatgatatcaacactatcaaaaatcaaataaatagcttactattcgtaaagaaggtatgtgactcaagaatacagcgattgcagtcaggcaaagaaataaatactgtgaaacttgcagcaaactttgggaaactttgcacagtccccctggacagcattcttgtagacaatgttgcactacaattttttatggattacatgcagcaaactggaggtcaagcacatctattcttttggatgacagtggaaggataccgggttaccgcccaacagcagctagaagttttattaagtcgtcagagagatggaaaacatcaaaccaaccaaaccaaaggtcttttaagagcagctgctgttggaatttatgaacagtatttatcagaaaaggcatctccaagagttactgttgatgactatttagtagcaaaattagcagatactttgaatcatgaagatccaacccctgaaatctttgatgacattcaaagaaaggtatatgaattgatgctacgagatgaaagattttatccttccttcagacagaatgcactttatgtgcgcatgttagctgagcttgacatgttaaaagatcctagtttcagaggatccgatgatggggatggagaatcttttaatgggtctcctacaggaagcataaatttgtctttagatgacctttcaaatgtttcttctgatgactcagtacaacttcatgcctacatttcagacacaggcgtttgtaatgatcatggcaagacatatgcattatatgccatcactgtacaccggcgcaacctaaacagtgaggagatgtggaaaacctatcgtcgttatagtgacttccatgacttccacatgagaatcactgaacagtttgaaagtctctcaagcatattgaaacttcctggaaaaaagacttttaataatatggatagagattttttagaaaagagaaaaaaggatctaaatgcatatttgcagttactgttagctcctgaaatgatgaaggcatcccccgctttagctcactatgtgtatgatttccttgagaacaaagcctacagtaaaggaaaaggggattttgctcgcaagatggacacttttgtaaatccacttcgcaattcaatgaggaatgtttcaaatgcagttaaatcccttcctgatagcttggcagagggaatgactaaaatgtcagacaacatgggcaaaatgtcagaaagattaggtcaagacataaagcaatcattttttaaggtgcctcctttaattcctaagactgattcagaccctgaacatcgccgagtttcggctcaacttgacgataatgtggatgacaatattccacttagggtaatgctgcttctcatggatgaagtattcgacttaaaagaaagaaatcagtggttgcgaaggaatatcaaaaacctacttcaacagcttattagagctacatatggcgatactattaatagaaaaatagttgaccatgttgactggatgacttcacctgaacaagtagccgactcagtgaaacgtttcagagatgcattttggccaaatggcattttagcagaggctgttccatgcagagataaaagtattcgaatgagaacaagagtagcaggaaaaacgaaattacttgcaattatgccagatgagctgaagcacattattggggctgagacaacacggaaaggtattcttcgtgtttttgaaatgtttcagcacaaccaattaaataggagaatggtttatgtcttcttggaaggctttttagaaaccttatttccacagtataaattccgtgaacttttcaacaaactgcattcacggtcaaagcagatgcagaaatataaacagaaacttcaaactactcaagcgccttctttgcagaaaaggtgacactccactctatgaagctggtgttcattttgtccaggactaatggtatggacagatcttctggggcttaactcaaatactgttgtgtctgcaccagtcttttagtgtctcaaaatagattattaatacatccataagtctgtggttcttctcattctcatctataatccaccactaccaagagagatttctgtgtcttaaatgatttggtgcatattttgcaacattgagagaaaactgcccccatctcaagcaagaatggcgttggtttcttccatttcaaactaatcagcattctccagcaatgacaaagtgccagagtgtatatatgaaagctaaggaaagcacaaaacaatggttcagagataaattggctaatttgtttaacagttggagactgtgcaatgtacgacttggaggagtttgtttggcataatgattttgtaggtctgtcagcattttgatatattgtggattagccaggtgaatgatccttgaaacatctctttcaggtctggagaaagagacagaatgcccttaaagtgtgaaataaccttatacctgaattacagttttgtgatataaaataaagctgagtataaaataaaaccaatcaaacacaga

SEQ ID NO: 421432 - DNA, 6308 bp, Homo sapiens
agcgggctcttccaagatggcggcgcgtccgtcgcgagcgaccgggccgaggggaggccagcgaagccgagtaaaaccgccgcccgggagaagactgaaggagcagttgccgccgttggcggcggcccgagcagttttcgctgctgctacggctgttgccatgaggcgaggctagggaggacctcacttccccggggtgtaataatgttaactgaggccagtctatccatatggggatggggaagccttggcattgtcctttttctgataacctttggaccctttgtaatattttatttgacattttatatcctctgctttgtgggtgggggtttagtggttactctcctgtttggaaaaacaaactcagagaagtacctagaacagtgtgaacactcatttcttcctccaacatcacctggggttcctaagtgcttagaagaaatgaaacgggaagccaggactattaagattgatagaagattgacgggtgccaatataattgatgaacctctccagcaagttatccagttttccttgagggattatgtccagtattggtattatacactaagcgatgatgaatcttttcttcttgaaattaggcagactcttcaaaacgcactcattcagtttgctactaggtcaaaagaaatagactggcaaccttattttactacacgcattgtagatgactttggcacacacttacgagtattcagaaaggctcaacagaaaataacagagaaagatgatcaagtgaaaggtacagcagaagatcttgtagataccttctttgaagttgaagttgaaatggagaaggaggtttgccgtgatctagtgtgcacttcccccaaagatgaagaaggattcctaagggatttgtgtgaggtcttactatatttattgctacctcctggagatttccagaacaagatcatgcgatactttgtcagggaaatccttgcacgaggaattcttcttccattaataaatcaactcagtgatcctgattatattaatcagtatgtcatatggatgatccgtgattctaactgcaactatgaggcctttatgaacattattaaattgagtgacaatattggagagctagaagcagtcagagataaggcagcagaagaattacagtatcttagatctctagatacagctggtgatgatatcaacactatcaaaaatcaaataaatagcttactattcgtaaagaaggtatgtgactcaagaatacagcgattgcagtcaggcaaagaaataaatactgtgaaacttgcagcaaactttgggaaactttgcacagtccccctggacagcattcttgtagacaatgttgcactacaattttttatggattacatgcagcaaactggaggtcaagcacatctattcttttggatgacagtggaaggataccgggttaccgcccaacagcagctagaagttttattaagtcgtcagagagatggaaaacatcaaaccaaccaaaccaaaggtcttttaagagcagctgctgttggaatttatgaacagtatttatcagaaaaggcatctccaagagttactgttgatgactatttagtagcaaaattagcagatactttgaatcatgaagatccaacccctgaaatctttgatgacattcaaagaaaggtatatgaattgatgctacgagatgaaagattttatccttccttcagacagaatgcactttatgtgcgcatgttagctgagcttgacatgttaaaagatcctagtttcagaggatccgatgatggggatggagaatcttttaatgggtctcctacaggaagcataaatttgtctttagatgacctttcaaatgtttcttctgatgactcagtacaacttcatgcctacatttcagacacaggcgtttgtaatgatcatggcaagacatatgcattatatgccatcactgtacaccggcgcaacctaaacagtgaggagatgtggaaaacctatcgtcgttatagtgacttccatgacttccacatgagaatcactgaacagtttgaaagtctctcaagcatattgaaacttcctggaaaaaagacttttaataatatggatagagattttttagaaaagagaaaaaaggatctaaatgcatatttgcagttactgttagctcctgaaatgatgaaggcatcccccgctttagctcactatgtgtatgatttccttgagaacaaagcctacagtaaaggaaaaggggattttgctcgcaagatggacacttttgtaaatccacttcgcaattcaatgaggaatgtttcaaatgcagttaaatcccttcctgatagcttggcagagggaatgactaaaatgtcagacaacatgggcaaaatgtcagaaagattaggtcaagacataaagcaatcattttttaaggtgcctcctttaattcctaagactgattcagaccctgaacatcgccgagtttcggctcaacttgacgataatgtggatgacaatattccacttagggtaatgctgcttctcatggatgaagtattcgacttaaaagaaagaaatcagtggttgcgaaggaatatcaaaaacctacttcaacagcttattagagctacatatggcgatactattaatagaaaaatagttgaccatgttgactggatgacttcacctgaacaagtagccgactcagtgaaacgtttcagagatgcattttggccaaatggcattttagcagaggctgttccatgcagagataaaagtattcgaatgagaacaagagtagcaggaaaaacgaaattacttgcaattatgccagatgagctgaagcacattattggggctgagacaacacggaaaggtattcttcgtgtttttgaaatgtttcagcacaaccaattaaataggagaatggtttatgtcttcttggaaggctttttagaaaccttatttccacagtataaattccgtgaacttttcaacaaactgcattcacggtcaaagcagatgcagaaatataaacagaaacttcaaactactcaagcgccttctttgcagaaaaggtgacactccactctatgaagctggtgttcattttgtccaggactaatggtatggacagatcttctggggcttaactcaaatactgttgtgtctgcaccagtcttttagtgtctcaaaatagattattaatacatccataagtctgtggttcttctcattctcatctataatccaccactaccaagagagatttctgtgtcttaaatgatttggtgcatattttgcaacattgagagatcagcattctccagcaatgacaaagtgccagagtgtatatatgaaagctaaggaaagcacaaaacaatggttcagagataaattggctaatttgtttaacagttggagactgtgcaatgtacgacttggaggagtttgtttggcataatgattttgtaggtctgtcagcattttgatatattgtggattagccaggtgaatgatccttgaaacatctctttcaggtctggagaaagagacagaatgcccttaaagtgtgaaataaccttatacctgaattacagttttgtgatataaaataaagctgagtataaaataaaaccaatcaaacacagaatttgattggatttgttattcattggtatacaacaatttttattcttatgtgtgctttaagggctgtgttttgctcttagggtactcaattttatgtttccttttggcattctttgtgcaaaaagaagcatgtggtggctctcatttaaatttcaaaattattagttttatctttaacagattactgattatacagaagatataatttattggaagaactgccaaatacattttgtccttctaaaaatatggaaatttaaatagtagtctggaaagttaccatatgataatttttaattgtgtgatctagacatgccttaggtaactgcagaaatagcaaattaaatgattaatgagcttattagtcatagtaaacatacagattcctaattctatgacagtgtacatatatgaaaataaatgatgaaaaaagaactataatatttttaaaaatatgcttttatttatatttcacataatgtaaagttctacaaaataaagctagtaggcaagacccctcagtgtatacctttaaacccataaattaattttatatcaataaaataaaatactttctctagttttggagcttctgtatttcctatagttttctgactgtccattttatccatcttagaagtattcacatcccttctatgcaggatttctgcatagttttaaatactttcattgcctaagggtttgggtgtgtcagctttttttgttttaaaaatatttaacactaaaaccttaaaataatgaagctacttatcagaccactgagccaagatcctgggtattaaaagaaagtctgggtgcttaagataaagggacagagtattggtatcccagttatttgggagctttaagattggaacaagatatcactgtcttgttttcacttagatcctacttacaaagtgagggttattaacagaataaagccttcctttaaagctttataataatcatatttattaataatgctgttgtgcatacttatagtatgcatatattcagcatatgttgcatgtcttcagaattacataaaatgaaatccctttcattgcaacttgcaagtgagaaaagatccttagtggctctggtggaagaaatagtatttcttcttctcagggtgtctccctgccttggcccctccctgagccccaggctttaaaagtgaaaatgtttgaaacatgaaacatgtctgtaggaagcatcagcatggccataagtgcagtgattttcatatatgcctctgcccatttcaaatatatttttgacatgaataaatctaacagtatacagaataattcatgtaagaccctaacgtgtacatgtgaaaaagcatttctatataatgtgaggagcactggccatcaattagggaaataaaggtcatgtaatattgcaaattttcaaaatagagccctgcaagataactgcaatcataccaaaaactatttgagtaaatggatttttaaagtaatttttgtttagaagagtttatatttcagaagcagaaaatgtcaaatgatagtctttgtaaatggtggtgcaccttctctatgcacatctgtcttttacatcagaaagagctgtggtcatgctaaaattagagataactttttgaatgacttggtcaagctgtgtgtaaaatatttaaccataagtcaagtacagtgtactatgtttaataaagttacatttaatgcatttattgcatatatgaatatatacatgaagaggctttatgtcttctggtatttgattttgaatgttttttaagtcagtggtgcctttaggcaagaactttcgaaattaatcattctttgtgttttctgatttttcaggtaacatgtacactatttagaaaccatcatagtttattcaccttaaaaaattgattgtattatttaaatatatcacttagatgggcatttcctataattaggatattccaaatagttgctgaaatcaattgtgccattgaccaatggatgcacttggttagccttaatttttttaaaaaaaaaaaaacaaaaactttcttgaatatttcagtttgttcattttaagtttgtgctgctggtatttgggaagaaaaatcaatcagttaagtgctaccagaaagtgtaccaatttttataaaaattaagaatgatataaatttcacaatctaaaattttaattttgtgcaatattttcatttaatgcatgtgtatttgagtaattgtaagataaatgaatttttaattttttgagatgtagcttaaactgtcttcttaatccaacaacttacattccgttgttgctgcatccttttatttaaggacttgttttaaaagtctttttgtcactccttggaaaattcttttattagtagtaaattttgcttttaggagcatggctcctgtattacaagggaaaaaatatgaagagcacattttaggattataattgttaaaagataatgtgtgcatatcattgtacagtaagtgtcaactgtgtgcctaactgttctatcaatactttctttctttaacaaagaagaaacaacaatcagaatgtcagttatttttattcaactaaaaggattaaaaaatttatttggtttgtgttctgtccattagaaaatactaataaagtattaacaaaca

SEQ ID NO: 421433 - DNA, 1205 bp, Homo sapiens
  misc_feature (1161)..(1161): n is a, c, g, or t
  misc_feature (1185)..(1185): n is a, c, g, or t
agcgggctcttccaagatggcggcgcgtccgtcgcgagcgaccgggccgaggggaggccagcgaagccgagtaaaaccgccgcccgggagaagactgaaggagcagttgccgccgttggcggcggcccgagcagttttcgctgctgctacggctgttgccatgaggcgaggctagggaggacctcacttccccggggtgtaataatgttaactgaggccagtctatccatatggggatggggaagccttggcattgtcctttttctgataacctttggaccctttgtaatattttatttgacattttatatcctctgctttgtgggtgggggtttagtggttactctcctgtttggaaaaacaaactcagagaagtacctagaacagtgtgaacactcatttcttcctccaacatcacctggggttcctaagtgcttagaagaaatgaaacgggaagccaggactattaagattgatagaagattgacgggtgccaatataattgatgaacctctccagcaagttatccagttttccttgagggattatgtccagtattggtattatacactaagcgatgatgaatcttttcttcttgaaattaggcagactcttcaaaacgcactcattcagtttgctactagagtctcgccctgtcgcccaggctggagtacaatggcgcaatctcggctcactgcaacctccgcttcctggaaccctgttttgtttaacaaaaccttggtctcactgtgtctcctagaatatgtaatttaaattctggctctgaaattacagggaattgtggtagtgatttgagaaccctttcagttctaaaatagtaagattctctggtcaggttgttactaatcttgatttcttttcaatcatgtttcctcccaaaacacacactaacatactccatcacactccacattttgaataccatttggggagttatttttttttaagtatataggattgctaattagagttaatttactttgggattaaagtactcttcatatctattgttttattagtaggggtcttatagtaggataacaaaatttatttaaaccttttaatatatttctaaatgatcagaaagaatgcttgattctaaacataaaatacatttactaatctctttcgttctgattngatttatataactcgcggtggggntccaaatagaataagttttt

SEQ ID NO: 421434 - DNA, 1741 bp, Homo sapiens
agcgggctcttccaagatggcggcgcgtccgtcgcgagcgaccgggccgaggggaggccagcgaagccgagtaaaaccgccgcccgggagaagactgaaggagcagttgccgccgttggcggcggcccgagcagttttcgctgctgctacggctgttgccatgaggcgaggctagggaggacctcacttccccggggtgtaataatgttaactgaggccagtctatccatatggggatggggaagccttggcattgtcctttttctgataacctttggaccctttgtaatattttatttgacattttatatcctctgctttgtgggtgggggtttagtggttactctcctgtttggaaaaacaaactcagagaagtacctagaacagtgtgaacactcatttcttcctccaacatcacctggggttcctaagtgcttagaagaaatgaaacgggaagccaggactattaagattgatagaagattgacgggtgccaatataattgatgaacctctccagcaagttatccagttttccttgagggattatgtccagtattggtattatacactaagcgatgatgaatcttttcttcttgaaattaggcagactcttcaaaacgcactcattcagtttgctactaggtcaaaagaaatagactggcaaccttattttactacacgcattgtagatgactttggcacacacttacgagtattcagaaaggctcaacagaaaataacagagaaagatgatcaagtgaaaggtacagcagaagatcttgtagataccttctttgaagttgaagttgaaatggagaaggaggtttgccgtgatctagtgtgcacttcccccaaagatgaagaaggattcctaagggatttgtgtgaggtcttactatatttattgctacctcctggagatttccagaacaagatcatgcgatactttgtcagggtaagcttaaactcataccatatcatacctgcaaaaaaatgtagagcagtagttttcaaaatttttggtcttaagaccctgttacactcttaaaaattattgaagactccaaagagcttttgtttatgtgagttttctttaaaatatttacacaagtgaagactaagaaatttttaaaacatgaaaatatgcaagcatgtatttcattacctaatagctcgataccatcatagcattatgtaactttgtaaaggtcactgtgtgtacatgaaagaacaagagtgaaaagttaaataatgtcttagcattattatgaaaatggtgttgaaagggtcacctgaaacccaagcttcgggggaacttcaggttcatggaaacctcccactaatcccccagaagtctctggctgatagttaggtgctttggtttttggttatgacaaaagtttgttttaaattttcttataccctagtgttatctaaatcaggttagataaaaataacatttttggacagaaactttaaaaactgtacagttaagattatgttttttagcaattggaaaattaatgtcagatgagaatagtagtcttggacttgttattccctgagtataaaccttcagagtaaagttctgtgtgtaaatttaaaggaataacatttgtctttggctgctggtaatgatttagaaaggctagctacacaagaacatgtcctggttgaatgcgtaacgtgaaaagttttgaattttcctaaaaacaaaagcttatgatctctttagtctg

SEQ ID NO: 421435 - DNA, 647 bp, Homo sapiens
gtaatatctttattccatttgaaaactaggatttgaaaatctgttttcctttcatcattttatatatcttgaattgtttttctttaggtacagcagaagatcttgtagataccttctttgaagttgaagttgaaatggagaaggaggtttgccgtgatctagtgtgcacttcccccaaagatgaagaaggttttcttttaatttaacttttttgacaatagtagctggctagagtcaagttagcagaaccagtgaaaaaatctaagggtaaaattattcttacttagggcaggtagcatagtaaagatgctattcattttattttattttgtaactcttaaaagtagtttccagattctgttttcttctttaaaggtcatctttaataattaactggtcctggctgggtgcagtggctcatgcctgtaatcccatcattttgggaggccgaagggcctggattgcttgagtccaggagttcaagaccagcctaggcaacatggcgaaaccctgtctctactaaaagtacgaaacatcagctggctgaggtgggagaatcaccggagcctgggaagtcaaggctgcagtgacctgtgatcatgctattgcactccagcctgagtgacgagagtgagaccctgtctaaa

SEQ ID NO: 421436 - DNA, 361 bp, Homo sapiens
tagagatggggtctcactgtgttgcccaggctggtctcaaactcctggattcaagtgatcctcctgctacagcctgccgaagtgctgcaattataggcatgagctactgtgcccagctgaaaatacgtttttaagacacactgaagacaacatttctgtacttttaaaatgtaacgacataatatagaccagaaaattactgcatctttccagtgttgcactctatattttccaaggcttgtcatttggataacaactctggtacaataaagtcatggtataatatcttttttccctttagatggacacttttgtaaatccacttcgcaattcaatgaggaatgtttcaaatgcagttaaa

SEQ ID NO: 421437 - DNA, 3702 bp, Homo sapiens
agcgggctcttccaagatggcggcgcgtccgtcgcgagcgaccgggccgaggggaggccagcgaagccgagtaaaaccgccgcccgggagaagactgaaggagcagttgccgccgttggcggcggcccgagcagttttcgctgctgctacggctgttgccatgaggcgaggctagggaggacctcacttccccggggtgtaataatgttaactgaggccagtctatccatatggggatggggaagccttggcattgtcctttttctgataacctttggaccctttgtaatattttatttgacattttatatcctctgctttgtgggtgggggtttagtggttactctcctgtttggaaaaacaaactcagagaagtacctagaacagtgtgaacactcatttcttcctccaacatcacctggggttcctaagtgcttagaagaaatgaaacgggaagccaggactattaagattgatagaagattgacgggtgccaatataattgatgaacctctccagcaagttatccagttttccttgagggattatgtccagtattggtattatacactaagcgatgatgaatcttttcttcttgaaattaggcagactcttcaaaacgcactcattcagtttgctactaggtcaaaagaaatagactggcaaccttattttactacacgcattgtagatgactttggcacacacttacgagtattcagaaaggctcaacagaaaataacagagaaagatgatcaagtgaaaggtacagcagaagatcttgtagataccttctttgaagttgaagttgaaatggagaaggaggtttgccgtgatctagtgtgcacttcccccaaagatgaagaaggattcctaagggatttgtgtgaggtcttactatatttattgctacctcctggagatttccagaacaagatcatgcgatactttgtcagggaaatccttgcacgaggaattcttcttccattaataaatcaactcagtgatcctgattatattaatcagtatgtcatatggatgatccgtgattctaactgcaactatgaggcctttatgaacattattaaattgagtgacaatattggagagctagaagcagtcagagataaggcagcagaagaattacagtatcttagatctctagatacagctggtgatgatatcaacactatcaaaaatcaaataaatagcttactattcgtaaagaaggtatgtgactcaagaatacagcgattgcagtcaggcaaagaaataaatactgtgaaacttgcagcaaactttgggaaactttgcacagtccccctggacagcattcttgtagacaatgttgcactacaattttttatggattacatgcagcaaactggaggtcaagcacatctattcttttggatgacagtggaaggataccgggttaccgcccaacagcagctagaagttttattaagtcgtcagagagatggaaaacatcaaaccaaccaaaccaaaggtcttttaagagcagctgctgttggaatttatgaacagtatttatcagaaaaggcatctccaagagttactgttgatgactatttagtagcaaaattagcagatactttgaatcatgaagatccaacccctgaaatctttgatgacattcaaagaaaggtatatgaattgatgctacgagatgaaagattttatccttccttcagacagaatgcactttatgtgcgcatgttagctgagcttgacatgttaaaagatcctagtttcagaggatccgatgatggggatggagaatcttttaatgggtctcctacaggaagcataaatttgtctttagatgacctttcaaatgtttcttctgatgactcagtacaacttcatgcctacatttcagacacaggcgtttgtaatgatcatggcaagacatatgcattatatgccatcactgtacaccggcgcaacctaaacagtgaggagatgtggaaaacctatcgtcgttatagtgacttccatgacttccacatgagaatcactgaacagtttgaaagtctctcaagcatattgaaacttcctggaaaaaagacttttaataatatggatagagattttttagaaaagagaaaaaaggatctaaatgcatatttgcagttactgttagctcctgaaatgatgaaggcatcccccgctttagctcactatgtgtatgatttccttgagaacaaagcctacagtaaaggaaaaggggattttgctcgcaagatggacacttttgtaaatccacttcgcaattcaatgaggaatgtttcaaatgcagttaaatcccttcctgatagcttggcagagggaatgactaaaatgtcagacaacatgggcaaaatgtcagaaagattaggtcaagacataaagcaatcattttttaaggtgcctcctttaattcctaagactgattcagaccctgaacatcgccgagtttcggctcaacttgacgataatgtggatgacaatattccacttagggtaatgctgcttctcatggatgaagtattcgacttaaaagaaagaaatcagtggttgcgaaggaatatcaaaaacctacttcaacagcttattagagctacatatggcgatactattaatagaaaaatagttgaccatgttgactggatgacttcacctgaacaagtagccgactcagtgaaacgtttcagagatgcattttggccaaatggcattttagcagaggctgttccatgcagagataaaagtattcgaatgagaacaagagtagcaggaaaaacgaaattacttgcaattatgccagatgagctgaagcacattattggggctgagacaacacggaaaggtattcttcgtgtttttgaaatgtttcagcacaaccaattaaataggagaatggtttatgtcttcttggaaggctttttagaaaccttatttccacagtataaattccgtgaacttttcaacaaactgcattcacggtcaaagcagatgcagaaatataaacagaaacttcaaactactcaagcgccttctttgcagaaaaggtgacactccactctatgaagctggtgttcattttgtccaggactaatggtatggacagatcttctggggcttaactcaaatactgttgtgtctgcaccagtcttttagtgtctcaaaatagattattaatacatccataagtctgtggttcttctcattctcatctataatccaccactaccaagagagatttctgtgtcttaaatgatttggtgcatattttgcaacattgagagaaaactgcccccatctcaagcaagaatggcgttggtttcttccatttcaaactaatcagcattctccagcaatgacaaagtgccagagtgtatatatgaaagctaaggaaagcacaaaacaatggttcagagataaattggctaatttgtttaacagttggagactgtgcaatgtacgacttggaggagtttgtttggcataatgattttgtaggtctgtcagcattttgatatattgtggattagccaggtgaatgatccttgaaacatctctttcaggtctggagaaagagacagaatgcccttaaagtgtgaaataaccttatacctgaattacagttttgtgatataaaataaagctgagtataaaataaaaccaatcaaacacaga

SEQ ID NO: 421438 - DNA, 3889 bp, Homo sapiens
atccagtgccatcacagtggaggtagcaacagggttgcttgtgtcacccctctcccagctccacacaactcagcagagagactgactctgtttgggagaatgtaagggaagaaagcaagagtttctgcctgagagaagagagcatggaggcagagcagaaacttcgttagcaggcattctgtcctttggttaaaagataaaagtggccaagatgtggaaaaaggataataaaacacaaaggaataagagttgtataactctgagggacgtaaaagaaggagattcttctctatgctccttgacggcatgagtgggacaaatgcttcctttgtgtactacctcacagtgcaaggcgaatggatttatattgggagctagtttcaagatgaaatactaattctaagccagtctatccatatggggatggggaagccttggcattgtcctttttctgataacctttggaccctttgtaatattttatttgacattttatatcctctgctttgtgggtgggggtttagtggttactctcctgtttggaaaaacaaactcagagaagtacctagaacagtgtgaacactcatttcttcctccaacatcacctggggttcctaagtgcttagaagaaatgaaacgggaagccaggactattaagattgatagaagattgacgggtgccaatataattgatgaacctctccagcaagttatccagttttccttgagggattatgtccagtattggtattatacactaagcgatgatgaatcttttcttcttgaaattaggcagactcttcaaaacgcactcattcagtttgctactaggtcaaaagaaatagactggcaaccttattttactacacgcattgtagatgactttggcacacacttacgagtattcagaaaggctcaacagaaaataacagagaaagatgatcaagtgaaaggtacagcagaagatcttgtagataccttctttgaagttgaagttgaaatggagaaggaggtttgccgtgatctagtgtgcacttcccccaaagatgaagaaggattcctaagggatttgtgtgaggtcttactatatttattgctacctcctggagatttccagaacaagatcatgcgatactttgtcagggaaatccttgcacgaggaattcttcttccattaataaatcaactcagtgatcctgattatattaatcagtatgtcatatggatgatccgtgattctaactgcaactatgaggcctttatgaacattattaaattgagtgacaatattggagagctagaagcagtcagagataaggcagcagaagaattacagtatcttagatctctagatacagctggtgatgatatcaacactatcaaaaatcaaataaatagcttactattcgtaaagaaggtatgtgactcaagaatacagcgattgcagtcaggcaaagaaataaatactgtgaaacttgcagcaaactttgggaaactttgcacagtccccctggacagcattcttgtagacaatgttgcactacaattttttatggattacatgcagcaaactggaggtcaagcacatctattcttttggatgacagtggaaggataccgggttaccgcccaacagcagctagaagttttattaagtcgtcagagagatggaaaacatcaaaccaaccaaaccaaaggtcttttaagagcagctgctgttggaatttatgaacagtatttatcagaaaaggcatctccaagagttactgttgatgactatttagtagcaaaattagcagatactttgaatcatgaagatccaacccctgaaatctttgatgacattcaaagaaaggtatatgaattgatgctacgagatgaaagattttatccttccttcagacagaatgcactttatgtgcgcatgttagctgagcttgacatgttaaaagatcctagtttcagaggatccgatgatggggatggagaatcttttaatgggtctcctacaggaagcataaatttgtctttagatgacctttcaaatgtttcttctgatgactcagtacaacttcatgcctacatttcagacacaggcgtttgtaatgatcatggcaagacatatgcattatatgccatcactgtacaccggcgcaacctaaacagtgaggagatgtggaaaacctatcgtcgttatagtgacttccatgacttccacatgagaatcactgaacagtttgaaagtctctcaagcatattgaaacttcctggaaaaaagacttttaataatatggatagagattttttagaaaagagaaaaaaggatctaaatgcatatttgcagttactgttagctcctgaaatgatgaaggcatcccccgctttagctcactatgtgtatgatttccttgagaacaaagcctacagtaaaggaaaaggggattttgctcgcaagatggacacttttgtaaatccacttcgcaattcaatgaggaatgtttcaaatgcagttaaatcccttcctgatagcttggcagagggaatgactaaaatgtcagacaacatgggcaaaatgtcagaaagattaggtcaagacataaagcaatcattttttaaggtgcctcctttaattcctaagactgattcagaccctgaacatcgccgagtttcggctcaacttgacgataatgtggatgacaatattccacttagggtaatgctgcttctcatggatgaagtattcgacttaaaagaaagaaatcagtggttgcgaaggaatatcaaaaacctacttcaacagcttattagagctacatatggcgatactattaatagaaaaatagttgaccatgttgactggatgacttcacctgaacaagtagccgactcagtgaaacgtttcagagatgcattttggccaaatggcattttagcagaggctgttccatgcagagataaaagtattcgaatgagaacaagagtagcaggaaaaacgaaattacttgcaattatgccagatgagctgaagcacattattggggctgagacaacacggaaaggtattcttcgtgtttttgaaatgtttcagcacaaccaattaaataggagaatggtttatgtcttcttggaaggctttttagaaaccttatttccacagtataaattccgtgaacttttcaacaaactgcattcacggtcaaagcagatgcagaaatataaacagaaacttcaaactactcaagcgccttctttgcagaaaaggtgacactccactctatgaagctggtgttcattttgtccaggactaatggtatggacagatcttctggggcttaactcaaatactgttgtgtctgcaccagtcttttagtgtctcaaaatagattattaatacatccataagtctgtggttcttctcattctcatctataatccaccactaccaagagagatttctgtgtcttaaatgatttggtgcatattttgcaacattgagagaaaactgcccccatctcaagcaagaatggcgttggtttcttccatttcaaactaatcagcattctccagcaatgacaaagtgccagagtgtatatatgaaagctaaggaaagcacaaaacaatggttcagagataaattggctaatttgtttaacagttggagactgtgcaatgtacgacttggaggagtttgtttggcataatgattttgtaggtctgtcagcattttgatatattgtggattagccaggtgaatgatccttgaaacatctctttcaggtctggagaaagagacagaatgcccttaaagtgtgaaataaccttatacctgaattacagttttgtgatataaaataaagctgagtataaaataaaaccaatcaaacacaga

SEQ ID NO: 421439 - DNA, 6097 bp, Homo sapiens
caatatatttactgaaaaaaatccacatataagtggacctgagcagttcagactctttgttcaagggtcaatttatattacagtaacttagaatgtaacacatagatatactgatgtgcaatacttttatgtaagttgagctctcttaaatcagcagaatagaagagcatactctttttttcctttgttatagcctgctgagatgatggaggtgttttcttgaaagaagaattacagctatgtttttatatgtgtgaataacttttaagtatggaaagctaattaacgtgtggtagaattacagagtacctggtccatctaaaactattttgggaaaaaagacttgtaacgaaatttttttatgattcaaaaaactggttaaaacagcaaaattaaaaaaaattaagttgattaatgaatagttactacttggagaataatgaaggaatttttaatgaatactgatgtgtactaattactaaaataagccattgtaaccagggaactggttatttctgcctttttaaatgtatcttatatatcaagaggaagtgtagactttatattttctaatgttatgatagctactttttctacttttaggattcctaagggatttgtgtgaggtcttactatatttattgctacctcctggagatttccagaacaagatcatgcgatactttgtcagggaaatccttgcacgaggaattcttcttccattaataaatcaactcagtgatcctgattatattaatcagtatgtcatatggatgatccgtgattctaactgcaactatgaggcctttatgaacattattaaattgagtgacaatattggagagctagaagcagtcagagataaggcagcagaagaattacagtatcttagatctctagatacagctggtgatgatatcaacactatcaaaaatcaaataaatagcttactattcgtaaagaaggtatgtgactcaagaatacagcgattgcagtcaggcaaagaaataaatactgtgaaacttgcagcaaactttgggaaactttgcacagtccccctggacagcattcttgtagacaatgttgcactacaattttttatggattacatgcagcaaactggaggtcaagcacatctattcttttggatgacagtggaaggataccgggttaccgcccaacagcagctagaagttttattaagtcgtcagagagatggaaaacatcaaaccaaccaaaccaaaggtcttttaagagcagctgctgttggaatttatgaacagtatttatcagaaaaggcatctccaagagttactgttgatgactatttagtagcaaaattagcagatactttgaatcatgaagatccaacccctgaaatctttgatgacattcaaagaaaggtatatgaattgatgctacgagatgaaagattttatccttccttcagacagaatgcactttatgtgcgcatgttagctgagcttgacatgttaaaagatcctagtttcagaggatccgatgatggggatggagaatcttttaatgggtctcctacaggaagcataaatttgtctttagatgacctttcaaatgtttcttctgatgactcagtacaacttcatgcctacatttcagacacaggcgtttgtaatgatcatggcaagacatatgcattatatgccatcactgtacaccggcgcaacctaaacagtgaggagatgtggaaaacctatcgtcgttatagtgacttccatgacttccacatgagaatcactgaacagtttgaaagtctctcaagcatattgaaacttcctggaaaaaagacttttaataatatggatagagattttttagaaaagagaaaaaaggatctaaatgcatatttgcagttactgttagctcctgaaatgatgaaggcatcccccgctttagctcactatgtgtatgatttccttgagaacaaagcctacagtaaaggaaaaggggattttgctcgcaagatggacacttttgtaaatccacttcgcaattcaatgaggaatgtttcaaatgcagttaaatcccttcctgatagcttggcagagggaatgactaaaatgtcagacaacatgggcaaaatgtcagaaagattaggtcaagacataaagcaatcattttttaaggtgcctcctttaattcctaagactgattcagaccctgaacatcgccgagtttcggctcaacttgacgataatgtggatgacaatattccacttagggtaatgctgcttctcatggatgaagtattcgacttaaaagaaagaaatcagtggttgcgaaggaatatcaaaaacctacttcaacagcttattagagctacatatggcgatactattaatagaaaaatagttgaccatgttgactggatgacttcacctgaacaagtagccgactcagtgaaacgtttcagagatgcattttggccaaatggcattttagcagaggctgttccatgcagagataaaagtattcgaatgagaacaagagtagcaggaaaaacgaaattacttgcaattatgccagatgagctgaagcacattattggggctgagacaacacggaaaggtattcttcgtgtttttgaaatgtttcagcacaaccaattaaataggagaatggtttatgtcttcttggaaggctttttagaaaccttatttccacagtataaattccgtgaacttttcaacaaactgcattcacggtcaaagcagatgcagaaatataaacagaaacttcaaactactcaagcgccttctttgcagaaaaggtgacactccactctatgaagctggtgttcattttgtccaggactaatggtatggacagatcttctggggcttaactcaaatactgttgtgtctgcaccagtcttttagtgtctcaaaatagattattaatacatccataagtctgtggttcttctcattctcatctataatccaccactaccaagagagatttctgtgtcttaaatgatttggtgcatattttgcaacattgagagaaaactgcccccatctcaagcaagaatggcgttggtttcttccatttcaaactaatcagcattctccagcaatgacaaagtgccagagtgtatatatgaaagctaaggaaagcacaaaacaatggttcagagataaattggctaatttgtttaacagttggagactgtgcaatgtacgacttggaggagtttgtttggcataatgattttgtaggtctgtcagcattttgatatattgtggattagccaggtgaatgatccttgaaacatctctttcaggtctggagaaagagacagaatgcccttaaagtgtgaaataaccttatacctgaattacagttttgtgatataaaataaagctgagtataaaataaaaccaatcaaacacagaatttgattggatttgttattcattggtatacaacaatttttattcttatgtgtgctttaagggctgtgttttgctcttagggtactcaattttatgtttccttttggcattctttgtgcaaaaagaagcatgtggtggctctcatttaaatttcaaaattattagttttatctttaacagattactgattatacagaagatataatttattggaagaactgccaaatacattttgtccttctaaaaatatggaaatttaaatagtagtctggaaagttaccatatgataatttttaattgtgtgatctagacatgccttaggtaactgcagaaatagcaaattaaatgattaatgagcttattagtcatagtaaacatacagattcctaattctatgacagtgtacatatatgaaaataaatgatgaaaaaagaactataatatttttaaaaatatgcttttatttatatttcacataatgtaaagttctacaaaataaagctagtaggcaagacccctcagtgtatacctttaaacccataaattaattttatatcaataaaataaaatactttctctagttttggagcttctgtatttcctatagttttctgactgtccattttatccatcttagaagtattcacatcccttctatgcaggatttctgcatagttttaaatactttcattgcctaagggtttgggtgtgtcagctttttttgttttaaaaatatttaacactaaaaccttaaaataatgaagctacttatcagaccactgagccaagatcctgggtattaaaagaaagtctgggtgcttaagataaagggacagagtattggtatcccagttatttgggagctttaagattggaacaagatatcactgtcttgttttcacttagatcctacttacaaagtgagggttattaacagaataaagccttcctttaaagctttataataatcatatttattaataatgctgttgtgcatacttatagtatgcatatattcagcatatgttgcatgtcttcagaattacataaaatgaaatccctttcattgcaacttgcaagtgagaaaagatccttagtggctctggtggaagaaatagtatttcttcttctcagggtgtctccctgccttggcccctccctgagccccaggctttaaaagtgaaaatgtttgaaacatgaaacatgtctgtaggaagcatcagcatggccataagtgcagtgattttcatatatgcctctgcccatttcaaatatatttttgacatgaataaatctaacagtatacagaataattcatgtaagaccctaacgtgtacatgtgaaaaagcatttctatataatgtgaggagcactggccatcaattagggaaataaaggtcatgtaatattgcaaattttcaaaatagagccctgcaagataactgcaatcataccaaaaactatttgagtaaatggatttttaaagtaatttttgtttagaagagtttatatttcagaagcagaaaatgtcaaatgatagtctttgtaaatggtggtgcaccttctctatgcacatctgtcttttacatcagaaagagctgtggtcatgctaaaattagagataactttttgaatgacttggtcaagctgtgtgtaaaatatttaaccataagtcaagtacagtgtactatgtttaataaagttacatttaatgcatttattgcatatatgaatatatacatgaagaggctttatgtcttctggtatttgattttgaatgttttttaagtcagtggtgcctttaggcaagaactttcgaaattaatcattctttgtgttttctgatttttcaggtaacatgtacactatttagaaaccatcatagtttattcaccttaaaaaattgattgtattatttaaatatatcacttagatgggcatttcctataattaggatattccaaatagttgctgaaatcaattgtgccattgaccaatggatgcacttggttagccttaatttttttaaaaaaaaaaaaacaaaaactttcttgaatatttcagtttgttcattttaagtttgtgctgctggtatttgggaagaaaaatcaatcagttaagtgctaccagaaagtgtaccaatttttataaaaattaagaatgatataaatttcacaatctaaaattttaattttgtgcaatattttcatttaatgcatgtgtatttgagtaattgtaagataaatgaatttttaattttttgagatgtagcttaaactgtcttcttaatccaacaacttacattccgttgttgctgcatccttttatttaaggacttgttttaaaagtctttttgtcactccttggaaaattcttttattagtagtaaattttgcttttaggagcatggctcctgtattacaagggaaaaaatatgaagagcacattttaggattataattgttaaaagataatgtgtgcatatcattgtacagtaagtgtcaactgtgtgcctaactgttctatcaatactttctttctttaacaaagaagaaacaacaatcagaatgtcagttatttttattcaactaaaaggattaaaaaatttatttggtttgtgttctgtccattagaaaatactaataaagtattaacaaaca

SEQ ID NO: 421440 - DNA, 1322 bp, Homo sapiens
agcgggctcttccaagatggcggcgcgtccgtcgcgagcgaccgggccgaggggaggccagcgaagccgagtaaaaccgccgcccgggagaagactgaaggagcagttgccgccgttggcggcggcccgagcagttttcgctgctgctacggctgttgccatgaggcgaggctagggaggacctcacttccccggggtgtaataatgttaactgaggccagtctatccatatggggatggggaagccttggcattgtcctttttctgataacctttggaccctttgtaatattttatttgacattttatatcctctgctttgtgggtgggggtttagtggttactctcctgtttggaaaaacaaactcagagaagtacctagaacagtgtgaacactcatttcttcctccaacatcacctggggttcctaagtgcttagaagaaatgaaacgggaagccaggactattaagattgatagaagattgacgggtgccaatataattgatgaacctctccagcaagttatccagttttccttgagggattatgtccagtattggtattatacactaagcgatgatgaatcttttcttcttgaaattaggcagactcttcaaaacgcactcattcagtttgctactaggtcaaaagaaatagactggcaaccttattttactacacgcattgtagatgactttggcacacacttacgagtattcagaaaggctcaacagaaaataacagagaaagatgatcaagtgaaaggtacagcagaagatcttgtagataccttctttgaagttgaagttgaaatggagaaggaggtttgccgtgatctagtgtgcacttcccccaaagatgaagaaggttttcttttaatttaacttttttgacaatagtagctggctagagtcaagttagcagaaccagtgaaaaaatctaagggtaaaattattcttacttagggcaggtagcatagtaaagatgctattcattttattttattttgtaactcttaaaagtagtttccagattctgttttcttctttaaaggtcatctttaataattaactggtcctggctgggtgcagtggctcatgcctgtaatcccatcattttgggaggccgaagggcctggattgcttgagtccaggagttcaagaccagcctaggcaacatggcgaaaccctgtctctactaaaagtacgaaacatcagctggctgaggtgggagaatcaccggagcctgggaagtcaaggctgcagtgacctgtgatcatgctattgcactccagcctgagtgacgagagtgagaccctgtc

SEQ ID NO: 421441 - DNA, 3586 bp, Homo sapiens
atcacgcgggacggggtgtcttaagttggtaattcagactggtcgttaggcttgatcgatttatagcctcagaggctcggggtggtctgggggcccctccgctgcagtctgcccgatccctgccgggccccgccccctgcctcaagcacttcccgctcgacctgcgcacgtctatggatggcaaatgcaaggagatcgccgaggtatcacctggcaccacccgcaccctcaccccgtgtctccatgccctgcctctgctccccacacccctcacctcaagctgtcccctcacctcacgcttggctgtctcctgatcctcagcctctcccaggtacccctggtcctgctgccctcaccccatccccagactctgtaggagagtgcccgagggcggagggccagccatgctgaccttccttccctccccccaggagctgttcacccgctcactggctgagagcgagctccgtagtgccccgtatgagttccccgaggagagccccattgaacagctggaggagcggcggcagcggctggagcggcagatcagccaggatgtcaagctggagccagacatcctgcttcgggccaagcaagatttcctgaagacggacagtgactcggacctacagctctacaaggaacagggtgaggggcagggtgaccggagcctgcgggagcgtgatgtgctggaacgggagtttcagcgggtcaccatctctggggaggagaagtgtggggtgccgttcacagacctgctggatgcagccaagagtgtggtgcgggcgctcttcatccgggagaagtacatggccctgtccctgcagagcttctgccccaccacccgccgctacctgcagcagctggctgaaaagcctctggagacccggacctatgaacagggccccgacacccctgtgtctgctgatgccccggtgcacccccctgcgctggagcagcacccgtatgagcactgtgagccaagcaccatgcctggggacctgggcttgggtctgcgcatggtgcggggtgtggtgcacgtctacacccgcagggaacccgacgagcattgctcagaggtggagctgccataccctgacctgcaggaatttgtggctgacgtcaatgtgctgatggccctgattatcaatggccccataaagtcattctgctaccgccggctgcagtacctgagctccaagttccagatgcatgtgctactcaatgagatgaaggagctggccgcccagaagaaagtgccacaccgagatttctacaacatccgcaaggtggacacccacatccatgcctcgtcctgcatgaaccagaagcatctgctgcgcttcatcaagcgggcaatgaagcggcacctggaggagatcgtgcacgtggagcagggccgtgaacagacgctgcgggaggtctttgagagcatgaatctcacggcctacgacctgagtgtggacacgctggatgtgcacgcggacaggaacactttccatcgctttgacaagtttaatgccaaatacaaccctattggggagtccgtcctccgagagatcttcatcaagacggacaacagggtatctgggaagtactttgctcacatcatcaaggaggtgatgtcagacctggaggagagcaaataccagaatgcagagctgcggctctccatttacgggcgctcgagggatgagtgggacaagctggcgcgctgggccgtcatgcaccgcgtgcactcccccaacgtgcgctggctggtgcaggtgccccgcctctttgatgtgtaccgtaccaagggccagctggccaacttccaggagatgctggagaacatcttcctgccactgttcgaggccactgtgcaccctgccagccacccggaactgcatctcttcttagagcacgtggatggttttgacagcgtggatgatgagtccaagcctgaaaaccatgtcttcaacctggagagccccctgcctgaggcgtgggtggaggaggacaacccaccctatgcctactacctgtactacacctttgccaacatggccatgttgaaccacctgcgcaggcagaggggcttccacacgtttgtgctgaggccacactgtggggaggctgggcccatccaccacctggtgtcagccttcatgctggctgagaacatttcccacgggctccttctgcgcaaggcccccgtcctgcagtacctgtactacctggcccagatcggcatcgccatgtctccgctcagcaacaacagcctcttcctcagctatcaccggaatccgctaccggagtacctgtcccgcggcctcatggtctccctgtccactgatgatcccttgcagttccacttcaccaaggagccgctgatggaggagtacagcatcgccacccaggtgtggaagctcagctcctgcgatatgtgtgagctggcccgcaacagcgtgctcatgagcggcttctcgcacaaggtaaagagccactggctgggacccaactataccaaggaaggccctgaggggaatgacatccgccggaccaatgtgccagacatccgcgtgggctaccgctacgagaccctgtgccaggagctggcgctcatcacgcaggcagtccagagtgagatgctggagaccattccagaggaggcgggtatcaccatgagcccagggcctcaatgagcctggtccatgaagtgcccaccacatcgcagcacttttaccacgttttgtcctcagaccccgcccatgctgtgtggtctctgcatgtctccattcttctctgtctctgtcttgcatgtctcctaccatgtcactgtccctgggccacccagtgaaagcaaagcctgggaatctgctcattgttgtttgggctcaggtattgagcctgatggcccaggtattgagggcctcccctgctggtggccctgtcctgggatcctcagaagcctgactgtcctatgggcttctccagtgtccacaggggcttgggatggttgtggggggctggcccctctagcctttccggtccttcctgggcaaatctaagccttggccagggccgaagtttaggcccctgtcttgttcatgtagccgaggggcaggcgggggacctctacacctctgctgtgggcacggggctgctgagggtctgtggaactccagcagctctgcactgggtagagctgggcctagagctcagtcacaggcctgggcttcctggcctgagtgggtagacgcaggcggcagaggtgctggaccacatctccgccaagtcactgcccagcagccttctccgtcctgtccccagcccacgtgctccttgggtgtcagcttcctgtgcctctgtgggagagggcagctgccttgtgttatgtctggggccacagttgctgcaaagtcctggatctgccactcaaccccgggagtggtgttcccagtgtggctcccagagctttgaccagattgtgatcccagctggcccctatgttgtgttctggactgaggcctttgctgtgaactgcagtgtttcatacgaaccatctttcctagtgcatgagaaataaagattatttaagtaa

SEQ ID NO: 421442 - DNA, 3669 bp, Homo sapiens
atcacgcgggacggggtgtcttaagttggtaattcagactggtcgttaggcttgatcgatttatagcctcagaggctcggggtggtctgggggcccctccgctgcagtctgcccgatccctgccgggccccgccccctgcctcaagcacttcccgctcgacctgcgcacgtctatggatggcaaatgcaaggagatcgccgaggtatcacctggcaccacccgcaccctcaccccgtgtctccatgccctgcctctgctccccacacccctcacctcaagctgtcccctcacctcacgcttggctgtctcctgatcctcagcctctcccaggtacccctggtcctgctgccctcaccccatccccagactctgtaggagagtgcccgagggcggagggccagccatgctgaccttccttccctccccccaggagctgttcacccgctcactggctgagagcgagctccgtagtgccccgtatgagttccccgaggagagccccattgaacagctggaggagcggcggcagcggctggagcggcagatcagccaggatgtcaagctggagccagacatcctgcttcgggccaagcaagatttcctgaagacggacagtgactcggacctacagctctacaaggaacagggtgaggggcagggtgaccggagcctgcgggagcgtgatgtgctggaacgggagtttcagcgggtcaccatctctggggaggagaagtgtggggtgccgttcacagacctgctggatgcagccaagagtgtggtgcgggcgctcttcatccgggagaagtacatggccctgtccctgcagagcttctgccccaccacccgccgctacctgcagcagctggctgaaaagcctctggagacccggacctatgaacagggccccgacacccctgtgtctgctgatgccccggtgcacccccctgcgctggagcagcacccgtatgagcactgtgagccaagcaccatgcctggggacctgggcttgggtctgcgcatggtgcggggtgtggtgcacgtctacacccgcagggaacccgacgagcattgctcagaggtggagctgccataccctgacctgcaggaatttgtggctgacgtcaatgtgctgatggccctgattatcaatggccccataaagtcattctgctaccgccggctgcagtacctgagctccaagttccagatgcatgtgctactcaatgagatgaaggagctggccgcccagaagaaagtgccacaccgagatttctacaacatccgcaaggtggacacccacatccatgcctcgtcctgcatgaaccagaagcatctgctgcgcttcatcaagcgggcaatgaagcggcacctggaggagatcgtgcacgtggagcagggccgtgaacagacgctgcgggaggtctttgagagcatgaatctcacggcctacgacctgagtgtggacacgctggatgtgcacgcggacaggaacactttccatcgctttgacaagtttaatgccaaatacaaccctattggggagtccgtcctccgagagatcttcatcaagacggacaacagggtatctgggaagtactttgctcacatcatcaaggaggtgatgtcagacctggaggagagcaaataccagaatgcagagctgcggctctccatttacgggcgctcgagggatgagtgggacaagctggcgcgctgggccgtcatgcaccgcgtgcactcccccaacgtgcgctggctggtgcaggtgccccgcctctttgatgtgtaccgtaccaagggccagctggccaacttccaggagatgctggagaacatcttcctgccactgttcgaggccactgtgcaccctgccagccacccggaactgcatctcttcttagagcacgtggatggttttgacagcgtggatgatgagtccaagcctgaaaaccatgtcttcaacctggagagccccctgcctgaggcgtgggtggaggaggacaacccaccctatgcctactacctgtactacacctttgccaacatggccatgttgaaccacctgcgcaggcagaggggcttccacacgtttgtgctgaggccacactgtggggaggctgggcccatccaccacctggtgtcagccttcatgctggctgagaacatttcccacgggctccttctgcgcaaggcccccgtcctgcagtacctgtactacctggcccagatcggcatcgccatgtctccgctcagcaacaacagcctcttcctcagctatcaccggaatccgctaccggagtacctgtcccgcggcctcatggtctccctgtccactgatgatcccttgcagttccacttcaccaaggagccgctgatggaggagtacagcatcgccacccaggtgtggaagctcagctcctgcgatatgtgtgagctggcccgcaacagcgtgctcatgagcggcttctcgcacaaggtaaagagccactggctgggacccaactataccaaggaaggccctgaggggaatgacatccgccggaccaatgtgccagacatccgcgtgggctaccgctacgagaccctgtgccaggagctggcgctcatcacgcaggcagtccagagtgagatgctggagaccattccagaggaggcgggtatcaccatgagcccagggcctcaatgagcctggtccatgaagtgcccaccacatcgcagcacttttaccacgttttgtcctcagaccccgcccatgctgtgtggtctctgcatgtctccattcttctctgtctctgtcttgcatgtctcctaccatgtcactgtccctgggccacccagtgaaagcaaagcctgggaatctgctcattgttgtttgggctcaggtattgagcctgatggcccaggtattgagggcctcccctgctggtggccctgtcctgggatcctcagaagcctgactgtcctatgggcttctccagtgtccacaggggcttgggatggttgtggggggctggcccctctagcctttccggtccttcctgggcaaatctaagccttggccagggccgaagtttaggcccctgtcttgttcatgtagccgaggggcaggcgggggacctctacacctctgctgtgggcacggggctgctgagggtctgtggaactccagcagctctgcactgggtagagctgggcctagagctcagtcacaggcctgggcttcctggcctgagtgggtagacgcaggcggcagaggtgctggaccacatctccgccaagtcactgcccagcagccttctccgtcctgtccccagcccacgtgctccttgggtgtcagcttcctgtgcctctgtgggagagggcagctgccttgtgttatgtctggggccacagttgctgcaaagtcctggatctgccactcaaccccgggagtggtgttcccagtgtggctcccagagctttgaccagattgtgatcccagctggcccctatgttgtgttctggactgaggcctttgctgtgaactgcagtgtttcatacgaaccatctttcctagtgcatgagaaataaagattatttaagtaatgaggcaggtggggtttctgttgggagagggaacgccgtggtgggaggtggctgtggatggaggcaccgtgcattctgagggg

SEQ ID NO: 421443 - DNA, 3729 bp, Homo sapiens
  misc_feature (1119)..(1119): n is a, c, g, or t
atcacgcgggacggggtgtcttaagttggtaattcagactggtcgttaggcttgatcgatttatagcctcagaggctcggggtggtctgggggcccctccgctgcagtctgcccgatccctgccgggccccgccccctgcctcaagcacttcccgctcgacctgcgcacgtctatggatggcaaatgcaaggagatcgccgaggagctgttcacccgctcactggctgagagcgagctccgtagtgccccgtatgagttccccgaggagagccccattgaacagctggaggagcggcggcagcggctggagcggcagatcagccaggatgtcaagctggagccagacatcctgcttcgggccaagcaagatttcctgaagacggacagtgactcggacctacagctctacaaggaacagggtgaggggcagggtgaccggagcctgcgggagcgtgatgtgctggaacgggagtttcagcgggtcaccatctctggggaggagaagtgtggggtgccgttcacagacctgctggatgcagccaagagtgtggtgcgggcgctcttcatccgggagaagtacatggccctgtccctgcagagcttctgccccaccacccgccgctacctgcagcagctggctgaaaagcctctggagacccggacctatgaacagggccccgacacccctgtgtctgctggtggactccccatctctgccccatgccatgtgccctagcctcctggcttctcagcctggtgcctggcacctctgccctgcctgcctctccctacaacccaggctcattccaacctcttggggtacaggggtggaggttgggcaggagctgtctgacctactgggtcttcaacatctcttgccctctgtggggcctttgggttgggcagtgggtggcttggaagagccctgctctgactttaccctcctcacccctgcagatgccccggtgcacccccctgcgctggagcagcacccgtatgagcactgtgagccaagcaccatgcctggggacctgggcttgggtctgcgcatggtgcggggtgtggtgcacgtctacacccgcagggaacccgacgagcagtaagaggggtgtggtgcntgttggggggatgcagcgtgggaggttgcgttggcttgggagaggccacagggctcggcttgctctcctcacccaagctcccctccatgccagttgctcagaggtggagctgccataccctgacctgcaggaatttgtggctgacgtcaatgtgctgatggccctgattatcaatggccccataaagtcattctgctaccgccggctgcagtacctgagctccaagttccagatgcatgtgctactcaatgagatgaaggagctggccgcccagaagaaagtgccacaccgagatttctacaacatccgcaaggtggacacccacatccatgcctcgtcctgcatgaaccagaagcatctgctgcgcttcatcaagcgggcaatgaagcggcacctggaggagatcgtgcacgtggagcagggccgtgaacagacgctgcgggaggtctttgagagcatgaatctcacggcctacgacctgagtgtggacacgctggatgtgcacgcggacaggaacactttccatcgctttgacaagtttaatgccaaatacaaccctattggggagtccgtcctccgagagatcttcatcaagacggacaacagggtatctgggaagtactttgctcacatcatcaaggaggtgatgtcagacctggaggagagcaaataccagaatgcagagctgcggctctccatttacgggcgctcgagggatgagtgggacaagctggcgcgctgggccgtcatgcaccgcgtgcactcccccaacgtgcgctggctggtgcaggtgccccgcctctttgatgtgtaccgtaccaagggccagctggccaacttccaggagatgctggagaacatcttcctgccactgttcgaggccactgtgcaccctgccagccacccggaactgcatctcttcttagagcacgtggatggttttgacagcgtggatgatgagtccaagcctgaaaaccatgtcttcaacctggagagccccctgcctgaggcgtgggtggaggaggacaacccaccctatgcctactacctgtactacacctttgccaacatggccatgttgaaccacctgcgcaggcagaggggcttccacacgtttgtgctgaggccacactgtggggaggctgggcccatccaccacctggtgtcagccttcatgctggctgagaacatttcccacgggctccttctgcgcaaggcccccgtcctgcagtacctgtactacctggcccagatcggcatcgccatgtctccgctcagcaacaacagcctcttcctcagctatcaccggaatccgctaccggagtacctgtcccgcggcctcatggtctccctgtccactgatgatcccttgcagttccacttcaccaaggagccgctgatggaggagtacagcatcgccacccaggtgtggaagctcagctcctgcgatatgtgtgagctggcccgcaacagcgtgctcatgagcggcttctcgcacaaggtaaagagccactggctgggacccaactataccaaggaaggccctgaggggaatgacatccgccggaccaatgtgccagacatccgcgtgggctaccgctacgagaccctgtgccaggagctggcgctcatcacgcaggcagtccagagtgagatgctggagaccattccagaggaggcgggtatcaccatgagcccagggcctcaatgagcctggtccatgaagtgcccaccacatcgcagcacttttaccacgttttgtcctcagaccccgcccatgctgtgtggtctctgcatgtctccattcttctctgtctctgtcttgcatgtctcctaccatgtcactgtccctgggccacccagtgaaagcaaagcctgggaatctgctcattgttgtttgggctcaggtattgagcctgatggcccaggtattgagggcctcccctgctggtggccctgtcctgggatcctcagaagcctgactgtcctatgggcttctccagtgtccacaggggcttgggatggttgtggggggctggcccctctagcctttccggtccttcctgggcaaatctaagccttggccagggccgaagtttaggcccctgtcttgttcatgtagccgaggggcaggcgggggacctctacacctctgctgtgggcacggggctgctgagggtctgtggaactccagcagctctgcactgggtagagctgggcctagagctcagtcacaggcctgggcttcctggcctgagtgggtagacgcaggcggcagaggtgctggaccacatctccgccaagtcactgcccagcagccttctccgtcctgtccccagcccacgtgctccttgggtgtcagcttcctgtgcctctgtgggagagggcagctgccttgtgttatgtctggggccacagttgctgcaaagtcctggatctgccactcaaccccgggagtggtgttcccagtgtggctcccagagctttgaccagattgtgatcccagctggcccctatgttgtgttctggactgaggcctttgctgtgaactgcagtgtttcatacgaaccatctttcctagtgcatgagaaataaagattatttaagtaa

SEQ ID NO: 421444 - DNA, 3465 bp, Homo sapiens
atcacgcgggacggggtgtcttaagttggtaattcagactggtcgttaggcttgatcgatttatagcctcagaggctcggggtggtctgggggcccctccgctgcagtctgcccgatccctgccgggccccgccccctgcctcaagcacttcccgctcgacctgcgcacgtctatggatggcaaatgcaaggagatcgccgaggtatcacctggcaccacccgcaccctcaccccgtgtctccatgccctgcctctgctccccacacccctcacctcaagctgtcccctcacctcacgcttggctgtctcctgatcctcagcctctcccaggtacccctggtcctgctgccctcaccccatccccagactctgtaggagagtgcccgagggcggagggccagccatgctgaccttccttccctccccccaggagctgttcacccgctcactggctgagagcgagctccgtagtgccccgtatgagttccccgaggagagccccattgaacagctggaggagcggcggcagcggctggagcggcagatcagccaggatgtcaagctggagccagacatcctgcttcgggccaagcaagatttcctgaagacggacagtgactcggacctacagctctacaaggaacagggtgaggggcagggtgaccggagcctgcgggagcgtgatgtgctggaacgggagtttcagcgggtcaccatctctggggaggagaagtgtggggtgccgttcacagacctgctggatgcagccaagagtgtggtgcgggcgctcttcatccgggagaagtacatggccctgtccctgcagagcttctgccccaccacccgccgctacctgcagcagctggctgaaaagcctctggagacccggacctatgaacagggccccgacacccctgtgtctgctgatgccccggtgcacccccctgcgctggagcagcacccgtatgagcactgtgagccaagcaccatgcctggggacctgggcttgggtctgcgcatggtgcggggtgtggtgcacgtctacacccgcagggaacccgacgagcattgctcagaggtggagctgccataccctgacctgcaggaatttgtggctgacgtcaatgtgctgatggccctgattatcaatggccccataaagtcattctgctaccgccggctgcagtacctgagctccaagttccagatgcatgtgctactcaatgagatgaaggagctggccgcccagaagaaagtgccacaccgagatttctacaacatccgcaaggtggacacccacatccatgcctcgtcctgcatgaaccagaagcatctgctgcgcttcatcaagcgggcaatgaagcggcacctggaggagatcgtgcacgtggagcagggccgtgaacagacgctgcgggaggtctttgagagcatgaatctcacggcctacgacctgagtgtggacacgctggatgtgcacgcggacaggaacactttccatcgctttgacaagtttaatgccaaatacaaccctattggggagtccgtcctccgagagatcttcatcaagacggacaacagggtatctgggaagtactttgctcacatcatcaaggaggtgatgtcagacctggaggagagcaaataccagaatgcagagctgcggctctccatttacgggcgctcgagggatgagtgggacaagctggcgcgctgggccgtcatgcaccgcgtgcactcccccaacgtgcgctggctggtgcaggtgccccgcctctttgatgtgtaccgtaccaagggccagctggccaacttccaggagatgctggagaacatcttcctgccactgttcgaggccactgtgcaccctgccagccacccggaactgcatctcttcttagagcacgtggatggttttgacagcgtggatgatgagtccaagcctgaaaaccatgtcttcaacctggagagccccctgcctgaggcgtgggtggaggaggacaacccaccctatgcctactacctgtactacacctttgccaacatggccatgttgaaccacctgcgcaggcccccgtcctgcagtacctgtactacctggcccagatcggcatcgccatgtctccgctcagcaacaacagcctcttcctcagctatcaccggaatccgctaccggagtacctgtcccgcggcctcatggtctccctgtccactgatgatcccttgcagttccacttcaccaaggagccgctgatggaggagtacagcatcgccacccaggtgtggaagctcagctcctgcgatatgtgtgagctggcccgcaacagcgtgctcatgagcggcttctcgcacaaggtaaagagccactggctgggacccaactataccaaggaaggccctgaggggaatgacatccgccggaccaatgtgccagacatccgcgtgggctaccgctacgagaccctgtgccaggagctggcgctcatcacgcaggcagtccagagtgagatgctggagaccattccagaggaggcgggtatcaccatgagcccagggcctcaatgagcctggtccatgaagtgcccaccacatcgcagcacttttaccacgttttgtcctcagaccccgcccatgctgtgtggtctctgcatgtctccattcttctctgtctctgtcttgcatgtctcctaccatgtcactgtccctgggccacccagtgaaagcaaagcctgggaatctgctcattgttgtttgggctcaggtattgagcctgatggcccaggtattgagggcctcccctgctggtggccctgtcctgggatcctcagaagcctgactgtcctatgggcttctccagtgtccacaggggcttgggatggttgtggggggctggcccctctagcctttccggtccttcctgggcaaatctaagccttggccagggccgaagtttaggcccctgtcttgttcatgtagccgaggggcaggcgggggacctctacacctctgctgtgggcacggggctgctgagggtctgtggaactccagcagctctgcactgggtagagctgggcctagagctcagtcacaggcctgggcttcctggcctgagtgggtagacgcaggcggcagaggtgctggaccacatctccgccaagtcactgcccagcagccttctccgtcctgtccccagcccacgtgctccttgggtgtcagcttcctgtgcctctgtgggagagggcagctgccttgtgttatgtctggggccacagttgctgcaaagtcctggatctgccactcaaccccgggagtggtgttcccagtgtggctcccagagctttgaccagattgtgatcccagctggcccctatgttgtgttctggactgaggcctttgctgtgaactgcagtgtttcatacgaaccatctttcctagtgcatgagaaataaagattatttaagtaa

SEQ ID NO: 421445 - DNA, 3638 bp, Homo sapiens
atcacgcgggacggggtgtcttaagttggtaattcagactggtcgttaggcttgatcgatttatagcctcagaggctcggggtggtctgggggcccctccgctgcagtctgcccgatccctgccgggccccgccccctgcctcaagcacttcccgctcgacctgcgcacgtctatggatggcaaatgcaaggagatcgccgaggtatcacctggcaccacccgcaccctcaccccgtgtctccatgccctgcctctgctccccacacccctcacctcaagctgtcccctcacctcacgcttggctgtctcctgatcctcagcctctcccaggtacccctggtcctgctgccctcaccccatccccagactctgtaggagagtgcccgagggcggagggccagccatgctgaccttccttccctccccccaggagctgttcacccgctcactggctgagagcgagctccgtagtgccccgtatgagttccccgaggagagccccattgaacagctggaggagcggcggcagcggctggagcggcagatcagccaggatgtcaagctggagccagacatcctgcttcgggccaagcaagatttcctgaagacggacagtgactcggacctacagctctacaaggaacagggtgaggggcagggtgaccggagcctgcgggagcgtgatgtgctggaacgggagtttcagcgggtcaccatctctggggaggagaagtgtggggtgccgttcacagacctgctggatgcagccaagagtgtggtgcgggcgctcttcatccgggagaagtacatggccctgtccctgcagagcttctgccccaccacccgccgctacctgcagcagctggctgaaaagcctctggagacccggacctatgaacagggccccgacacccctgtgtctgctgatgccccggtgcacccccctgcgctggagcagcacccgtatgagcactgtgagccaagcaccatgcctggggacctgggcttgggtctgcgcatggtgcggggtgtggtgcacgtctacacccgcagggaacccgacgagcattgctcagaggtggagctgccataccctgacctgcaggaatttgtggctgacgtcaatgtgctgatggccctgattatcaatggccccataaagtcattctgctaccgccggctgcagtacctgagctccaagttccagatgcatgtgctactcaatgagatgaaggagctggccgcccagaagaaagtgccacaccgagatttctacaacatccgcaaggtggacacccacatccatgcctcgtcctgcatgaaccagaagcatctgctgcgcttcatcaagcgggcaatgaagcggcacctggaggagatcgtgcacgtggagcagggccgtgaacagacgctgcgggaggtctttgagagcatgaatctcacggcctacgacctgagtgtggacacgctggatgtgcacgcggacaggaacactttccatcgctttgacaagtttaatgccaaatacaaccctattggggagtccgtcctccgagagatcttcatcaagacggacaacagggtatctgggaagtactttgctcacatcatcaaggaggtgatgtcagacctggaggagagcaaataccagaatgcagagctgcggctctccatttacgggcgctcgagggatgagtgggacaagctggcgcgctgggccgtcatgcaccgcgtgcactcccccaacgtgcgctggctggtgcaggtgccccgcctctttgatgtgtaccgtaccaagggccagctggccaacttccaggagatgctggagaacatcttcctgccactgttcgaggccactgtgcaccctgccagccacccggaactgcatctcttcttagagcacgtggatggttttgacagcgtggatgatgagtccaagcctgaaaaccatgtcttcaacctggagagccccctgcctgaggcgtgggtggaggaggacaacccaccctatgcctactacctgtactacacctttgccaacatggccatgttgaaccacctgcgcaggcagaggggcttccacacgtttgtgctgaggccacactgtggggaggctgggcccatccaccacctggtgtcagccttcatgctggctgagaacatttcccacgggctccttctgcgcaaggcccccgtcctgcagtacctgtactacctggcccagatcggcatcgccatgtctccgctcagcaacaacagcctcttcctcagctatcaccggaatccgctaccggagtacctgtcccgcggcctcatggtctccctgtccactgatgatcccttgcagttccacttcaccaaggagccgctgatggaggagtacagcatcgccacccaggtgtggaagctcagctcctgcgatatgtgtgagctggcccgcaacagcgtgctcatgagcggcttctcgcacaaggtaaagagccactggctgggacccaactataccaaggaaggccctgaggggaatgacatccgccggaccaatgtgccagacatccgcgtgggctaccgctacgagaccctgtgccaggagctggcgctcatcacgcaggcagtccagagtgagatgctggagaccattccagaggaggcgggtatcaccatgagcccagggcctcaatgagcctggtccatgaagtgcccaccacatcgcagcacttttaccacgttttgtcctcagaccccgcccatgctgtgtggtctctgcatgtctccattcttctctgtctctgtcttgcatgtctcctaccatgtcactgtccctgggccacccagtgaaagcaaagcctgggaatctgctcattgttgtttgggctcaggtattgagcctgatggcccaggtattgagggcctcccctgctggtggccctgtcctgggatcctcagaagcctgactgtcctatgggcttctccagtgtccacaggggcttgggatggttgtggggggctggcccctctagcctttccggtccttcctgggcaaatctaagccttggccagggccgaagtttaggcccctgtcttgttcatgtagccgaggggcaggcgggggacctctacacctctgctgtgggcacggggctgctgagggtctgtggaactccagcagctctgcactgggtagagctgggcctagagctcagtcacaggcctgggcttcctggcctgagtgggtagacgcaggcggcagaggtgctggaccacatctccgccaagtcactgcccagcagccttctccgtcctgtccccagcccacgtgctccttgggtgtcagcttcctgtgcctctgtgggagagggcagctgccttgtgttatgtctggggccacagttgctgcaaagtcctggatctgccactcaaccccgggagtggtgttcccagtgtggctcccagagctttgaccagattgtgatcccagctggcccctatgttgtgttctggactgaggcctttgctgtgaactgcagtgtttcatacgaaccatctttcctagtgcatgagaaataaagattatttaagtaaaaaaaaaaagaaaatggcctcgtggacctcagcggtggagctctgcagcaag

SEQ ID NO: 421446 - DNA, 3565 bp, Homo sapiens
atcacgcgggacggggtgtcttaagttggtaattcagactggtcgttaggcttgatcgatttatagcctcagaggctcggggtggtctgggggcccctccgctgcagtctgcccgatccctgccgggccccgccccctgcctcaagcacttcccgctcgacctgcgcacgtctatggatggcaaatgcaaggagatcgccgaggtatcacctggcaccacccgcaccctcaccccgtgtctccatgccctgcctctgctccccacacccctcacctcaagctgtcccctcacctcacgcttggctgtctcctgatcctcagcctctcccaggtacccctggtcctgctgccctcaccccatccccagactctgtaggagagtgcccgagggcggagggccagccatgctgaccttccttccctccccccaggagctgttcacccgctcactggctgagagcgagctccgtagtgccccgtatgagttccccgaggagagccccattgaacagctggaggagcggcggcagcggctggagcggcagatcagccaggatgtcaagctggagccagacatcctgcttcgggccaagcaagatttcctgaagacggacagtgactcggacctacagctctacaaggaacagggtgaggggcagggtgaccggagcctgcgggagcgtgatgtgctggaacgggagtttcagcgggtcaccatctctggggaggagaagtgtggggtgccgttcacagacctgctggatgcagccaagagtgtggtgcgggcgctcttcatccgggagaagtacatggccctgtccctgcagagcttctgccccaccacccgccgctacctgcagcagctggctgaaaagcctctggagacccggacctatgaacagggccccgacacccctgtgtctgctgatgccccggtgcacccccctgcgctggagcagcacccgtatgagcactgtgagccaagcaccatgcctggggacctgggcttgggtctgcgcatggtgcggggtgtggtgcacgtctacacccgcagggaacccgacgagcattgctcagaggtggagctgccataccctgacctgcaggaatttgtggctgacgtcaatgtgctgatggccctgattatcaatggccccataaagtcattctgctaccgccggctgcagtacctgagctccaagttccagatgcatgtgctactcaatgagatgaaggagctggccgcccagaagaaagtgccacaccgagatttctacaacatccgcaaggtggacacccacatccatgcctcgtcctgcatgaaccagaagcatctgctgcgcttcatcaagcgggcaatgaagcggcacctggaggagatcgtgcacgtggagcagggccgtgaacagacgctgcgggaggtctttgagagcatgaatctcacggcctacgacctgagtgtggacacgctggatgtgcacgcggacaggaacactttccatcgctttgacaagtttaatgccaaatacaaccctattggggagtccgtcctccgagagatcttcatcaagacggacaacagggtatctgggaagtactttgctcacatcatcaaggtaaggaggcagccttccctgccaagcctcgagcctgaggatctgggggcttttagggggtgagactcaaggagggtaggcagatgaccccctgaagagctctgactcagctcacctcatgtctgactcagctcacctcatgtctaggaggtgatgtcagacctggaggagagcaaataccagaatgcagagctgcggctctccatttacgggcgctcgagggatgagtgggacaagctggcgcgctgggccgtcatgcaccgcgtgcactcccccaacgtgcgctggctggtgcaggtgccccgcctcttgtgagtgtccctggagtgggaggggaactgatgtgtaccgtaccaagggccagctggccaacttccaggagatgctggagaacatcttcctgccactgttcgaggccactgtgcaccctgccagccacccggaactgcatctcttcttagagcacgtgagcaggcagcgcagagctgggtatggggagggcagccggcttcgcatccagctgcagctctggttctgaccccagggttctgtattgcccccgtcctgcagtacctgtactacctggcccagatcggcatcgccatgtctccgctcagcaacaacagcctcttcctcagctatcaccggaatccgctaccggagtacctgtcccgcggcctcatggtctccctgtccactgatgatcccttgcagttccacttcaccaaggagccgctgatggaggagtacagcatcgccacccaggtgtggaagctcagctcctgcgatatgtgtgagctggcccgcaacagcgtgctcatgagcggcttctcgcacaaggtaaagagccactggctgggacccaactataccaaggaaggccctgaggggaatgacatccgccggaccaatgtgccagacatccgcgtgggctaccgctacgagaccctgtgccaggagctggcgctcatcacgcaggcagtccagagtgagatgctggagaccattccagaggaggcgggtatcaccatgagcccagggcctcaatgagcctggtccatgaagtgcccaccacatcgcagcacttttaccacgttttgtcctcagaccccgcccatgctgtgtggtctctgcatgtctccattcttctctgtctctgtcttgcatgtctcctaccatgtcactgtccctgggccacccagtgaaagcaaagcctgggaatctgctcattgttgtttgggctcaggtattgagcctgatggcccaggtattgagggcctcccctgctggtggccctgtcctgggatcctcagaagcctgactgtcctatgggcttctccagtgtccacaggggcttgggatggttgtggggggctggcccctctagcctttccggtccttcctgggcaaatctaagccttggccagggccgaagtttaggcccctgtcttgttcatgtagccgaggggcaggcgggggacctctacacctctgctgtgggcacggggctgctgagggtctgtggaactccagcagctctgcactgggtagagctgggcctagagctcagtcacaggcctgggcttcctggcctgagtgggtagacgcaggcggcagaggtgctggaccacatctccgccaagtcactgcccagcagccttctccgtcctgtccccagcccacgtgctccttgggtgtcagcttcctgtgcctctgtgggagagggcagctgccttgtgttatgtctggggccacagttgctgcaaagtcctggatctgccactcaaccccgggagtggtgttcccagtgtggctcccagagctttgaccagattgtgatcccagctggcccctatgttgtgttctggactgaggcctttgctgtgaactgcagtgtttcatacgaaccatctttcctagtgcatgagaaataaagattatttaagtaa

SEQ ID NO: 421447 - DNA, 1428 bp, Homo sapiens
gttttgcgctccgctctgtgttgcgctccctgaggcccccgtcctgcagtacctgtactacctggcccagatcggcatcgccatgtctccgctcagcaacaacagcctcttcctcagctatcaccggaatccgctaccggagtacctgtcccgcggcctcatggtctccctgtccactgatgatcccttgcagttccacttcaccaaggagccgctgatggaggagtacagcatcgccacccaggtgtggaagctcagctcctgcgatatgtgtgagctggcccgcaacagcgtgctcatgagcggcttctcgcacaaggtaaagagccactggctgggacccaactataccaaggaaggccctgaggggaatgacatccgccggaccaatgtgccagacatccgcgtgggctaccgctacgagaccctgtgccaggagctggcgctcatcacgcaggcagtccagagtgagatgctggagaccattccagaggaggcgggtatcaccatgagcccagggcctcaatgagcctggtccatgaagtgcccaccacatcgcagcacttttaccacgttttgtcctcagaccccgcccatgctgtgtggtctctgcatgtctccattcttctctgtctctgtcttgcatgtctcctaccatgtcactgtccctgggccacccagtgaaagcaaagcctgggaatctgctcattgttgtttgggctcaggtattgagcctgatggcccaggtattgagggcctcccctgctggtggccctgtcctgggatcctcagaagcctgactgtcctatgggcttctccagtgtccacaggggcttgggatggttgtggggggctggcccctctagcctttccggtccttcctgggcaaatctaagccttggccagggccgaagtttaggcccctgtcttgttcatgtagccgaggggcaggcgggggacctctacacctctgctgtgggcacggggctgctgagggtctgtggaactccagcagctctgcactgggtagagctgggcctagagctcagtcacaggcctgggcttcctggcctgagtgggtagacgcaggcggcagaggtgctggaccacatctccgccaagtcactgcccagcagccttctccgtcctgtccccagcccacgtgctccttgggtgtcagcttcctgtgcctctgtgggagagggcagctgccttgtgttatgtctggggccacagttgctgcaaagtcctggatctgccactcaaccccgggagtggtgttcccagtgtggctcccagagctttgaccagattgtgatcccagctggcccctatgttgtgttctggactgaggcctttgctgtgaactgcagtgtttcatacgaaccatctttcctagtgcatgagaaataaagattatttaagtaa

SEQ ID NO: 421448 - DNA, 2914 bp, Homo sapiens
atcacgcgggacggggtgtcttaagttggtaattcagactggtcgttaggcttgatcgatttatagcctcagaggctcggggtggtctgggggcccctccgctgcagtctgcccgatccctgccgggccccgccccctgcctcaagcacttcccgctcgacctgcgcacgtctatggatggcaaatgcaaggagatcgccgaggtatcacctggcaccacccgcaccctcaccccgtgtctccatgccctgcctctgctccccacacccctcacctcaagctgtcccctcacctcacgcttggctgtctcctgatcctcagcctctcccaggtacccctggtcctgctgccctcaccccatccccagactctgtaggagagtgcccgagggcggagggccagccatgctgaccttccttccctccccccaggagctgttcacccgctcactggctgagagcgagctccgtagtgccccgtatgagttccccgaggagagccccattgaacagctggaggagcggcggcagcggctggagcggcagatcagccaggatgtcaagctggagccagacatcctgcttcgggccaagcaagatttcctgaagacggacagtgactcggacctacagctctacaaggaacagggtgaggggcagggtgaccggagcctgcgggagcgtgatgtgctggaacgggagtttcagcgggtcaccatctctggggaggagaagtgtggggtgccgttcacagacctgctggatgcagccaagagtgtggtgcgggcgctcttcatccgggagaagtacatggccctgtccctgcagagcttctgccccaccacccgccgctacctgcagcagctggctgaaaagcctctggagacccggacctatgaacagggccccgacacccctgtgtctgctgatgccccggtgcacccccctgcgctggagcagcacccgtatgagcactgtgagccaagcaccatgcctggggacctgggcttgggtctgcgcatggtgcggggtgtggtgcacgtctacacccgcagggaacccgacgagcattgctcagaggtggagctgccataccctgacctgcaggaatttgtggctgacgtcaatgtgctgatggccctgattatcaatggccccataaagtcattctgctaccgccggctgcagtacctgagctccaagttccagatgcatgtgctactcaatgagatgaaggagctggccgcccagaagaaagtgccacaccgagatttctacaacatccgcaaggtggacacccacatccatgcctcgtcctgcatgaaccagaagcatctgctgcgcttcatcaagcgggcaatgaagcggcacctggaggagatcgtgcacgtggagcagggccgtgaacagacgctgcgggaggtctttgagagcatgaatctcacggcctacgacctgagtgtggacacgctggatgtgcacgcggacaggaacactttccatcgctttgacaagtttaatgccaaatacaaccctattggggagtccgtcctccgagagatcttcatcaagacggacaacagggtatctgggaagtactttgctcacatcatcaaggaggtgatgtcagacctggaggagagcaaataccagaatgcagagctgcggctctccatttacgggcgctcgagggatgagtgggacaagctggcgcgctgggccgtcatgcaccgcgtgcactcccccaacgtgcgctggctggtgcaggtgccccgcctctttgatgtgtaccgtaccaagggccagctggccaacttccaggagatgctggagaacatcttcctgccactgttcgaggccactgtgcaccctgccagccacccggaactgcatctcttcttagagcacgtggatggttttgacagcgtggatgatgagtccaagcctgaaaaccatgtcttcaacctggagagccccctgcctgaggcgtgggtggaggaggacaacccaccctatgcctactacctgtactacacctttgccaacatggccatgttgaaccacctgcgcaggcagaggggcttccacacgtttgtgctgaggccacactgtggggaggctgggcccatccaccacctggtgtcagccttcatgctggctgagaacatttcccacgggctccttctgcgcaaggcccccgtcctgcagtacctgtactacctggcccagatcggcatcgccatgtctccgctcagcaacaacagcctcttcctcagctatcaccggaatccgctaccggagtacctgtcccgcggcctcatggtctccctgtccactgatgatcccttgcagttccacttcaccaaggagccgctgatggaggagtacagcatcgccacccaggtgtggaagctcagctcctgcgatatgtgtgagctggcccgcaacagcgtgctcatgagcggcttctcgcacaaggtaaagagccactggctgggacccaactataccaaggaaggccctgaggggaatgacatccgccggaccaatgtgccagacatccgcgtgggctaccgctacgagaccctgtgccaggagctggcgctcatcacgcaggcagtccagagtgagatgctggagaccattccagaggaggcgggtatcaccatgagcccagggcctcaatgagcctggtccatgaagtgcccaccacatcgcagcacttttaccacgttgctcagaccgcaagtgtgtggcctgatgtctcatctctcgaccgctgatgttctaccggactgccggccccaggaagaagcggacgcagaggggcggttagcgggcgatgggcccggggcggggcaaacggggaggccagcagggggggggccccggtgaaaaggagaccgaaggggcca

SEQ ID NO: 421449 - DNA, 2660 bp, Homo sapiens
atcacgcgggacggggtgtcttaagttggtaattcagactggtcgttaggcttgatcgatttatagcctcagaggctcggggtggtctgggggcccctccgctgcagtctgcccgatccctgccgggccccgccccctgcctcaagcacttcccgctcgacctgcgcacgtctatggatggcaaatgcaaggagatcgccgaggtatcacctggcaccacccgcaccctcaccccgtgtctccatgccctgcctctgctccccacacccctcacctcaagctgtcccctcacctcacgcttggctgtctcctgatcctcagcctctcccaggtacccctggtcctgctgccctcaccccatccccagactctgtaggagagtgcccgagggcggagggccagccatgctgaccttccttccctccccccaggagctgttcacccgctcactggctgagagcgagctccgtagtgccccgtatgagttccccgaggagagccccattgaacagctggaggagcggcggcagcggctggagcggcagatcagccaggatgtcaagctggagccagacatcctgcttcgggccaagcaagatttcctgaagacggacagtgactcggacctacagctctacaaggaacagggtgaggggcagggtgaccggagcctgcgggagcgtgatgtgctggaacgggagtttcagcgggtcaccatctctggggaggagaagtgtggggtgccgttcacagacctgctggatgcagccaagagtgtggtgcgggcgctcttcatccgggagaagtacatggccctgtccctgcagagcttctgccccaccacccgccgctacctgcagcagctggctgaaaagcctctggagacccggacctatgaacagggccccgacacccctgtgtctgctgatgccccggtgcacccccctgcgctggagcagcacccgtatgagcactgtgagccaagcaccatgcctggggacctgggcttgggtctgcgcatggtgcggggtgtggtgcacgtctacacccgcagggaacccgacgagcattgctcagaggtggagctgccataccctgacctgcaggaatttgtggctgacgtcaatgtgctgatggccctgattatcaatggccccataaagtcattctgctaccgccggctgcagtacctgagctccaagttccagatgcatgtgctactcaatgagatgaaggagctggccgcccagaagaaagtgccacaccgagatttctacaacatccgcaaggtggacacccacatccatgcctcgtcctgcatgaaccagaagcatctgctgcgcttcatcaagcgggcaatgaagcggcacctggaggagatcgtgcacgtggagcagggccgtgaacagacgctgcgggaggtctttgagagcatgaatctcacggcctacgacctgagtgtggacacgctggatgtgcacgcggacaggaacactttccatcgctttgacaagtttaatgccaaatacaaccctattggggagtccgtcctccgagagatcttcatcaagacggacaacagggtatctgggaagtactttgctcacatcatcaaggaggtgatgtcagacctggaggagagcaaataccagaatgcagagctgcggctctccatttacgggcgctcgagggatgagtgggacaagctggcgcgctgggccgtcatgcaccgcgtgcactcccccaacgtgcgctggctggtgcaggtgccccgcctctttgatgtgtaccgtaccaagggccagctggccaacttccaggagatgctggagaacatcttcctgccactgttcgaggccactgtgcaccctgccagccacccggaactgcatctcttcttagagcacgtggatggttttgacagcgtggatgatgagtccaagcctgaaaaccatgtcttcaacctggagagccccctgcctgaggcgtgggtggaggaggacaacccaccctatgcctactacctgtactacacctttgccaacatggccatgttgaaccacctgcgcaggcagaggggcttccacacgtttgtgctgaggccacactgtggggaggctgggcccatccaccacctggtgtcagccttcatgctggctgagaacatttcccacgggctccttctgcgcaaggcccccgtcctgcagtacctgtactacctggcccagatcggcatcgccatgtctccgctcagcaacaacagcctcttcctcagctatcaccggaatccgctaccggagtacctgtcccgcggcctcatggtctccctgtccactgatgatcccttgcagttccacttcaccaaggagccgctgatggaggagtacagcatcgccacccaggtggtgtcagcttcctgtgcctctgtgggagagggcagctgccttgtgttatgtctggggccacagttgctgcaaagtcctggatctgccactcaaccccgggagtggtgttcccagtgtggctcccagagctttgaccagattgtgatcccagctggcccctatgttgtgttctggactgaggcctttgctgtgaactgcagtgtttcatacgaaccatctttcctagtgcatgagaaataaagattatttaagtaa

SEQ ID NO: 421450 - DNA, 1138 bp, Homo sapiens
cggctaggtacgaggctgggagtttgaatcggtcagaggcacagcgtggtcatgagcggcttcgtcgcgacagaggtaaagagccactggctgggacccaactataccaaggaaggccctgaggggaatgacatccgccggaccaatgtgccagacatccgcgtgggctaccgctacgagaccctgtgccaggagctggcgctcatcacgcaggcagtccagagtgagatgctggagaccattccagaggaggcgggtatcaccatgagcccagggcctcaatgagcctggtccatgaagtgcccaccacatcgcagcacttttaccacgttttgtcctcagaccccgcccatgctgtgtggtctctgcatgtctccattcttctctgtctctgtcttgcatgtctcctaccatgtcactgtccctgggccacccagtgaaagcaaagcctgggaatctgctcattgttgtttgggctcaggtattgagcctgatggcccaggtattgagggcctcccctgctggtggccctgtcctgggatcctcagaagcctgactgtcctatgggcttctccagtgtccacaggggcttgggatggttgtggggggctggcccctctagcctttccggtccttcctgggcaaatctaagccttggccagggccgaagtttaggcccctgtcttgttcatgtagccgaggggcaggcgggggacctctacaccttctgcactgggtagagctgggcctagagctcagtcacaggcctgggcttcctggcctgagtgggtagacgcaggcggcagaggtgctggaccacatctccgccaagtcactgcccagcagccttctccgtcctgtccccagcccacgtgctccttgggtgtcagcttcctgtgcctctgtgggagagggcagctgccttgtgttatgtctggggccacagttgctgcaaagtcctggatctgccactcaaccccgggagtggtgttcccagtgtggctcccagagctttgaccagattgtgatcccagctggcccctatgttgtgttctggactgaggcctttgctgtgaactgcagtgtttcatacgaaccatctttcctagtgcatgagaaataaagattatttaagtaa

SEQ ID NO: 421451 - DNA, 3728 bp, Homo sapiens
aagggccgcagagcctggcgcggagccggcgagattttggtggggtctcacctgttgcgtgactcccccacagtccggccgcgggagtccgaccctgaatgcccagggagtgttgagagaaatctggacgagtttcgggtcccgctcccttgggagcacgtggcctaccagcctctcgattgcagggttgggtggtcgcgacaccggggtcgccttgaggccagtccggctgccgaggtctgcgggagtccacctccggccagctggcaattttgaaagactgccttactttccccatctcagtgccagggcaggggcccttggagtgacttggctggggtctgtggcccgatccccctgccgtccctcaggacccgggctttctgctgtacagacttctcgtgggcagcctcccctcggaactcgggcatcatggcctcagaggctcggggtggtctgggggcccctccgctgcagtctgcccgatccctgccgggccccgccccctgcctcaagcacttcccgctcgacctgcgcacgtctatggatggcaaatgcaaggagatcgccgaggagctgttcacccgctcactggctgagagcgagctccgtagtgccccgtatgagttccccgaggagagccccattgaacagctggaggagcggcggcagcggctggagcggcagatcagccaggatgtcaagctggagccagacatcctgcttcgggccaagcaagatttcctgaagacggacagtgactcggacctacagctctacaaggaacagggtgaggggcagggtgaccggagcctgcgggagcgtgatgtgctggaacgggagtttcagcgggtcaccatctctggggaggagaagtgtggggtgccgttcacagacctgctggatgcagccaagagtgtggtgcgggcgctcttcatccgggagaagtacatggccctgtccctgcagagcttctgccccaccacccgccgctacctgcagcagctggctgaaaagcctctggagacccggacctatgaacagggccccgacacccctgtgtctgctgatgccccggtgcacccccctgcgctggagcagcacccgtatgagcactgtgagccaagcaccatgcctggggacctgggcttgggtctgcgcatggtgcggggtgtggtgcacgtctacacccgcagggaacccgacgagcattgctcagaggtggagctgccataccctgacctgcaggaatttgtggctgacgtcaatgtgctgatggccctgattatcaatggccccataaagtcattctgctaccgccggctgcagtacctgagctccaagttccagatgcatgtgctactcaatgagatgaaggagctggccgcccagaagaaagtgccacaccgagatttctacaacatccgcaaggtggacacccacatccatgcctcgtcctgcatgaaccagaagcatctgctgcgcttcatcaagcgggcaatgaagcggcacctggaggagatcgtgcacgtggagcagggccgtgaacagacgctgcgggaggtctttgagagcatgaatctcacggcctacgacctgagtgtggacacgctggatgtgcacgcggacaggaacactttccatcgctttgacaagtttaatgccaaatacaaccctattggggagtccgtcctccgagagatcttcatcaagacggacaacagggtatctgggaagtactttgctcacatcatcaaggaggtgatgtcagacctggaggagagcaaataccagaatgcagagctgcggctctccatttacgggcgctcgagggatgagtgggacaagctggcgcgctgggccgtcatgcaccgcgtgcactcccccaacgtgcgctggctggtgcaggtgccccgcctctttgatgtgtaccgtaccaagggccagctggccaacttccaggagatgctggagaacatcttcctgccactgttcgaggccactgtgcaccctgccagccacccggaactgcatctcttcttagagcacgtggatggttttgacagcgtggatgatgagtccaagcctgaaaaccatgtcttcaacctggagagccccctgcctgaggcgtgggtggaggaggacaacccaccctatgcctactacctgtactacacctttgccaacatggccatgttgaaccacctgcgcaggcagaggggcttccacacgtttgtgctgaggccacactgtggggaggctgggcccatccaccacctggtgtcagccttcatgctggctgagaacatttcccacgggctccttctgcgcaaggcccccgtcctgcagtacctgtactacctggcccagatcggcatcgccatgtctccgctcagcaacaacagcctcttcctcagctatcaccggaatccgctaccggagtacctgtcccgcggcctcatggtctccctgtccactgatgatcccttgcagttccacttcaccaaggagccgctgatggaggagtacagcatcgccacccaggtgtggaagctcagctcctgcgatatgtgtgagctggcccgcaacagcgtgctcatgagcggcttctcgcacaaggtaaagagccactggctgggacccaactataccaaggaaggccctgaggggaatgacatccgccggaccaatgtgccagacatccgcgtgggctaccgctacgagaccctgtgccaggagctggcgctcatcacgcaggcagtccagagtgagatgctggagaccattccagaggaggcgggtatcaccatgagcccagggcctcaatgagcctggtccatgaagtgcccaccacatcgcagcacttttaccacgttttgtcctcagaccccgcccatgctgtgtggtctctgcatgtctccattcttctctgtctctgtcttgcatgtctcctaccatgtcactgtccctgggccacccagtgaaagcaaagcctgggaatctgctcattgttgtttgggctcaggtattgagcctgatggcccaggtattgagggcctcccctgctggtggccctgtcctgggatcctcagaagcctgactgtcctatgggcttctccagtgtccacaggggcttgggatggttgtggggggctggcccctctagcctttccggtccttcctgggcaaatctaagccttggccagggccgaagtttaggcccctgtcttgttcatgtagccgaggggcaggcgggggacctctacacctctgctgtgggcacggggctgctgagggtctgtggaactccagcagctctgcactgggtagagctgggcctagagctcagtcacaggcctgggcttcctggcctgagtgggtagacgcaggcggcagaggtgctggaccacatctccgccaagtcactgcccagcagccttctccgtcctgtccccagcccacgtgctccttgggtgtcagcttcctgtgcctctgtgggagagggcagctgccttgtgttatgtctggggccacagttgctgcaaagtcctggatctgccactcaaccccgggagtggtgttcccagtgtggctcccagagctttgaccagattgtgatcccagctggcccctatgttgtgttctggactgaggcctttgctgtgaactgcagtgtttcatacgaaccatctttcctagtgcatgagaaataaagattatttaagtaa

SEQ ID NO: 421452 - DNA, 3559 bp, Homo sapiens
atcacgcgggacggggtgtcttaagttggtaattcagactggtcgttaggcttgatcgatttatagcctcagaggctcggggtggtctgggggcccctccgctgcagtctgcccgatccctgccgggccccgccccctgcctcaagcacttcccgctcgacctgcgcacgtctatggatggcaaatgcaaggagatcgccgaggtatcacctggcaccacccgcaccctcaccccgtgtctccatgccctgcctctgctccccacacccctcacctcaagctgtcccctcacctcacgcttggctgtctcctgatcctcagcctctcccaggtacccctgactctgtaggagagtgcccgagggcggagggccagccatgctgaccttccttccctccccccaggagctgttcacccgctcactggctgagagcgagctccgtagtgccccgtatgagttccccgaggagagccccattgaacagctggaggagcggcggcagcggctggagcggcagatcagccaggatgtcaagctggagccagacatcctgcttcgggccaagcaagatttcctgaagacggacagtgactcggacctacagctctacaaggaacagggtgaggggcagggtgaccggagcctgcgggagcgtgatgtgctggaacgggagtttcagcgggtcaccatctctggggaggagaagtgtggggtgccgttcacagacctgctggatgcagccaagagtgtggtgcgggcgctcttcatccgggagaagtacatggccctgtccctgcagagcttctgccccaccacccgccgctacctgcagcagctggctgaaaagcctctggagacccggacctatgaacagggccccgacacccctgtgtctgctgatgccccggtgcacccccctgcgctggagcagcacccgtatgagcactgtgagccaagcaccatgcctggggacctgggcttgggtctgcgcatggtgcggggtgtggtgcacgtctacacccgcagggaacccgacgagcattgctcagaggtggagctgccataccctgacctgcaggaatttgtggctgacgtcaatgtgctgatggccctgattatcaatggccccataaagtcattctgctaccgccggctgcagtacctgagctccaagttccagatgcatgtgctactcaatgagatgaaggagctggccgcccagaagaaagtgccacaccgagatttctacaacatccgcaaggtggacacccacatccatgcctcgtcctgcatgaaccagaagcatctgctgcgcttcatcaagcgggcaatgaagcggcacctggaggagatcgtgcacgtggagcagggccgtgaacagacgctgcgggaggtctttgagagcatgaatctcacggcctacgacctgagtgtggacacgctggatgtgcacgcggacaggaacactttccatcgctttgacaagtttaatgccaaatacaaccctattggggagtccgtcctccgagagatcttcatcaagacggacaacagggtatctgggaagtactttgctcacatcatcaaggaggtgatgtcagacctggaggagagcaaataccagaatgcagagctgcggctctccatttacgggcgctcgagggatgagtgggacaagctggcgcgctgggccgtcatgcaccgcgtgcactcccccaacgtgcgctggctggtgcaggtgccccgcctctttgatgtgtaccgtaccaagggccagctggccaacttccaggagatgctggagaacatcttcctgccactgttcgaggccactgtgcaccctgccagccacccggaactgcatctcttcttagagcacgtggatggttttgacagcgtggatgatgagtccaagcctgaaaaccatgtcttcaacctggagagccccctgcctgaggcgtgggtggaggaggacaacccaccctatgcctactacctgtactacacctttgccaacatggccatgttgaaccacctgcgcaggcagaggggcttccacacgtttgtgctgaggccacactgtggggaggctgggcccatccaccacctggtgtcagccttcatgctggctgagaacatttcccacgggctccttctgcgcaaggcccccgtcctgcagtacctgtactacctggcccagatcggcatcgccatgtctccgctcagcaacaacagcctcttcctcagctatcaccggaatccgctaccggagtacctgtcccgcggcctcatggtctccctgtccactgatgatcccttgcagttccacttcaccaaggagccgctgatggaggagtacagcatcgccacccaggtgtggaagctcagctcctgcgatatgtgtgagctggcccgcaacagcgtgctcatgagcggcttctcgcacaaggtaaagagccactggctgggacccaactataccaaggaaggccctgaggggaatgacatccgccggaccaatgtgccagacatccgcgtgggctaccgctacgagaccctgtgccaggagctggcgctcatcacgcaggcagtccagagtgagatgctggagaccattccagaggaggcgggtatcaccatgagcccagggcctcaatgagcctggtccatgaagtgcccaccacatcgcagcacttttaccacgttttgtcctcagaccccgcccatgctgtgtggtctctgcatgtctccattcttctctgtctctgtcttgcatgtctcctaccatgtcactgtccctgggccacccagtgaaagcaaagcctgggaatctgctcattgttgtttgggctcaggtattgagcctgatggcccaggtattgagggcctcccctgctggtggccctgtcctgggatcctcagaagcctgactgtcctatgggcttctccagtgtccacaggggcttgggatggttgtggggggctggcccctctagcctttccggtccttcctgggcaaatctaagccttggccagggccgaagtttaggcccctgtcttgttcatgtagccgaggggcaggcgggggacctctacacctctgctgtgggcacggggctgctgagggtctgtggaactccagcagctctgcactgggtagagctgggcctagagctcagtcacaggcctgggcttcctggcctgagtgggtagacgcaggcggcagaggtgctggaccacatctccgccaagtcactgcccagcagccttctccgtcctgtccccagcccacgtgctccttgggtgtcagcttcctgtgcctctgtgggagagggcagctgccttgtgttatgtctggggccacagttgctgcaaagtcctggatctgccactcaaccccgggagtggtgttcccagtgtggctcccagagctttgaccagattgtgatcccagctggcccctatgttgtgttctggactgaggcctttgctgtgaactgcagtgtttcatacgaaccatctttcctagtgcatgagaaataaagattatttaagtaa

SEQ ID NO: 421453 - DNA, 3475 bp, Homo sapiens
atcacgcgggacggggtgtcttaagttggtaattcagactggtcgttaggcttgatcgatttatagcctcagaggctcggggtggtctgggggcccctccgctgcagtctgcccgatccctgccgggccccgccccctgcctcaagcacttcccgctcgacctgcgcacgtctatggatggcaaatgcaaggagatcgccgaggtatcacctggcaccacccgcaccctcaccccgtgtctccatgccctgcctctgctccccacacccctcacctcaagctgtcccctcacctcacgcttggctgtctcctgatcctcagcctctcccaggtacccctggtcctgctgccctcaccccatccccagactctgtaggagagtgcccgagggcggagggccagccatgctgaccttccttccctccccccaggagctgttcacccgctcactggctgagagcgagctccgtagtgccccgtatgagttccccgaggagagccccattgaacagctggaggagcggcggcagcggctggagcggcagatcagccaggatgtcaagctggagccagacatcctgcttcgggccaagcaagatttcctgaagacggacagtgactcggacctacagctctacaaggaacagggtgaggggcagggtgaccggagcctgcgggagcgtgatgtgctggaacgggagtttcagcgggtcaccatctctggggaggagaagtgtggggtgccgttcacagacctgctggatgcagccaagagtgtggtgcgggcgctcttcatccgggagaagtacatggccctgtccctgcagagcttctgccccaccacccgccgctacctgcagcagctggctgaaaagcctctggagacccggacctatgaacagggccccgacacccctgtgtctgctgatgccccggtgcacccccctgcgctggagcagcacccgtatgagcactgtgagccaagcaccatgcctggggacctgggcttgggtctgcgcatggtgcggggtgtggtgcacgtctacacccgcagggaacccgacgagcattgctcagaggtggagctgccataccctgacctgcaggaatttgtggctgacgtcaatgtgctgatggccctgattatcaatggccccataaagtcattctgctaccgccggctgcagtacctgagctccaagttccagatgcatgtgctactcaatgagatgaaggagctggccgcccagaagaaagtgccacaccgagatttctacaacatccgcaaggtggacacccacatccatgcctcgtcctgcatgaaccagaagcatctgctgcgcttcatcaagcgggcaatgaagcggcacctggaggagatcgtgcacgtggagcagggccgtgaacagacgctgcgggaggtctttgagagcatgaatctcacggcctacgacctgagtgtggacacgctggatgtgcacgcggacaggaacactttccatcgctttgacaagtttaatgccaaatacaaccctattggggagtccgtcctccgagagatcttcatcaagacggacaacagggtatctgggaagtactttgctcacatcatcaaggaggtgatgtcagacctggaggagagcaaataccagaatgcagagctgcggctctccatttacgggcgctcgagggatgagtgggacaagctggcgcgctgggccgtcatgcaccgcgtgcactcccccaacgtgcgctggctggtgcaggtgccccgcctctttgatgtgtaccgtaccaagggccagctggccaacttccaggagatgctggagaacatcttcctgccactgttcgaggccactgtgcaccctgccagccacccggaactgcatctcttcttagagcacgtggatggttttgacagcgtggatgatgagtccaagcctgaaaaccatgtcttcaacctggagagccccctgcctgaggcgtgggtggaggaggacaacccaccctatgcctactacctgtactacacctttgccaacatggccatgttgaaccacctgcgcaggcagaggggcttccacacgtttgtgctgaggccacactgtggggaggctgggcccatccaccacctggtgtcagccttcatgctggctgagaacatttcccacgggctccttctgcgcaaggcccccgtcctgcagtacctgtactacctggcccagatcggcatcgccatgtctccgctcagcaacaacagcctcttcctcagctatcaccggaatccgctaccggagtacctgtcccgcggcctcatggtctccctgtccactgatgatcccttgcagttccacttcaccaaggtaaagagccactggctgggacccaactataccaaggaaggccctgaggggaatgacatccgccggaccaatgtgccagacatccgcgtgggctaccgctacgagaccctgtgccaggagctggcgctcatcacgcaggcagtccagagtgagatgctggagaccattccagaggaggcgggtatcaccatgagcccagggcctcaatgagcctggtccatgaagtgcccaccacatcgcagcacttttaccacgttttgtcctcagaccccgcccatgctgtgtggtctctgcatgtctccattcttctctgtctctgtcttgcatgtctcctaccatgtcactgtccctgggccacccagtgaaagcaaagcctgggaatctgctcattgttgtttgggctcaggtattgagcctgatggcccaggtattgagggcctcccctgctggtggccctgtcctgggatcctcagaagcctgactgtcctatgggcttctccagtgtccacaggggcttgggatggttgtggggggctggcccctctagcctttccggtccttcctgggcaaatctaagccttggccagggccgaagtttaggcccctgtcttgttcatgtagccgaggggcaggcgggggacctctacacctctgctgtgggcacggggctgctgagggtctgtggaactccagcagctctgcactgggtagagctgggcctagagctcagtcacaggcctgggcttcctggcctgagtgggtagacgcaggcggcagaggtgctggaccacatctccgccaagtcactgcccagcagccttctccgtcctgtccccagcccacgtgctccttgggtgtcagcttcctgtgcctctgtgggagagggcagctgccttgtgttatgtctggggccacagttgctgcaaagtcctggatctgccactcaaccccgggagtggtgttcccagtgtggctcccagagctttgaccagattgtgatcccagctggcccctatgttgtgttctggactgaggcctttgctgtgaactgcagtgtttcatacgaaccatctttcctagtgcatgagaaataaagattatttaagtaa

SEQ ID NO: 421454 - DNA, 3887 bp, Homo sapiens
atcacgcgggacggggtgtcttaagttggtaattcagactggtcgttaggcttgatcgatttatagcctcagaggctcggggtggtctgggggcccctccgctgcagtctgcccgatccctgccgggccccgccccctgcctcaagcacttcccgctcgacctgcgcacgtctatggatggcaaatgcaaggagatcgccgaggtatcacctggcaccacccgcaccctcaccccgtgtctccatgccctgcctctgctccccacacccctcacctcaagctgtcccctcacctcacgcttggctgtctcctgatcctcagcctctcccaggtacccctggtcctgctgccctcaccccatccccagactctgtaggagagtgcccgagggcggagggccagccatgctgaccttccttccctccccccaggagctgttcacccgctcactggctgagagcgagctccgtagtgccccgtatgagttccccgaggagagccccattgaacagctggaggagcggcggcagcggctggagcggcagatcagccaggatgtcaagctggagccagacatcctgcttcgggccaagcaagatttcctgaagacggacagtgactcggacctacagctctacaaggaacagggtgaggggcagggtgaccggagcctgcgggagcgtgatgtgctggaacgggagtttcagcgggtcaccatctctggggaggagaagtgtggggtgccgttcacagacctgctggatgcagccaagagtgtggtgcgggcgctcttcatccgggagaagtacatggccctgtccctgcagagcttctgccccaccacccgccgctacctgcagcagctggctgaaaagcctctggagacccggacctatgaacagggccccgacacccctgtgtctgctgatgccccggtgcacccccctgcgctggagcagcacccgtatgagcactgtgagccaagcaccatgcctggggacctgggcttgggtctgcgcatggtgcggggtgtggtgcacgtctacacccgcagggaacccgacgagcattgctcagaggtggagctgccataccctgacctgcaggaatttgtggctgacgtcaatgtgctgatggccctgattatcaatggccccataaagtcattctgctaccgccggctgcagtacctgagctccaagttccagatgcatgtgctactcaatgagatgaaggagctggccgcccagaagaaagtgccacaccgagatttctacaacatccgcaaggtggacacccacatccatgcctcgtcctgcatgaaccagaagcatctgctgcgcttcatcaagcgggcaatgaagcggcacctggaggagatcgtgcacgtggagcagggccgtgaacagacgctgcgggaggtctttgagagcatgaatctcacggcctacgacctgagtgtggacacgctggatgtgcacgcggacaggaacactttccatcgctttgacaagtttaatgccaaatacaaccctattggggagtccgtcctccgagagatcttcatcaagacggacaacagggtatctgggaagtactttgctcacatcatcaaggaggtgatgtcagacctggaggagagcaaataccagaatgcagagctgcggctctccatttacgggcgctcgagggatgagtgggacaagctggcgcgctgggccgtcatgcaccgcgtgcactcccccaacgtgcgctggctggtgcaggtgccccgcctcttgtgagtgtccctggagtgggaggggaacctgcggggtcatattcaaggggtcagggcctgcctcctgccctcctaggatggctgagcctcccttgtccctgccaacccctctgagtgcaaggaagggcttcctggtcccatccatggtctgtccagcctggcccacctgggtatccttgctttcccaatatggttcagatgcgcccctgcgctcttgggccaagctctgacccttgctggaccgctgggtttcctcccactggccctgacttgcacatacctgcatgttgtctcacctgcatgatgtgtaccgtaccaagggccagctggccaacttccaggagatgctggagaacatcttcctgccactgttcgaggccactgtgcaccctgccagccacccggaactgcatctcttcttagagcacgtggatggttttgacagcgtggatgatgagtccaagcctgaaaaccatgtcttcaacctggagagccccctgcctgaggcgtgggtggaggaggacaacccaccctatgcctactacctgtactacacctttgccaacatggccatgttgaaccacctgcgcaggcagaggggcttccacacgtttgtgctgaggccacactgtggggaggctgggcccatccaccacctggtgtcagccttcatgctggctgagaacatttcccacgggctccttctgcgcaaggcccccgtcctgcagtacctgtactacctggcccagatcggcatcgccatgtctccgctcagcaacaacagcctcttcctcagctatcaccggaatccgctaccggagtacctgtcccgcggcctcatggtctccctgtccactgatgatcccttgcagttccacttcaccaaggagccgctgatggaggagtacagcatcgccacccaggtgtggaagctcagctcctgcgatatgtgtgagctggcccgcaacagcgtgctcatgagcggcttctcgcacaaggtaaagagccactggctgggacccaactataccaaggaaggccctgaggggaatgacatccgccggaccaatgtgccagacatccgcgtgggctaccgctacgagaccctgtgccaggagctggcgctcatcacgcaggcagtccagagtgagatgctggagaccattccagaggaggcgggtatcaccatgagcccagggcctcaatgagcctggtccatgaagtgcccaccacatcgcagcacttttaccacgttttgtcctcagaccccgcccatgctgtgtggtctctgcatgtctccattcttctctgtctctgtcttgcatgtctcctaccatgtcactgtccctgggccacccagtgaaagcaaagcctgggaatctgctcattgttgtttgggctcaggtattgagcctgatggcccaggtattgagggcctcccctgctggtggccctgtcctgggatcctcagaagcctgactgtcctatgggcttctccagtgtccacaggggcttgggatggttgtggggggctggcccctctagcctttccggtccttcctgggcaaatctaagccttggccagggccgaagtttaggcccctgtcttgttcatgtagccgaggggcaggcgggggacctctacacctctgctgtgggcacggggctgctgagggtctgtggaactccagcagctctgcactgggtagagctgggcctagagctcagtcacaggcctgggcttcctggcctgagtgggtagacgcaggcggcagaggtgctggaccacatctccgccaagtcactgcccagcagccttctccgtcctgtccccagcccacgtgctccttgggtgtcagcttcctgtgcctctgtgggagagggcagctgccttgtgttatgtctggggccacagttgctgcaaagtcctggatctgccactcaaccccgggagtggtgttcccagtgtggctcccagagctttgaccagattgtgatcccagctggcccctatgttgtgttctggactgaggcctttgctgtgaactgcagtgtttcatacgaaccatctttcctagtgcatgagaaataaagattatttaagtaa

SEQ ID NO: 421455 - DNA, 3540 bp, Homo sapiens
atcacgcgggacggggtgtcttaagttggtaattcagactggtcgttaggcttgatcgatttatagcctcagaggctcggggtggtctgggggcccctccgctgcagtctgcccgatccctgccgggccccgccccctgcctcaagcacttcccgctcgacctgcgcacgtctatggatggcaaatgcaaggagatcgccgaggtatcacctggcaccacccgcaccctcaccccgtgtctccatgccctgcctctgctccccacacccctcacctcaagctgtcccctcacctcacgcttggctgtctcctgatcctcagcctctcccaggtacccctggtcctgctgccctcaccccatccccagactctgtaggagagtgcccgagggcggagggccagccatgctgaccttccttccctccccccaggagctgttcacccgctcactggctgagagcgagctccgtagtgccccgtatgagttccccgaggagagccccattgaacagctggaggagcggcggcagcggctggagcggcagatcagccaggatgtcaagctggagccagacatcctgcttcgggccaagcaagatttcctgaagacggacagtgactcggacctacagctctacaaggaacagggtgaggggcagggtgaccggagcctgcgggagcgtgatgtgctggaacgggagtttcagcgggtcaccatctctggggaggagaagtgtggggtgccgttcacagacctgctggatgcagccaagagtgtggtgcgggcgctcttcatccgggagaagtacatggccctgtccctgcagagcttctgccccaccacccgccgctacctgcagcagctggctgaaaagcctctggagacccggacctatgaacagggccccgacacccctgtgtctgctgatgccccggtgcacccccctgcgctggagcagcacccgtatgagcactgtgagccaagcaccatgcctggggacctgggcttgggtctgcgcatggtgcggggtgtggtgcacgtctacacccgcagggaacccgacgagcattgctcagaggtggagctgccataccctgacctgcaggaatttgtggctgacgtcaatgtgctgatggccctgattatcaatggccccataaagtcattctgctaccgccggctgcagtacctgagctccaagttccagatgcatgtgctactcaatgagatgaaggagctggccgcccagaagaaagtgccacaccgagatttctacaacatccgcaaggtggacacccacatccatgcctcgtcctgcatgaaccagaagcatctgctgcgcttcatcaagcgggcaatgaagcggcacctggaggagatcgtgcacgtggagcagggccgtgaacagacgctgcgggaggtctttgagagcatgaatctcacggcctacgacctgagtgtggacacgctggatgtgcacgcggacaggaacactttccatcgctttgacaagtttaatgccaaatacaaccctattggggagtccgtcctccgagagatcttcatcaagacggacaacagggtatctgggaagtactttgctcacatcatcaaggaggtgatgtcagacctggaggagagcaaataccagaatgcagagctgcggctctccatttacgggcgctcgagggatgagtgggacaagctggcgcgctgggccgtcatgcaccgcgtgcactcccccaacgtgcgctggctggtgcaggtgccccgcctctttgatgtgtaccgtaccaagggccagctggccaacttccaggagatgctggagaacatcttcctgccactgttcgaggccactgtgcaccctgccagccacccggaactgcatctcttcttagagcacgtggatggttttgacagcgtggatgatgagtccaagcctgaaaaccatgtcttcaacctggagagccccctgcctgaggcgtgggtggaggaggacaacccaccctatgcctactacctgtactacacctttgccaacatggccatgttgaaccacctgcgcaggcagaggggcttccacacgtttgtgctgaggccacactgtggggaggctgggcccatccaccacctggtgtcagccttcatgctggctgagaacatttcccacgggctccttctgcgcaaggcccccgtcctgcagtacctgtactacctggcccagatcggcatcgccatgtctccgctcagcaacaacagcctcttcctcagctatcaccggaatccgctaccggagtacctgtcccgcggcctcatggtctccctgtccactgatgatcccttgcagttccacttcaccaaggagccgctgatggaggagtacagcatcgccacccaggtgtggaagctcagctcctgcgatatgtgtgagctggcccgcaacagcgtgctcatgagcggcttctcgcacaaggtaaagagccactggctgggacccaactataccaaggaaggccctgaggggaatgacatccgccggaccaatgtgccagacatccgcgtgggctaccgctacgagaccctgtgccaggagctggcgctcatcacgcaggcagtccagagtgagatgctggagaccattccagaggaggcgggtatcaccatgagcccagggcctcaatgagcctggtccatgaagtgcccaccacatcgcagcacttttaccacgttttgtcctcagaccccgcccatgctgtgtggtctctgcatgtctccattcttctctgtctctgtcttgcatgtctcctaccatgtcactgtccctgggccacccagtgaaagcaaagcctgggaatctgctcattgttgtttgggctcaggtattgagcctgatggcccaggtattgagggcctcccctgctggtggccctgtcctgggatcctcagaagcctgactgtcctatgggcttctccagtgtccacaggggcttgggatggttgtggggggctggcccctctagcctttccggtccttcctgggcaaatctaagccttggccagggccgaagtttaggcccctgtcttgttcatgtagccgaggggcaggcgggggacctctacaccttctgcactgggtagagctgggcctagagctcagtcacaggcctgggcttcctggcctgagtgggtagacgcaggcggcagaggtgctggaccacatctccgccaagtcactgcccagcagccttctccgtcctgtccccagcccacgtgctccttgggtgtcagcttcctgtgcctctgtgggagagggcagctgccttgtgttatgtctggggccacagttgctgcaaagtcctggatctgccactcaaccccgggagtggtgttcccagtgtggctcccagagctttgaccagattgtgatcccagctggcccctatgttgtgttctggactgaggcctttgctgtgaactgcagtgtttcatacgaaccatctttcctagtgcatgagaaataaagattatttaagtaa

SEQ ID NO: 421456 - DNA, 1888 bp, Homo sapiens
atcacgcgggacggggtgtcttaagttggtaattcagactggtcgttaggcttgatcgatttatagcctcagaggctcggggtggtctgggggcccctccgctgcagtctgcccgatccctgccgggccccgccccctgcctcaagcacttcccgctcgacctgcgcacgtctatggatggcaaatgcaaggagatcgccgaggtatcacctggcaccacccgcaccctcaccccgtgtctccatgccctgcctctgctccccacacccctcacctcaagctgtcccctcacctcacgcttggctgtctcctgatcctcagcctctcccaggtacccctggtcctgctgccctcaccccatccccagactctgtaggagagtgcccgagggcggagggccagccatgctgaccttccttccctccccccaggagctgttcacccgctcactggctgagagcgagctccgtagtgccccgtatgagttccccgaggagagccccattgaacagctggaggagcggcggcagcggctggagcggcagatcagccaggatgtcaagctggagccagacatcctgcttcgggccaagcaagatttcctgaagacggacagtgactcggacctacagtccactgatgatcccttgcagttccacttcaccaaggagccgctgatggaggagtacagcatcgccacccaggtgtggaagctcagctcctgcgatatgtgtgagctggcccgcaacagcgtgctcatgagcggcttctcgcacaaggtaaagagccactggctgggacccaactataccaaggaaggccctgaggggaatgacatccgccggaccaatgtgccagacatccgcgtgggctaccgctacgagaccctgtgccaggagctggcgctcatcacgcaggcagtccagagtgagatgctggagaccattccagaggaggcgggtatcaccatgagcccagggcctcaatgagcctggtccatgaagtgcccaccacatcgcagcacttttaccacgttttgtcctcagaccccgcccatgctgtgtggtctctgcatgtctccattcttctctgtctctgtcttgcatgtctcctaccatgtcactgtccctgggccacccagtgaaagcaaagcctgggaatctgctcattgttgtttgggctcaggtattgagcctgatggcccaggtattgagggcctcccctgctggtggccctgtcctgggatcctcagaagcctgactgtcctatgggcttctccagtgtccacaggggcttgggatggttgtggggggctggcccctctagcctttccggtccttcctgggcaaatctaagccttggccagggccgaagtttaggcccctgtcttgttcatgtagccgaggggcaggcgggggacctctacacctctgctgtgggcacggggctgctgagggtctgtggaactccagcagctctgcactgggtagagctgggcctagagctcagtcacaggcctgggcttcctggcctgagtgggtagacgcaggcggcagaggtgctggaccacatctccgccaagtcactgcccagcagccttctccgtcctgtccccagcccacgtgctccttgggtgtcagcttcctgtgcctctgtgggagagggcagctgccttgtgttatgtctggggccacagttgctgcaaagtcctggatctgccactcaaccccgggagtggtgttcccagtgtggctcccagagctttgaccagattgtgatcccagctggcccctatgttgtgttctggactgaggcctttgctgtgaactgcagtgtttcatacgaaccatctttcctagtgcatgagaaataaagattatttaagtaa

SEQ ID NO: 421457 - DNA, 1868 bp, Homo sapiens
tctgtttcagccatcttcgataaaggcaaaaaggtaagggaaagtttccaagctttaggaagaattattttttttcaagacgctgtcttccgtactttcgttattaaacatacggctcaagtgatcaccggtatagacagtgacatcagacatctttcattagccctactcaaaaatggcggcaacgtaagtatcctgggccggaggtcggttgtaacccggaagtgcctttgtaaaggagggggtggttagacaatccggaagtggatggaatgaagagatgccacttggcggccatggcagctgtagtatcggcgactccgggtcaaggcccggtcgagtgcagtaccatgggcagcaccgggtatagggcagagacagctttgtgtcaactttgctgctgaacccctaggacccatcgttagagacctgcaggactcctttcctcatcccaggctcggaggagagtttgctgggactggtgggctggtttcctgctctggggggcggatcaccttcggggccgcctcttggagacaggggcgcctagggaacgaacaggttcgcttgagtcacttacccgccgccgcctaagacattgtgccaccctcaatccgacaatcgaagaaatcgatcattcgctctgcgggccgctccgccggtgctgtccctgggcgcctccgtgctctcagccaaccgcctctgagagcgcccactcgagcgccccgggagccagagggcgggggtcctcgccgggaccctcctgtgggcccagggggacaaaagtggctctcaatccagcacatgcacattgaagcaagttaaaggatttaatatgaagcacagaagcagatagtgccaaatagcaagcagtagttgttacacatttggtgagcagggcagcatttccttctcccactgctgctgagatggcagaaattagtcgaattcagtacgaaatggaatatactgaaggcattagtcagcgaatgagggtcccagaaaagttaaaagtagcaccgccaaacgctgacctggaacaaggattccaagaaggagttccaaatgctagtgtgataatgcaagttccggagaggattgttgtagcaggaaataatgaagatgtttcattttcaagaccagcagatcttgaccttattcagtcaactccctttaaacccctggcactgaaaacaccacctcgtgtacttacgctgagtgaaagaccactagattttctggatttagaaagacctcctacaacccctcaaaatgaagaaatccgagcagttggcagactaaaaagagagcggtctatgagtgaaaatgctgttcgccaaaatggacagctggtcagaaatgattctcttgtgacaccatcgccacaacaggctcgggtctgtcctccccatatgttacctgaagatggagctaatctttcctctgctcgtggcattttgtcgcttatccagtcttctactcgtagggcataccagcagatcttggatgtgctggatgaaaatcgcagacctgtgttgcgtggtgggtctgctgccgccacttctaatcctcatcatgacaacgtcaggtatggcatttcaaatatagatacaaccattgaaggaacgtcagatgacctgactgttgtagatgcagcttcactaagacgacagataatcaaactaaatagacgtctacaacttctggaagaggagaacaaagaacgtgctaaaagagaaatggtcatgtattcaattactgtagctttctggctgcttaatagctggctctggtttcgccgctagaggtaacatcagccctcaaaaatactgtctcaacagctggaaatataaaagatttgcaaactt

SEQ ID NO: 421458 - DNA, 5619 bp, Homo sapiens
tctgtttcagccatcttcgataaaggcaaaaaggtaagggaaagtttccaagctttaggaagaattattttttttcaagacgctgtcttccgtactttcgttattaaacatacggctcaagtgatcaccggtatagacagtgacatcagacatctttcattagccctactcaaaaatggcggcaacgtaagtatcctgggccggaggtcggttgtaacccggaagtgcctttgtaaaggagggggtggttagacaatccggaagtggatggaatgaagagatgccacttggcggccatggcagctgtagtatcggcgactccgggtcaaggcccggtcgagtgcagtaccatgggcagcaccgggtatagggcagagacagctttgtgtcaactttgctgctgaacccctaggacccatcgttagagacctgcaggactcctttcctcatcccaggctcggaggagagtttgctgggactggtgggctggtttcctgctctggggggcggatcaccttcggggccgcctcttggagacaggggcgcctagggaacgaacaggttcgcttgagtcacttacccgccgccgcctaagacattgtgccaccctcaatccgacaatcgaagaaatcgatcattcgcacattttccccattgacttttcccatctctgttaacccacgagaatctaatgactggcatctgagaacccagagcctgggaccttagattgctgtaagctttctctggtgctaatatcagcaaaaagggtctgttgccgggtacgttcaagaggaaggtgcctcgtgaacacatctgctggtgggaaggcctaaagaactggaaagcccactctcttggaaccaccacacctgtttaaagaacctaagcaccatttaaagccactggaaatttgttgtctagtggttgtgggtgaataaaggagggcagaatggatgatttcatctccattagcctgctgtctctggctatgttggtgggatgttacgtggccggaatcattcccttggctgttaatttctcagaggaacgactgaagctggtgactgttttgggtgctggccttctctgtggaactgctctggcagtcatcgtgcctgaaggagtacatgccctttatgaagatattcttgagggaaaacaccaccaagcaagtgaaacacataatgtgattgcatcagacaaagcagcagaaaaatcagttgtccatgaacatgagcacagccacgaccacacacagctgcatgcctatattggtgtttccctcgttctgggcttcgttttcatgttgctggtggaccagattggtaactcccatgtgcattctactgacgatccagaagcagcaaggtctagcaattccaaaatcaccaccacgctgggtctggttgtccatgctgcagctgatggtgttgctttgggagcagcagcatctacttcacagaccagtgtccagttaattgtgtttgtggcaatcatgctacataaggcaccagctgcttttggactggtttccttcttgatgcatgctggcttagagcggaatcgaatcagaaagcacttgctggtctttgcattggcagcaccagttatgtccatggtgacatacttaggactgagtaagagcagtaaagaagccctttcagaggtgaacgccacgggagtggccatgcttttctctgccgggacatttctttatgttgccacagtacatgtcctccctgaggtgggcggaatagggcacagccacaagcccgatgccacgggagggagaggcctcagccgcctggaagtggcagccctggttctgggttgcctcatccctctcatcctgtcagtaggacaccagcattaaatgttcaaggtccagccttggtccagggccgtttgccatccagtgagaacagccggcacgtgacagctactcacttcctcagtctcttgtctcaccttgcgcatctctacatgtattcctagagtccagaggggaggtgaggttaaaacctgagtaatggaaaagcttttagagtagaaacacatttacgttgcagttagctatagacatcccattgtgttatcttttaaaaggcccttgacattttgcgttttaatatttctcttaaccctattctcagggaagatggaatttagttttaaggaaaagaggagaacttcatactcacaatgaaatagtgattatgctgctactttatccattgatttttaacatggttcccaccatgtaagactggtgctttagcatctatgccacatgcgttgatggaaggtcatagcacccactcacttagatgctaaaggtgattctagttaatctgggattagggtcaggaaaatgatagcaagacacattgaaagctctctttatactcaaaagagatatccattgaaaagggatgtctagagggatttaaacagctcctttggcacgtgcctctctgaatccagcctgccattccatcaaatggagcaggagaggtgggaggagcttctaaagaggtgactggtattttgtagcattccttgtcaagttctcctttgcagaatacctgtctccacattcctagagaggagccaagttctagtagtttcagttctaggctttccttcaagaacagtcagatcacaaagtgtctttggaaattaagggatattaaattttaagtgatttttggatggttattgatatctttgtagtagctttttttaaaagactaccaaaatgtatggttgtcctttttttttgttttttttttttttaattatttctcttagcagatcagcaatccctctagggacctaaatactaggtcagctttggcgacactgtgtcttctcacataaccacctgtagcaagatggatcataaatgagaagtgtttgcctattgatttaaagcttattggaatcatgtctcttgtctcttcgtcttttctttgcttttcttctaacttttccctctagcctctcctcgccacaatttgctgcttactgctggtgttaatatttgtgtgggatgaattcttatcaggacaaccacttctcgaactgtaataatgaagataataatatctttattctttatcccccttcaaagaaattacctttgtgtcaaatgccgctttgttgagcccttaaaataccacctcctcatgtgtaaattgacacaatcactaatctggtaatttaaacaattgagatagcaaaagtgtttaacagactaggataatttttttttcatatttgccaaaatttttgtaaaccctgtcttgtcaaataagtgtataatattgtattattaatttatttttactttctataccatttcaaaacacattacactaagggggaaccaagactagtttcttcagggcagtggacgtagtagtttgtaaaaacgttttctatgacgcataagctagcatgcctatgatttatttccttcatgaatttgtcactggatcagcagctgtggaaataaagcttgtgagccctctgctggccacagtgaggaaagtagcacaaataggatacagttgtatgtagtcattggcaacaattgcatacaattttactaccaagagaaggtatagtatggaaagtccaaatgacttccttgattggatgttaacagctgactggtgtgagacttgaggtttcatctagtccttcaaaactatatggttgcctagattctctctggaaactgactttgtcaaataaatagcagattgtagtgtctggtttggtttggacagtagtgctttctatcatattgttgtgtgcaatggtaatttgttctactggccaaagcctctttcagcagtgccttgccatcatgcttaaaagtttggctagtatatcttgctggatggagccttgaactccggcaaggattgaaccatctgacttccaaatttgccttcccctctggacctcactattaacaagcaaacctttcagggccctcttagctctcagaagctatgtatgggctttcccagattttaaagctgctgcctcgagaactactcatttctctcctggtcagcagacagaaatagccatactaatctcatagggctcaaatgcatcttcaggcagcagggaaccaagcagcgtggcacaggccttcttgactggaggaagagcttgctggcatggtgggcagtattccaggagaggccatgtccgtgttcacttcttggcacatttcagttccgttttcctcttgtttaaaactgcctctttagatgtggatgccttaatgctgtaacacatttgaaaacattggcaatacttaagttgctgccatgattacagatggaattattggctaccaaagagacgcaattgatgatgagaagcatgattcttgcttccatataaccaaagttaatcttaattgcaatttgactccgtttccttggtagggatagactttcttcagattccaagtgctctcttaaatggcaaattaagttaaagaatactactgctccattcccctcacttattctccagttaattgcttgtcagttccatttcaagaaagcagtgatgttccaggtttgattcagttttcctgtgcacactattgccaaatttttttttagcaaagattctgcactggaacgtagacagttggaaacagtactacctacctagaggttatgtgttttctctttctccccgctttcacctctttctttcccaattcaaaacagccaagtgagccctgttctggtattttgaatcattagagaaaagaaagggagtggctgttttgagttgtcctttctttgcagaaaggagaaaatgtgattgtgttttttttttaccagcctacttctaagtgtcactgcctggtttttctctttttcaaggattagaactaagaggacacaccagcatcggagtgtattaagcccctgaaacacatggtagctagggactgaacacaggaaccgtatgacagcagcacaaacccccaaaggatgttcctgccttgtgggcccctgagccccttgggagactgagaatcatgaccagattcatccagaactgctgcagtgttaagtgaaaatcctctgtagttgttctgcagaggaaccttccttccattagaaaatttctgctcaatacagaatggtccacatcacccaaagtgcactgttggagatgctgtgaaattaaaacctctttgtacctgagacatctagattcacctcaggaggcctgaaggaaatgtgtaacttgtgggaaagaactagacaaccatttaggaattctctagatatactcagcctaacccagtggcttaacacaaggagattggctttgatctttttttcttgtggcatcttccagcaagttagaagtctcatgggataagactgcagttcccctggttcaatagctggaacagtgattttaaatgtccctttttctggatcccttgtaaacatgaaatcattccatggatggctgccttataattttgtctctttccactttaattgtgaatggttaaaaaaatgctgttttctgatattaaatttttattagtgcataccttaa

SEQ ID NO: 421459 - DNA, 5651 bp, Homo sapiens
tctgtttcagccatcttcgataaaggcaaaaaggtaagggaaagtttccaagctttaggaagaattattttttttcaagacgctgtcttccgtactttcgttattaaacatacggctcaagtgatcaccggtatagacagtgacatcagacatctttcattagccctactcaaaaatggcggcaacgtaagtatcctgggccggaggtcggttgtaacccggaagtgcctttgtaaaggagggggtggttagacaatccggaagtggatggaatgaagagatgccacttggcggccatggcagctgtagtatcggcgactccgggtcaaggcccggtcgagtgcagtaccatgggcagcaccgggtatagggcagagacagctttgtgtcaactttgctgctgaacccctaggacccatcgttagagacctgcaggactcctttcctcatcccaggctcggaggagagtttgctgggactggtgggctggtttcctgctctggggggcggatcaccttcggggccgcctcttggagacaggggcgcctagggaacgaacaggttcgcttgagtcacttacccgccgccgcctaagacattgtgccaccctcaatccgacaatcgaagaaatcgatcattcgcacattttccccattgacttttcccatctctgttaacccacgagaatctaatgactggcatctgagaacccagagcctgggaccttagattgctgtaagctttctctggtgctaatatcagcaaaaagggtctgttgccgggtacgttcaagaggaaggtgcctcgtgaacacatctgctggtgggaaggcctaaagaactggaaagcccactctcttggaaccaccacacctgtttaaagaacctaagcaccatttaaagccactggaaatttgttgtctagtggttgtgggtgaataaaggagggcagaatggatgatttcatctccattagcctgctgtctctggctatgttggtgggatgttacgtggccggaatcattcccttggctgttaatttctcagaggaacgactgaagctggtgactgttttgggtgctggccttctctgtggaactgctctggcagtcatcgtgcctgaaggagtacatgccctttatgaagatattcttgagggaaaacaccaccaagcaagtgaaacacataatgtgattgcatcagacaaagcagcagaaaaatcagttgtccatgaacatgagcacagccacgaccacacacagctgcatgcctatattggtgtttccctcgttctgggcttcgttttcatgttgctggtggaccagattggtaactcccatgtgcattctactgacgatccagaagcagcaaggtctagcaattccaaaatcaccaccacgctgggtctggttgtccatgctgcagctgatggtgttgctttgggagcagcagcatctacttcacagaccagtgtccagttaattgtgtttgtggcaatcatgctacataaggcaccagctgcttttggactggtttccttcttgatgcatgctggcttagagcggaatcgaatcagaaagcacttgctggtctttgcattggcagcaccagttatgtccatggtgacatacttaggactgagtaagagcagtaaagaagccctttcagaggtgaacgccacgggagtggccatgcttttctctgccgggacatttctttatgttgccacagtacatgtcctccctgaggtgggcggaatagggcacagccacaagcccgatgccacgggagggagaggcctcagccgcctggaagtggcagccctggttctgggttgcctcatccctctcatcctgtcagtaggacaccagcattaaatgttcaaggtccagccttggtccagggccgtttgccatccagtgagaacagccggcacgtgacagctactcacttcctcagtctcttgtctcaccttgcgcatctctacatgtattcctagagtccagaggggaggtgaggttaaaacctgagtaatggaaaagcttttagagtagaaacacatttacgttgcagttagctatagacatcccattgtgttatcttttaaaaggcccttgacattttgcgttttaatatttctcttaaccctattctcagggaagatggaatttagttttaaggaaaagaggagaacttcatactcacaatgaaatagtgattatgaaaatacagtgttctgtaattaagctatgtctctttcttcttagtttagaggctctgctactttatccattgatttttaacatggttcccaccatgtaagactggtgctttagcatctatgccacatgcgttgatggaaggtcatagcacccactcacttagatgctaaaggtgattctagttaatctgggattagggtcaggaaaatgatagcaagacacattgaaagctctctttatactcaaaagagatatccattgaaaagggatgtctagagggatttaaacagctcctttggcacgtgcctctctgaatccagcctgccattccatcaaatggagcaggagaggtgggaggagcttctaaagaggtgactggtattttgtagcattccttgtcaagttctcctttgcagaatacctgtctccacattcctagagaggagccaagttctagtagtttcagttctaggctttccttcaagaacagtcagatcacaaagtgtctttggaaattaagggatattaaattttaagtgatttttggatggttattgatatctttgtagtagctttttttaaaagactaccaaaatgtatggttgtcctttttttttgttttttttttttttaattatttctcttagcagatcagcaatccctctagggacctaaatactaggtcagctttggcgacactgtgtcttctcacataaccacctgtagcaagatggatcataaatgagaagtgtttgcctattgatttaaagcttattggaatcatgtctcttgtctcttcgtcttttctttgcttttcttctaacttttccctctagcctctcctcgccacaatttgctgcttactgctggtgttaatatttgtgtgggatgaattcttatcaggacaaccacttctcgaactgtaataatgaagataataatatctttattctttatcccccttcaaagaaattacctttgtgtcaaatgccgctttgttgagcccttaaaataccacctcctcatgtgtaaattgacacaatcactaatctggtaatttaaacaattgagatagcaaaagtgtttaacagactaggataatttttttttcatatttgccaaaatttttgtaaaccctgtcttgtcaaataagtgtataatattgtattattaatttatttttactttctataccatttcaaaacacattacactaagggggaaccaagactagtttcttcagggcagtggacgtagtagtttgtaaaaacgttttctatgacgcataagctagcatgcctatgatttatttccttcatgaatttgtcactggatcagcagctgtggaaataaagcttgtgagccctctgctggccacagtgaggaaagtagcacaaataggatacagttgtatgtagtcattggcaacaattgcatacaattttactaccaagagaaggtatagtatggaaagtccaaatgacttccttgattggatgttaacagctgactggtgtgagacttgaggtttcatctagtccttcaaaactatatggttgcctagattctctctggaaactgactttgtcaaataaatagcagattgtagtgtctggtttggtttggacagtagtgctttctatcatattgttgtgtgcaatggtaatttgttctactggccaaagcctctttcagcagtgccttgccatcatgcttaaaagtttggctagtatatcttgctggatggagccttgaactccggcaaggattgaaccatctgacttccaaatttgccttcccctctggacctcactattaacaagcaaacctttcagggccctcttagctctcagaagctatgtatgggctttcccagattttaaagctgctgcctcgagaactactcatttctctcctggtcagcagacagaaatagccatactaatctcatagggctcaaatgcatcttcaggcagcagggaaccaagcagcgtggcacaggccttcttgactggaggaagagcttgctggcatggtgggcagtattccaggagaggccatgtccgtgttcacttcttggcacatttcagttccgttttcctcttgtttaaaactgcctctttagatacatttgaaaacattggcaatacttaagttgctgccatgattacagatggaattattggctaccaaagagacgcaattgatgatgagaagcatgattcttgcttccatataaccaaagttaatcttaattgcaatttgactccgtttccttggtagggatagactttcttcagattccaagtgctctcttaaatggcaaattaagttaaagaatactactgctccattcccctcacttattctccagttaattgcttgtcagttccatttcaagaaagcagtgatgttccaggtttgattcagttttcctgtgcacactattgccaaatttttttttagcaaagattctgcactggaacgtagacagttggaaacagtactacctacctagaggttatgtgttttctctttctccccgctttcacctctttctttcccaattcaaaacagccaagtgagccctgttctggtattttgaatcattagagaaaagaaagggagtggctgttttgagttgtcctttctttgcagaaaggagaaaatgtgattgtgttttttttttaccagcctacttctaagtgtcactgcctggtttttctctttttcaaggattagaactaagaggacacaccagcatcggagtgtattaagcccctgaaacacatggtagctagggactgaacacaggaaccgtatgacagcagcacaaacccccaaaggatgttcctgccttgtgggcccctgagccccttgggagactgagaatcatgaccagattcatccagaactgctgcagtgttaagtgaaaatcctctgtagttgttctgcagaggaaccttccttccattagaaaatttctgctcaatacagaatggtccacatcacccaaagtgcactgttggagatgctgtgaaattaaaacctctttgtacctgagacatctagattcacctcaggaggcctgaaggaaatgtgtaacttgtgggaaagaactagacaaccatttaggaattctctagatatactcagcctaacccagtggcttaacacaaggagattggctttgatctttttttcttgtggcatcttccagcaagttagaagtctcatgggataagactgcagttcccctggttcaatagctggaacagtgattttaaatgtccctttttctggatcccttgtaaacatgaaatcattccatggatggctgccttataattttgtctctttccactttaattgtgaatggttaaaaaaatgctgttttctgatattaaatttttattagtgcataccttaa

SEQ ID NO: 421460 - DNA, 6126 bp, Homo sapiens
  misc_feature (5870)..(5870): n is a, c, g, or t
tctgtttcagccatcttcgataaaggcaaaaaggtaagggaaagtttccaagctttaggaagaattattttttttcaagacgctgtcttccgtactttcgttattaaacatacggctcaagtgatcaccggtatagacagtgacatcagacatctttcattagccctactcaaaaatggcggcaacgtaagtatcctgggccggaggtcggttgtaacccggaagtgcctttgtaaaggagggggtggttagacaatccggaagtggatggaatgaagagatgccacttggcggccatggcagctgtagtatcggcgactccgggtcaaggcccggtcgagtgcagtaccatgggcagcaccgggtatagggcagagacagctttgtgtcaactttgctgctgaacccctaggacccatcgttagagacctgcaggactcctttcctcatcccaggctcggaggagagtttgctgggactggtgggctggtttcctgctctggggggcggatcaccttcggggccgcctcttggagacaggggcgcctagggaacgaacaggttcgcttgagtcacttacccgccgccgcctaagacattgtgccaccctcaatccgacaatcgaagaaatcgatcattcgcacattttccccattgacttttcccatctctgttaacccacgagaatctaatgactggcatctgagaacccagagcctgggaccttagattgctgtaagctttctctggtgctaatatcagcaaaaagggtctgttgccgggtacgttcaagaggaaggtgcctcgtgaacacatctgctggtgggaaggcctaaagaactggaaagcccactctcttggaaccaccacacctgtttaaagaacctaagcaccatttaaagccactggaaatttgttgtctagtggttgtgggtgaataaaggagggcagaatggatgatttcatctccattagcctgctgtctctggctatgttggtgggatgttacgtggccggaatcattcccttggctgttaatttctcagaggaacgactgaagctggtgactgttttgggtgctggccttctctgtggaactgctctggcagtcatcgtgcctgaaggagtacatgccctttatgaagatattcttgagggaaaacaccaccaagcaagtgaaacacataatgtgattgcatcagacaaagcagcagaaaaatcagttgtccatgaacatgagcacagccacgaccacacacagctgcatgcctatattggtgtttccctcgttctgggcttcgttttcatgttgctggtggaccagattggtaactcccatgtgcattctactgacgatccagaagcagcaaggtctagcaattccaaaatcaccaccacgctgggtctggttgtccatgctgcagctgatggtgttgctttgggagcagcagcatctacttcacagaccagtgtccagttaattgtgtttgtggcaatcatgctacataaggcaccagctgcttttggactggtttccttcttgatgcatgctggcttagagcggaatcgaatcagaaagcacttgctggtctttgcattggcagcaccagttatgtccatggtgacatacttaggactgagtaagagcagtaaagaagccctttcagaggtgaacgccacgggagtggccatgcttttctctgccgggacatttctttatgttgccacagtacatgtcctccctgaggtgggcggaatagggcacagccacaagcccgatgccacgggagggagaggcctcagccgcctggaagtggcagccctggttctgggttgcctcatccctctcatcctgtcagtaggacaccagcattaaatgttcaaggtccagccttggtccagggccgtttgccatccagtgagaacagccggcacgtgacagctactcacttcctcagtctcttgtctcaccttgcgcatctctacatgtattcctagagtccagaggggaggtgaggttaaaacctgagtaatggaaaagcttttagagtagaaacacatttacgttgcagttagctatagacatcccattgtgttatcttttaaaaggcccttgacattttgcgttttaatatttctcttaaccctattctcagggaagatggaatttagttttaaggaaaagaggagaacttcatactcacaatgaaatagtgattatgaaaatacagtgttctgtaattaagctatgtctctttcttcttagtttagaggctctgctactttatccattgatttttaacatggttcccaccatgtaagactggtgctttagcatctatgccacatgcgttgatggaaggtcatagcacccactcacttagatgctaaaggtgattctagttaatctgggattagggtcaggaaaatgatagcaagacacattgaaagctctctttatactcaaaagagatatccattgaaaagggatgtctagagggatttaaacagctcctttggcacgtgcctctctgaatccagcctgccattccatcaaatggagcaggagaggtgggaggagcttctaaagaggtgactggtattttgtagcattccttgtcaagttctcctttgcagaatacctgtctccacattcctagagaggagccaagttctagtagtttcagttctaggctttccttcaagaacagtcagatcacaaagtgtctttggaaattaagggatattaaattttaagtgatttttggatggttattgatatctttgtagtagctttttttaaaagactaccaaaatgtatggttgtcctttttttttgttttttttttttttaattatttctcttagcagatcagcaatccctctagggacctaaatactaggtcagctttggcgacactgtgtcttctcacataaccacctgtagcaagatggatcataaatgagaagtgtttgcctattgatttaaagcttattggaatcatgtctcttgtctcttcgtcttttctttgcttttcttctaacttttccctctagcctctcctcgccacaatttgctgcttactgctggtgttaatatttgtgtgggatgaattcttatcaggacaaccacttctcgaactgtaataatgaagataataatatctttattctttatcccccttcaaagaaattacctttgtgtcaaatgccgctttgttgagcccttaaaataccacctcctcatgtgtaaattgacacaatcactaatctggtaatttaaacaattgagatagcaaaagtgtttaacagactaggataatttttttttcatatttgccaaaatttttgtaaaccctgtcttgtcaaataagtgtataatattgtattattaatttatttttactttctataccatttcaaaacacattacactaagggggaaccaagactagtttcttcagggcagtggacgtagtagtttgtaaaaacgttttctatgacgcataagctagcatgcctatgatttatttccttcatgaatttgtcactggatcagcagctgtggaaataaagcttgtgagccctctgctggccacagtgaggaaagtagcacaaataggatacagttgtatgtagtcattggcaacaattgcatacaattttactaccaagagaaggtatagtatggaaagtccaaatgacttccttgattggatgttaacagctgactggtgtgagacttgaggtttcatctagtccttcaaaactatatggttgcctagattctctctggaaactgactttgtcaaataaatagcagattgtagtgtctggtttggtttggacagtagtgctttctatcatattgttgtgtgcaatggtaatttgttctactggccaaagcctctttcagcagtgccttgccatcatgcttaaaagtttggctagtatatcttgctggatggagccttgaactccggcaaggattgaaccatctgacttccaaatttgccttcccctctggacctcactattaacaagcaaacctttcagggccctcttagctctcagaagctatgtatgggctttcccagattttaaagctgctgcctcgagaactactcatttctctcctggtcagcagacagaaatagccatactaatctcatagggctcaaatgcatcttcaggcagcagggaaccaagcagcgtggcacaggccttcttgactggaggaagagcttgctggcatggtgggcagtattccaggagaggccatgtccgtgttcacttcttggcacatttcagttccgttttcctcttgtttaaaactgcctctttagatgtggatgccttaatgctgtaacacatttgaaaacattggcaatacttaagttgctgccatgattacagatggaattattggctaccaaagagacgcaattgatgatgagaagcatgattcttgcttccatataaccaaagttaatcttaattgcaatttgactccgtttccttggtagggatagactttcttcagattccaagtgctctcttaaatggcaaattaagttaaagaatactactgctccattcccctcacttattctccagttaattgcttgtcagttccatttcaagaaagcagtgatgttccaggtttgattcagttttcctgtgcacactattgccaaatttttttttagcaaagattctgcactggaacgtagacagttggaaacagtactacctacctagaggttatgtgttttctctttctccccgctttcacctctttctttcccaattcaaaacagccaagtgagccctgttctggtattttgaatcattagagaaaagaaagggagtggctgttttgagttgtcctttctttgcagaaaggagaaaatgtgattgtgttttttttttaccagcctacttctaagtgtcactgcctggtttttctctttttcaaggattagaactaagaggacacaccagcatcggagtgtattaagcccctgaaacacatggtagctagggactgaacacaggaaccgtatgacagcagcacaaacccccaaaggatgttcctgccttgtgggcccctgagccccttgggagactgagaatcatgaccagattcatccagaactgctgcagtgttaagtgaaaatcctctgtagttgttctgcagaggaaccttccttccattagaaaatttctgctcaatacagaatggtccacatcacccaaagtgcactgttggagatgctgtgaaattaaaacctctttgtacctgagacatctagattcacctcaggaggcctgaaggaaatgtgtaacttgtgggaaagaactagacaaccatttaggaattctctagatatactcagcctaacccagtggcttaacacaaggagattggctttgatctttttttcttgtggcatcttccagcaagttagaagtctcatgggataagactgcagttcccctggttcaatagctggaacagtgattttaaatgtccctttttctggatcccttgtaaacatgaaatcattccatggatggctgccttataattttgtctctttccactttaattgtgaatggttaaaaaaatgctgttttctgatattaaatttttattagtgcataccttaaaaaaaaaaaaaacaaaaaaaaaaccccggggcttttttttgggggggggaaaaaggggttttggatgggcctgggcctttggtttccctgcccccttttcttgtcccagggggtaaattcggcagagtccccttatagggggggcgtattatttgcgtaagccgggtttccgcttgtctttcgtgcgcaacacaacnagaaagaaacggagagaacaaaaaaagaagaagaagagacaaacaagtacagaaacgaagacgagcaacaatacatcgacaaacgaaccaacacgaaacaaacaagaacacaaatgagaacgtaaaaaccacgaaaacactaagacagcaacaagatgaagaaaacgacaggacaagcaaaagagagacgagaacacacaaccgagaacaaaaaaagacacaaagatcaacaacaaaaacaagcatgacaacagga

SEQ ID NO: 421461 - DNA, 5515 bp, Homo sapiens
tctgtttcagccatcttcgataaaggcaaaaaggtaagggaaagtttccaagctttaggaagaattattttttttcaagacgctgtcttccgtactttcgttattaaacatacggctcaagtgatcaccggtatagacagtgacatcagacatctttcattagccctactcaaaaatggcggcaacgtaagtatcctgggccggaggtcggttgtaacccggaagtgcctttgtaaaggagggggtggttagacaatccggaagtggatggaatgaagagatgccacttggcggccatggcagctgtagtatcggcgactccgggtcaaggcccggtcgagtgcagtaccatgggcagcaccgggtatagggcagagacagctttgtgtcaactttgctgctgaacccctaggacccatcgttagagacctgcaggactcctttcctcatcccaggctcggaggagagtttgctgggactggtgggctggtttcctgctctggggggcggatcaccttcggggccgcctcttggagacaggggcgcctagggaacgaacaggttcgcttgagtcacttacccgccgccgcctaagacattgtgccaccctcaatccgacaatcgaagaaatcgatcattcgcacattttccccattgacttttcccatctctgttaacccacgagaatctaatgactggcatctgagaacccagagcctgggaccttagattgctgtaagctttctctggtgctaatatcagcaaaaagggtctgttgccgggtacgttcaagaggaaggtgcctcgtgaacacatctgctggtgggaaggcctaaagaactggaaagcccactctcttggaaccaccacacctgtttaaagaacctaagcaccatttaaagccactggaaatttgttgtctagtggttgtgggtgaataaaggagggcagaatggatgatttcatctccattagcctgctgtctctggctatgttggtgggatgttacgtggccggaatcattcccttggctgttaatttctcagaggaacgactgaagctggtgactgttttgggtgctggccttctctgtggaactgctctggcagtcatcgtgcctgaaggagtacatgccctttatgaagatattcttgagggaaaacaccaccaagcaagtgaaacacataatgtgattgcatcagacaaagcagcagaaaaatcagttgtccatgaacatgagcacagccacgaccacacacagctgcatgcctatattggtgtttccctcgttctgggcttcgttttcatgttgctggtggaccagattggtaactcccatgtgcattctactgacgatccagaagcagcaaggtctagcaattccaaaatcaccaccacgctgggtctggttgtccatgctgcagctgatggtgttgctttgggagcagcagcatctacttcacagaccagtgtccagttaattgtgtttgtggcaatcatgctacataaggcaccagctgcttttggactggtttccttcttgatgcatgctggcttagagcggaatcgaatcagaaagcacttgctggtctttgcattggcagcaccagttatgtccatggtgacatacttaggactgagtaagagcagtaaagaagccctttcagaggtgaacgccacgggagtggccatgcttttctctgccgggacatttctttatgttgccacagtacatgtcctccctgaggtgggcggaatagggcacagccacaagcccgatgccacgggagggagaggcctcagccgcctggaagtggcagccctggttctgggttgcctcatccctctcatcctgtcagtaggacaccagcattaaatgttcaaggtccagccttggtccagggccgtttgccatccagtgagaacagccggcacgtgacagctactcacttcctcagtctcttgtctcaccttgcgcatctctacatgtattcctagagtccagaggggaggtgaggttaaaacctgagtaatggaaaagcttttagagtagaaacacatttacgttgcagttagctatagacatcccattgtgttatcttttaaaaggcccttgacattttgcgttttaatatttctcttaaccctattctcagggaagatggaatttagttttaaggaaaagaggagaacttcatactcacaatgaaatagtgattatgaaaatacagtgttctgtaattaagctatgtctctttcttcttagtttagaggctctgctactttatccattgatttttaacatggttcccaccatgtaagactggtgctttagcatctatgccacatgcgttgatggaaggtcatagcacccactcacttagatgctaaaggtgattctagttaatctgggattagggtcaggaaaatgatagcaagacacattgaaagctctctttatactcaaaagagatatccattgaaaagggatgtctagagggatttaaacagctcctttggcacgtgcctctctgaatccagcctgccattccatcaaatggagcaggagaggtgggaggagcttctaaagaggtgactggtattttgtagcattccttgtcaagttctcctttgcagaatacctgtctccacattcctagagaggagccaagttctagtagtttcagttctaggctttccttcaagaacagtcagatcacaaagtgtctttggaaattaagggatattaaattttaagtgatttttggatggttattgatatctttgtagtagctttttttaaaagactaccaaaatgtatggttgtcctttttttttgttttttttttttttaattatttctcttagcagatcagcaatccctctagggacctaaatactaggtcagctttggcgacactgtgtcttctcacataaccacctgtagcaagatggatcataaatgagaagtgtttgcctattgatttaaagcttattggaatcatgtctcttgtctcttcgtcttttctttgcttttcttctaacttttccctctagcctctcctcgccacaatttgctgcttactgctggtgttaatatttgtgtgggatgaattcttatcaggacaaccacttctcgaactgtaataatgaagataataatatctttattctttatcccccttcaaagaaattacctttgtgtcaaatgccgctttgttgagcccttaaaataccacctcctcatgtgtaaattgacacaatcactaatctggtaatttaaacaattgagatagcaaaagtgtttaacagactaggataatttttttttcatatttgccaaaatttttgtaaaccctgtcttgtcaaataagtgtataatattgtattattaatttatttttactttctataccatttcaaaacacattacactaagggggaaccaagactagtttcttcagggcagtggacgtagtagtttgtaaaaacgttttctatgacgcataagctagcatgcctatgatttatttccttcatgaatttgtcactggatcagcagctgtggaaataaagcttgtgagccctctgctggccacagtgaggaaagtagcacaaataggatacagttgtatgtagtcattggcaacaattgcatacaattttactaccaagagaaggtatagtatggaaagtccaaatgacttccttgattggatgttaacagctgactggtgtgagacttgaggtttcatctagtccttcaaaactatatggttgcctagattcttagtatatcttgctggatggagccttgaactccggcaaggattgaaccatctgacttccaaatttgccttcccctctggacctcactattaacaagcaaacctttcagggccctcttagctctcagaagctatgtatgggctttcccagattttaaagctgctgcctcgagaactactcatttctctcctggtcagcagacagaaatagccatactaatctcatagggctcaaatgcatcttcaggcagcagggaaccaagcagcgtggcacaggccttcttgactggaggaagagcttgctggcatggtgggcagtattccaggagaggccatgtccgtgttcacttcttggcacatttcagttccgttttcctcttgtttaaaactgcctctttagatgtggatgccttaatgctgtaacacatttgaaaacattggcaatacttaagttgctgccatgattacagatggaattattggctaccaaagagacgcaattgatgatgagaagcatgattcttgcttccatataaccaaagttaatcttaattgcaatttgactccgtttccttggtagggatagactttcttcagattccaagtgctctcttaaatggcaaattaagttaaagaatactactgctccattcccctcacttattctccagttaattgcttgtcagttccatttcaagaaagcagtgatgttccaggtttgattcagttttcctgtgcacactattgccaaatttttttttagcaaagattctgcactggaacgtagacagttggaaacagtactacctacctagaggttatgtgttttctctttctccccgctttcacctctttctttcccaattcaaaacagccaagtgagccctgttctggtattttgaatcattagagaaaagaaagggagtggctgttttgagttgtcctttctttgcagaaaggagaaaatgtgattgtgttttttttttaccagcctacttctaagtgtcactgcctggtttttctctttttcaaggattagaactaagaggacacaccagcatcggagtgtattaagcccctgaaacacatggtagctagggactgaacacaggaaccgtatgacagcagcacaaacccccaaaggatgttcctgccttgtgggcccctgagccccttgggagactgagaatcatgaccagattcatccagaactgctgcagtgttaagtgaaaatcctctgtagttgttctgcagaggaaccttccttccattagaaaatttctgctcaatacagaatggtccacatcacccaaagtgcactgttggagatgctgtgaaattaaaacctctttgtacctgagacatctagattcacctcaggaggcctgaaggaaatgtgtaacttgtgggaaagaactagacaaccatttaggaattctctagatatactcagcctaacccagtggcttaacacaaggagattggctttgatctttttttcttgtggcatcttccagcaagttagaagtctcatgggataagactgcagttcccctggttcaatagctggaacagtgattttaaatgtccctttttctggatcccttgtaaacatgaaatcattccatggatggctgccttataattttgtctctttccactttaattgtgaatggttaaaaaaatgctgttttctgatattaaatttttattagtgcataccttaa

SEQ ID NO: 421462 - DNA, 5159 bp, Homo sapiens
tctgtttcagccatcttcgataaaggcaaaaaggtaagggaaagtttccaagctttaggaagaattattttttttcaagacgctgtcttccgtactttcgttattaaacatacggctcaagtgatcaccggtatagacagtgacatcagacatctttcattagccctactcaaaaatggcggcaacgtaagtatcctgggccggaggtcggttgtaacccggaagtgcctttgtaaaggagggggtggttagacaatccggaagtggatggaatgaagagatgccacttggcggccatggcagctgtagtatcggcgactccgggtcaaggcccggtcgagtgcagtaccatgggcagcaccgggtatagggcagagacagctttgtgtcaactttgctgctgaacccctaggacccatcgttagagacctgcaggactcctttcctcatcccaggctcggaggagagtttgctgggactggtgggctggtttcctgctctggggggcggatcaccttcggggccgcctcttggagacaggggcgcctagggaacgaacaggttcgcttgagtcacttacccgccgccgcctaagacattgtgccaccctcaatccgacaatcgaagaaatcgatcattcgcacattttccccattgacttttcccatctctgttaacccacgagaatctaatgactggcatctgagaacccagagcctgggaccttagattgctgtaagctttctctggtgctaatatcagcaaaaagggtctgttgccgggtacgttcaagaggaaggtgcctcgtgaacacatctgctggtgggaaggcctaaagaactggaaagcccactctcttggaaccaccacacctgtttaaagaacctaagcaccatttaaagccactggaaatttgttgtctagtggttgtgggtgaataaaggagggcagaatggatgatttcatctccattagcctgctgtctctggctatgttggtgggatgttacgtggccggaatcattcccttggctgttaatttctcagaggaacgactgaagctggtgactgttttgggtgctggccttctctgtggaactgctctggcagtcatcgtgcctgaaggagtacatgccctttatgaagatattcttgagggaaaacaccaccaagcaagtgaaacacataatgtgattgcatcagacaaagcagcagaaaaatcagttgtccatgaacatgagcacagccacgaccacacacagctgcatgcctatattggtgtttccctcgttctgggcttcgttttcatgttgctggtggaccagattggtaactcccatgtgcattctactgacgatccagaagcagcaaggtctagcaattccaaaatcaccaccacgctgggtctggttgtccatgctgcagctgatggtgttgctttgggagcagcagcatctacttcacagaccagtgtccagttaattgtgtttgtggcaatcatgctacataaggcaccagctgcttttggactggtttccttcttgatgcatgctggcttagagcggaatcgaatcagaaagcacttgctggtctttgcattggcagcaccagttatgtccatggtgacatacttaggactgagtaagagcagtaaagaagccctttcagaggtgaacgccacgggagtggccatgcttttctctgccgggacatttctttatgttgccacagtacatgtcctccctgaggtgggcggaatagggcacagccacaagcccgatgccacgggagggagaggcctcagccgcctggaagtggcagccctggttctgggttgcctcatccctctcatcctgtcagtaggacaccagcattaaatgttcaaggtccagccttggtccagggccgtttgccatccagtgagaacagccggcacgtgacagctactcacttcctcagtctcttgtctcaccttgcgcatctctacatgtattcctagagtccagaggggaggtgaggttaaaacctgagtaatggaaaagcttttagagtagaaacacatttacgttgcagttagctatagacatcccattgtgttatcttttaaaaggcccttgacattttgcgttttaatatttctcttaaccctattctcagggaagatggaatttagttttaaggaaaagaggagaacttcatactcacaatgaaatagtgattatgaaaatacagtgttctgtaattaagctatgtctctttcttcttagtttagaggctctgctactttatccattgatttttaacatggttcccaccatgtaagactggtgctttagcatctatgccacatgcgttgatggaaggtcatagcacccactcacttagatgctaaaggtgattctagttaatctgggattagggtcaggaaaatgatagcaagacacattgaaagctctctttatactcaaaagagatatccattgaaaagggatgtctagagggatttaaacagctcctttggcacgtgcctctctgaatccagcctgccattccatcaaatggagcaggagaggtgggaggagcttctaaagaggtgactggtattttgtagcattccttgtcaagttctcctttgcagaatacctgtctccacattcctagagaggagccaagttctagtagtttcagttctaggctttccttcaagaacagtcagatcacaaagtgtctttggaaattaagggatattaaattttaagtgatttttggatggttattgatatctttgtagtagctttttttaaaagactaccaaaatgtatggttgtcctttttttttgttttttttttttttaattatttctcttagcagatcagcaatccctctagggacctaaatactaggtcagctttggcgacactgtgtcttctcacataaccacctgtagcaagatggatcataaatgagaagtgtttgcctattgatttaaagcttattggaatcatgtctcttgtctcttcgtcttttctttgcttttcttctaacttttccctctagcctctcctcgccacaatttgctgcttactgctggtgttaatatttgtgtgggatgaattcttatcaggacaaccacttctcgaactgtaataatgaagataataatatctttattctttatcccccttcaaagaaattacctttgtgtcaaatgccgctttgttgagcccttaaaataccacctcctcatgtgtaaattgacacaatcactaatctggtaatttaaacaattgagatagcaaaagtgtttaacagactaggataatttttttttcatatttgccaaaatttttgtaaaccctgtcttgtcaaataagtgtataatattgtattattaatttatttttactttctataccatttcaaaacacattacactaagggggaaccaagactagtttcttcagggcagtggacgtagtagtttgtaaaaacgttttctatgacgcataagctagcatgcctatgatttatttccttcatgaatttgtcactggatcagcagctgtggaaataaagcttgtgagccctctgctggccacagtgaggaaagtagcacaaataggatacagttgtatgtagtcattggcaacaattgcatacaattttactaccaagagaaggtatagtatggaaagtccaaatgacttccttgattggatgttaacagctgactggtgtgagacttgaggtttcatctagtccttcaaaactatatggttgcctagattctctctggaaactgactttgtcaaataaatagcagattgtagtgtctggtttggtttggacagtagtgctttctatcatattgttgtgtgcaatggtaatttgttctactggccaaagcctctttcagcagtgccttgccatcatgcttaaaagtttggctagtatatcttgctggatggagccttgaactccggcaaggattgaaccatctgacttccaaatttgccttcccctctggacctcactattaacaagcaaacctttcagggccctcttagctctcagaagctatgtatgggctttcccagattttaaagctgctgcctcgagaactactcatttctctcctggtcagcagacagaaatagccatactaatctcatagggctcaaatgcatcttcaggcagcagggaaccaagcagcgtggcacaggccttcttgactggaggaagagcttgctggcatggtgggcagtattccaggagaggccatgtccgtgttcacttcttggcacatttcagttccgttttcctcttgtttaaaactgcctctttagatgtggatgccttaatgctgtaacacatttgaaaacattggcaatacttaagttgctgccatgattacagatggaattattggctaccaaagagacgcaattgatgatgagaagcatgattcttgcttccatataaccaaagttaatcttaattgcaatttgactccgtttccttggtagggatagactttcttcagattccaagtgctctcttaaatggcaaattaagttaaagaatactactgctccattcccctcacttattctccagttaattgcttgtcagttccatttcaagaaagcagtgatgttccaggtttgattcagttttcctgtgcacactattgccaaatttttttttagcaaagattctgcactggaacgtagacagttggaaacagtactacctacctagaggttatgtgttttctctttctccccgctttcacctctttctttcccaattcaaaacagccaagtgagccctgttctggtattttgaatcattagagaaaagaaagggagtggctgttttgagttgtcctttctttgcagaaaggagaaaatgtgattgtgttttttttttaccagcctacttctaagtgtcactgcctggtttttctctttttcaaggattggactgaacacaggaaccgtatgacagcagcacaaacccccaaaggatgttcctgccttgtgggcccctgagccccttgggagactgagaatcatgaccagattcatccagaactggcccattcccctcactatctccagttaattgctgtcagttccatttcagaagcagaacgg

SEQ ID NO: 421463 - DNA, 3406 bp, Homo sapiens
tctgtttcagccatcttcgataaaggcaaaaaggtaagggaaagtttccaagctttaggaagaattattttttttcaagacgctgtcttccgtactttcgttattaaacatacggctcaagtgatcaccggtatagacagtgacatcagacatctttcattagccctactcaaaaatggcggcaacgtaagtatcctgggccggaggtcggttgtaacccggaagtgcctttgtaaaggagggggtggttagacaatccggaagtggatggaatgaagagatgccacttggcggccatggcagctgtagtatcggcgactccgggtcaaggcccggtcgagtgcagtaccatgggcagcaccgggtatagggcagagacagctttgtgtcaactttgctgctgaacccctaggacccatcgttagagacctgcaggactcctttcctcatcccaggctcggaggagagtttgctgggactggtgggctggtttcctgctctggggggcggatcaccttcggggccgcctcttggagacaggggcgcctagggaacgaacaggttcgcttgagtcacttacccgccgccgcctaagacattgtgccaccctcaatccgacaatcgaagaaatcgatcattcgcacattttccccattgacttttcccatctctgttaacccacgagaatctaatgactggcatctgagaacccagagcctgggaccttagattgctgtaagctttctctggtgctaatatcagcaaaaagggtctgttgccgggtacgttcaagaggaaggtgcctcgtgaacacatctgctggtgggaaggcctaaagaactggaaagcccactctcttggaaccaccacacctgtttaaagaacctaagcaccatttaaagccactggaaatttgttgtctagtggttgtgggtgaataaaggagggcagaatggatgatttcatctccattagcctgctgtctctggctatgttggtgggatgttacgtggccggaatcattcccttggctgttaatttctcagaggaacgactgaagctggtgactgttttgggtgctggccttctctgtggaactgctctggcagtcatcgtgcctgaaggagtacatgccctttatgaagatattcttgagggaaaacaccaccaagcaagtgaaacacataatgtgattgcatcagacaaagcagcagaaaaatcagttgtccatgaacatgagcacagccacgaccacacacagctgcatgcctatattggtgtttccctcgttctgggcttcgttttcatgttgctggtggaccagattggtaactcccatgtgcattctactgacgatccagaagcagcaaggtctagcaattccaaaatcaccaccacgctgggtctggttgtccatgctgcagctgatggtgttgctttgggagcagcagcatctacttcacagaccagtgtccagttaattgtgtttgtggcaatcatgctacataaggcaccagctgcttttggactggtttccttcttgatgcatgctggcttagagcggaatcgaatcagaaagcacttgctggtctttgcattggcagcaccagttatgtccatggtgacatacttaggactgagtaagagcagtaaagaagccctttcagaggtgaacgccacgggagtggccatgcttttctctgccgggacatttctttatgttgccacagtacatgtcctccctgaggtgggcggaatagggcacagccacaagcccgatgccacgggagggagaggcctcagccgcctggaagtggcagccctggttctgggttgcctcatccctctcatcctgtcagtaggacaccagcattaaatgttcaaggtccagccttggtccagggccgtttgccatccagtgagaacagccggcacgtgacagctactcacttcctcagtctcttgtctcaccttgcgcatctctacatgtattcctagagtccagaggggaggtgaggttaaaacctgagtaatggaaaagcttttagagtagaaacacatttacgttgcagttagctatagacatcccattgtgttatcttttaaaaggcccttgacattttgcgttttaatatttctcttaaccctattctcagggaagatggaatttagttttaaggaaaagaggagaacttcatactcacaatgaaatagtgattatgaaaatacagtgttctgtaattaagctatgtctctttcttcttagtttagaggctctgctactttatccattgatttttaacatggttcccaccatgtaagactggtgctttagcatctatgccacatgcgttgatggaaggtcatagcacccactcacttagatgctaaaggtgattctagttaatctgggattagggtcaggaaaatgatagcaagacacattgaaagctctctttatactcaaaagagatatccattgaaaagggatgtctagagggatttaaacagctcctttggcacgtgcctctctgaatccagcctgccattccatcaaatggagcaggagaggtgggaggagcttctaaagaggtgactggtattttgtagcattccttgtcaagttctcctttgcagaatacctgtctccacattcctagagaggagccaagttctagtagtttcagttctaggctttccttcaagaacagtcagatcacaaagtgtctttggaaattaagggatattaaattttaagtgatttttggatggttattgatatctttgtagtagctttttttaaaagactaccaaaatgtatggttgtcctttttttttgttttttttttttttaattatttctcttagcagatcagcaatccctctagggacctaaatactaggtcagctttggcgacactgtgtcttctcacataaccacctgtagcaagatggatcataaatgagaagtgtttgcctattgatttaaagcttattggaatcatgtctcttgtctcttcgtcttttctttgcttttcttctaacttttccctctagcctctcctcgccacaatttgctgcttactgctggtgttaatatttgtgtgggatgaattctctagatatactcagcctaacccagtggcttaacacaaggagattggctttgatctttttttcttgtggcatcttccagcaagttagaagtctcatgggataagactgcagttcccctggttcaatagctggaacagtgattttaaatgtccctttttctggatcccttgtaaacatgaaatcattccatggatggctgccttataattttgtctctttccactttaattgtgaatggttaaaaaaatgctgttttctgatattaaatttttattagtgcataccttaa

SEQ ID NO: 421464 - DNA, 2335 bp, Homo sapiens
tctgtttcagccatcttcgataaaggcaaaaaggtaagggaaagtttccaagctttaggaagaattattttttttcaagacgctgtcttccgtactttcgttattaaacatacggctcaagtgatcaccggtatagacagtgacatcagacatctttcattagccctactcaaaaatggcggcaacgtaagtatcctgggccggaggtcggttgtaacccggaagtgcctttgtaaaggagggggtggttagacaatccggaagtggatggaatgaagagatgccacttggcggccatggcagctgtagtatcggcgactccgggtcaaggcccggtcgagtgcagtaccatgggcagcaccgggtatagggcagagacagctttgtgtcaactttgctgctgaacccctaggacccatcgttagagacctgcaggactcctttcctcatcccaggctcggaggagagtttgctgggactggtgggctggtttcctgctctggggggcggatcaccttcggggccgcctcttggagacaggggcgcctagggaacgaacaggttcgcttgagtcacttacccgccgccgcctaagacattgtgccaccctcaatccgacaatcgaagaaatcgatcattcgcacattttccccattgacttttcccatctctgttaacccacgagaatctaatgactggcatctgagaacccagagcctgggaccttagattgctgtaagctttctctggtgctaatatcagcaaaaagggtctgttgccgggtacgttcaagaggaaggtgcctcgtgaacacatctgctggtgggaaggcctaaagaactggaaagcccactctcttggaaccaccacacctgtttaaagaacctaagcaccatttaaagccactggaaatttgttgtctagtggttgtgggtgaataaaggagggcagaatggatgatttcatctccattagcctgctgtctctggctatgttggtgggatgttacgtggccggaatcattcccttggctgttaatttctcagaggaacgactgaagctggtgactgttttgggtgctggccttctctgtggaactgctctggcagtcatcgtgcctgaaggagtacatgccctttatgaagatattcttgagggaaaacaccaccaagcaagtgaaacacataatgtgattgcatcagacaaagcagcagaaaaatcagttgtccatgaacatgagcacagccacgaccacacacagctgcatgcctatattggtgtttccctcgttctgggcttcgttttcatgttgctggtggaccagattggtaactcccatgtgcattctactgacgatccagaagcagcaaggtctagcaattccaaaatcaccaccacgctgggtctggttgtccatgctgcagctgatggtgttgctttgggagcagcagcatctacttcacagaccagtgtccagttaattgtgtttgtggcaatcatgctacataaggcaccagctgcttttggactggtttccttcttgatgcatgctggcttagagcggaatcgaatcagaaagcacttgctggtctttgcattggcagcaccagttatgtccatggtgacatacttaggactgagtaagagaactaagaggacacaccagcatcggagtgtattaagcccctgaaacacatggtagctagggactgaacacaggaaccgtatgacagcagcacaaacccccaaaggatgttcctgccttgtgggcccctgagccccttgggagactgagaatcatgaccagattcatccagaactgctgcagtgttaagtgaaaatcctctgtagttgttctgcagaggaaccttccttccattagaaaatttctgctcaatacagaatggtccacatcacccaaagtgcactgttggagatgctgtgaaattaaaacctctttgtacctgagacatctagattcacctcaggaggcctgaaggaaatgtgtaacttgtgggaaagaactagacaaccatttaggaattctctagatatactcagcctaacccagtggcttaacacaaggagattggctttgatctttttttcttgtggcatcttccagcaagttagaagtctcatgggataagactgcagttcccctggttcaatagctggaacagtgattttaaatgtccctttttctggatcccttgtaaacatgaaatcattccatggatggctgccttataattttgtctctttccactttaattgtgaatggttaaaaaaatgctgttttctgatattaaatttttattagtgcataccttaa

SEQ ID NO: 421465 - DNA, 2011 bp, Homo sapiens
tctgtttcagccatcttcgataaaggcaaaaaggtaagggaaagtttccaagctttaggaagaattattttttttcaagacgctgtcttccgtactttcgttattaaacatacggctcaagtgatcaccggtatagacagtgacatcagacatctttcattagccctactcaaaaatggcggcaacgtaagtatcctgggccggaggtcggttgtaacccggaagtgcctttgtaaaggagggggtggttagacaatccggaagtggatggaatgaagagatgccacttggcggccatggcagctgtagtatcggcgactccgggtcaaggcccggtcgagtgcagtaccatgggcagcaccgggtatagggcagagacagctttgtgtcaactttgctgctgaacccctaggacccatcgttagagacctgcaggactcctttcctcatcccaggctcggaggagagtttgctgggactggtgggctggtttcctgctctggggggcggatcaccttcggggccgcctcttggagacaggggcgcctagggaacgaacaggttcgcttgagtcacttacccgccgccgcctaagacattgtgccaccctcaatccgacaatcgaagaaatcgatcattcgcacattttccccattgacttttcccatctctgttaacccacgagaatctaatgactggcatctgagaacccagagcctgggaccttagattgctgtaagctttctctggtgctaatatcagcaaaaagggtctgttgccgggtacgttcaagaggaaggtgcctcgtgaacacatctgctggtgggaaggcctaaagaactggaaagcccactctcttggaaccaccacacctgtttaaagaacctaagcaccatttaaagccactggaaatttgttgtctagtggttgtgggtgaataaaggagggcagaatggatgatttcatctccattagcctgctgtctctggctatgttggtgggatgttacgtggccggaatcattcccttggctgttaatttctcagagtcatcgtgcctgaaggagtacatgccctttatgaagatattcttgaggatgccaaaacagttgtgcccagatcagctgcagacaagagcagaactttgaatggaaatgggacccaagtgggatcaagatcctggaggtttttttcaaagaattgtaacagaagatgaaacatggctttaccaacgatcctgaaggcaaaccacattcaaagcaatggctactgagaagtggaagtggtcagtcaaagcagaagtgggtcggttaagagcaaaggtcactggcaacagtatttggggatgtgcaagacattttacttgttgattttctagagtgccaatgaaccataacatctgcgtattatgagatgcgtattatggtttttaaaaagttacccaaagttttagcagaagaatgcccagaaatgcttgatcagagtcctccaccacgacaatgttcctgctcattgctctcatcagacaagggcaattttgccaggttttcaataggaaagttttgggcatcagctttatagtcctgatttggctccttccaacttctttttgtttcctaatcttaaaatctataaagggtacccatttttcttcagttaataatgtaaaaaagactgcattgacatggttaaatttccaggaccctcagttatttaggggtgaactaaatagctggtatcatcatttacaaaagtgtctcacacttgatagagcttatgttcagtaataatgtttatatttttaaatttttttaatcttttaattccatttttccacaagctttttgaagtccccttatattctgtgtatcaatagtttgtaccttttttttttctgagtggtatttcattgtttgcatgaaccatgtttggctattccttcaccagttggaagatgtatatatgggtggttcctggtttgggtgactatgaataaagtcactattaatgtc

SEQ ID NO: 421466 - DNA, 1764 bp, Homo sapiens
tctgtttcagccatcttcgataaaggcaaaaaggtaagggaaagtttccaagctttaggaagaattattttttttcaagacgctgtcttccgtactttcgttattaaacatacggctcaagtgatcaccggtatagacagtgacatcagacatctttcattagccctactcaaaaatggcggcaacgtaagtatcctgggccggaggtcggttgtaacccggaagtgcctttgtaaaggagggggtggttagacaatccggaagtggatggaatgaagagatgccacttggcggccatggcagctgtagtatcggcgactccgggtcaaggcccggtcgagtgcagtaccatgggcagcaccgggtatagggcagagacagctttgtgtcaactttgctgctgaacccctaggacccatcgttagagacctgcaggactcctttcctcatcccaggctcggaggagagtttgctgggactggtgggctggtttcctgctctggggggcggatcaccttcggggccgcctcttggagacaggggcgcctagggaacgaacaggttcgcttgagtcacttacccgccgccgcctaagacattgtgccaccctcaatccgacaatcgaagaaatcgatcattcgcacattttccccattgacttttcccatctctgttaacccacgagaatctaatgactggcatctgagaacccagagcctgggaccttagattgctgtaagctttctctggtgctaatatcagcaaaaagggtctgttgccgggtacgttcaagaggaaggtgcctcgtgaacacatctgctggtgggaaggcctaaagaactggaaagcccactctcttggaaccaccacacctgtttaaagaacctaagcaccatttaaagccactggaaatttgttgtctagtggttgtgggtgaataaaggagggcagaatggatgatttcatctccattagcctgctgtctctggctatgttggtgggatgttacgtggccggaatcattcccttggctgttaatttctcagaggaacgactgaagctggtgactgttttgggtgctggccttctctgtggaactgctctggcagtcatcgtgcctgaaggagtacatgccctttatgaagatattcttgagggaaaacaccaccaagcaagtgaaacacataatgtgattgcatcagacaaagcagcagaaaaatcagttgtccatgaacatgagcacagccacgaccacacacagctgcatgcctatattggtgtttccctcgttctgggcttcgttttcatgttgctggtggaccagattggtaactcccatgtgcattctactgacgatccagaagcagcaaggtctagcaattccaaaatcaccaccacgctgggtctggttgtccatgctgcagctgatggtgttgctttgggagcagcagcatctacttcacagaccagtgtccagttaattgtgtttgtggcaatcatgctacataaggcaccagctgcttttggactggtttccttcttgatgcatgctggcttagagcggaatcgaatcagaaagcacttgctggtctttgcattggcagcaccagttatgtccatggtgacatacttaggactgagtaaggtatgaaaagcagtttaccagactgcatgtggcagatactcctttcgaaaattgtaatataaggatagtgaaaaagaagggcagagataaatgaatacaactagttcagaaaattatac

SEQ ID NO: 421467 - DNA, 2072 bp, Homo sapiens
tctgtttcagccatcttcgataaaggcaaaaaggtaagggaaagtttccaagctttaggaagaattattttttttcaagacgctgtcttccgtactttcgttattaaacatacggctcaagtgatcaccggtatagacagtgacatcagacatctttcattagccctactcaaaaatggcggcaacgtaagtatcctgggccggaggtcggttgtaacccggaagtgcctttgtaaaggagggggtggttagacaatccggaagtggatggaatgaagagatgccacttggcggccatggcagctgtagtatcggcgactccgggtcaaggcccggtcgagtgcagtaccatgggcagcaccgggtatagggcagagacagctttgtgtcaactttgctgctgaacccctaggacccatcgttagagacctgcaggactcctttcctcatcccaggctcggaggagagtttgctgggactggtgggctggtttcctgctctggggggcggatcaccttcggggccgcctcttggagacaggggcgcctagggaacgaacaggttcgcttgagtcacttacccgccgccgcctaagacattgtgccaccctcaatccgacaatcgaagaaatcgatcattcgcacattttccccattgacttttcccatctctgttaacccacgagaatctaatgactggcatctgagaacccagagcctgggaccttagattgctgtaagctttctctggtgctaatatcagcaaaaagggtctgttgccgggtacgttcaagaggaaggtgcctcgtgaacacatctgctggtgggaaggcctaaagaactggaaagcccactctcttggaaccaccacacctgtttaaagaacctaagcaccatttaaagccactggaaatttgttgtctagtggttgtgggtgaataaaggagggcagaatggatgatttcatctccattagcctgctgtctctggctatgttggtgggatgttacgtggccggaatcattcccttggctgttaatttctcagaggaacgactgaagctggtgactgttttgggtgctggccttctctgtggaactgctctggcagtcatcgtgcctgaaggagtacatgccctttatgaagatattcttgaggatgccaaaacagttgtgcccagatcagctgcagacaagagcagaactttgaatggaaatgggacccaagtgggatcaagatcctggaggtttttttcaaagaattgtaacagaagatgaaacatggctttaccaacgatcctgaaggcaaaccacattcaaagcaatggctactgagaagtggaagtggtcagtcaaagcagaagtgggtcggttaagagcaaaggtcactggcaacagtatttggggatgtgcaagacattttacttgttgattttctagagtgccaatgaaccataacatctgcgtattatgagatgcgtattatggtttttaaaaagttacccaaagttttagcagaagaatgcccagaaatgcttgatcagagtcctccaccacgacaatgttcctgctcattgctctcatcagacaagggcaattttgccaggttttcaataggaaagttttgggcatcagctttatagtcctgatttggctccttccaacttctttttgtttcctaatcttaaaatctataaagggtacccatttttcttcagttaataatgtaaaaaagactgcattgacatggttaaatttccaggaccctcagttatttaggggtgaactaaatagctggtatcatcatttacaaaagtgtctcacacttgatagagcttatgttcagtaataatgtttatatttttaaatttttttaatcttttaattccatttttccacaagctttttgaagtccccttatattctgtgtatcaatagtttgtaccttttttttttctgagtggtatttcattgtttgcatgaaccatgtttggctattccttcaccagttggaagatgtatatatgggtggttcctggtttgggtgactatgaataaagtcactattaatgtc

SEQ ID NO: 421468 - DNA, 370 bp, Homo sapiens
tgaaattctttcacctccagaccaatgtttgaacagtttctgtctcacatagcttaacgctgtctttctcattttcactttagatccagaagcagcaaggtctagcaattccaaaatcaccaccacgctgggtctggttgtccatgctgcaggtagggttggattgcagtggaacttctttgttttctatcgcacaggggagaccttagtgtttatatttcagggaccgtcctcattgaatgctcttggactggcctttgaggaaaaggtttcttaatgaagtcctccaacacaagcacaagcttggtgtgctcagtgtcaggggtttgcaagctaagaatggtttctatactttttaatggtttaaaaa

SEQ ID NO: 421469 - DNA, 5673 bp, Homo sapiens
tctgtttcagccatcttcgataaaggcaaaaaggtaagggaaagtttccaagctttaggaagaattattttttttcaagacgctgtcttccgtactttcgttattaaacatacggctcaagtgatcaccggtatagacagtgacatcagacatctttcattagccctactcaaaaatggcggcaacgtaagtatcctgggccggaggtcggttgtaacccggaagtgcctttgtaaaggagggggtggttagacaatccggaagtggatggaatgaagagatgccacttggcggccatggcagctgtagtatcggcgactccgggtcaaggcccggtcgagtgcagtaccatgggcagcaccgggtatagggcagagacagctttgtgtcaactttgctgctgaacccctaggacccatcgttagagacctgcaggactcctttcctcatcccaggctcggaggagagtttgctgggactggtgggctggtttcctgctctggggggcggatcaccttcggggccgcctcttggagacaggggcgcctagggaacgaacaggttcgcttgagtcacttacccgccgccgcctaagacattgtgccaccctcaatccgacaatcgaagaaatcgatcattcgcacattttccccattgacttttcccatctctgttaacccacgagaatctaatgactggcatctgagaacccagagcctgggaccttagattgctgtaagctttctctggtgctaatatcagcaaaaagggtctgttgccgggtacgttcaagaggaaggtgcctcgtgaacacatctgctggtgggaaggcctaaagaactggaaagcccactctcttggaaccaccacacctgtttaaagaacctaagcaccatttaaagccactggaaatttgttgtctagtggttgtgggtgaataaaggagggcagaatggatgatttcatctccattagcctgctgtctctggctatgttggtgggatgttacgtggccggaatcattcccttggctgttaatttctcagaggaacgactgaagctggtgactgttttgggtgctggccttctctgtggaactgctctggcagtcatcgtgcctgaaggagtacatgccctttatgaagatattcttgagggaaaacaccaccaagcaagtgaaacacataatgtgattgcatcagacaaagcagcagaaaaatcagttgtccatgaacatgagcacagccacgaccacacacagctgcatgcctatattggtgtttccctcgttctgggcttcgttttcatgttgctggtggaccagattggtaactcccatgtgcattctactgacgatccagaagcagcaaggtctagcaattccaaaatcaccaccacgctgggtctggttgtccatgctgcagctgatggtgttgctttgggagcagcagcatctacttcacagaccagtgtccagttaattgtgtttgtggcaatcatgctacataaggcaccagctgcttttggactggtttccttcttgatgcatgctggcttagagcggaatcgaatcagaaagcacttgctggtctttgcattggcagcaccagttatgtccatggtgacatacttaggactgagtaagagcagtaaagaagccctttcagaggtgaacgccacgggagtggccatgcttttctctgccgggacatttctttatgttgccacagtacatgtcctccctgaggtgggcggaatagggcacagccacaagcccgatgccacgggagggagaggcctcagccgcctggaagtggcagccctggttctgggttgcctcatccctctcatcctgtcagtaggacaccagcattaaatgttcaaggtccagccttggtccagggccgtttgccatccagtgagaacagccggcacgtgacagctactcacttcctcagtctcttgtctcaccttgcgcatctctacatgtattcctagagtccagaggggaggtgaggttaaaacctgagtaatggaaaagcttttagagtagaaacacatttacgttgcagttagctatagacatcccattgtgttatcttttaaaaggcccttgacattttgcgttttaatatttctcttaaccctattctcagggaagatggaatttagttttaaggaaaagaggagaacttcatactcacaatgaaatagtgattatgaaaatacagtgttctgtaattaagctatgtctctttcttcttagtttagaggctctgctactttatccattgatttttaacatggttcccaccatgtaagactggtgctttagcatctatgccacatgcgttgatggaaggtcatagcacccactcacttagatgctaaaggtgattctagttaatctgggattagggtcaggaaaatgatagcaagacacattgaaagctctctttatactcaaaagagatatccattgaaaagggatgtctagagggatttaaacagctcctttggcacgtgcctctctgaatccagcctgccattccatcaaatggagcaggagaggtgggaggagcttctaaagaggtgactggtattttgtagcattccttgtcaagttctcctttgcagaatacctgtctccacattcctagagaggagccaagttctagtagtttcagttctaggctttccttcaagaacagtcagatcacaaagtgtctttggaaattaagggatattaaattttaagtgatttttggatggttattgatatctttgtagtagctttttttaaaagactaccaaaatgtatggttgtcctttttttttgttttttttttttttaattatttctcttagcagatcagcaatccctctagggacctaaatactaggtcagctttggcgacactgtgtcttctcacataaccacctgtagcaagatggatcataaatgagaagtgtttgcctattgatttaaagcttattggaatcatgtctcttgtctcttcgtcttttctttgcttttcttctaacttttccctctagcctctcctcgccacaatttgctgcttactgctggtgttaatatttgtgtgggatgaattcttatcaggacaaccacttctcgaactgtaataatgaagataataatatctttattctttatcccccttcaaagaaattacctttgtgtcaaatgccgctttgttgagcccttaaaataccacctcctcatgtgtaaattgacacaatcactaatctggtaatttaaacaattgagatagcaaaagtgtttaacagactaggataatttttttttcatatttgccaaaatttttgtaaaccctgtcttgtcaaataagtgtataatattgtattattaatttatttttactttctataccatttcaaaacacattacactaagggggaaccaagactagtttcttcagggcagtggacgtagtagtttgtaaaaacgttttctatgacgcataagctagcatgcctatgatttatttccttcatgaatttgtcactggatcagcagctgtggaaataaagcttgtgagccctctgctggccacagtgaggaaagtagcacaaataggatacagttgtatgtagtcattggcaacaattgcatacaattttactaccaagagaaggtatagtatggaaagtccaaatgacttccttgattggatgttaacagctgactggtgtgagacttgaggtttcatctagtccttcaaaactatatggttgcctagattctctctggaaactgactttgtcaaataaatagcagattgtagtgtctggtttggtttggacagtagtgctttctatcatattgttgtgtgcaatggtaatttgttctactggccaaagcctctttcagcagtgccttgccatcatgcttaaaagtttggctagtatatcttgctggatggagccttgaactccggcaaggattgaaccatctgacttccaaatttgccttcccctctggacctcactattaacaagcaaacctttcagggccctcttagctctcagaagctatgtatgggctttcccagattttaaagctgctgcctcgagaactactcatttctctcctggtcagcagacagaaatagccatactaatctcatagggctcaaatgcatcttcaggcagcagggaaccaagcagcgtggcacaggccttcttgactggaggaagagcttgctggcatggtgggcagtattccaggagaggccatgtccgtgttcacttcttggcacatttcagttccgttttcctcttgtttaaaactgcctctttagatgtggatgccttaatgctgtaacacatttgaaaacattggcaatacttaagttgctgccatgattacagatggaattattggctaccaaagagacgcaattgatgatgagaagcatgattcttgcttccatataaccaaagttaatcttaattgcaatttgactccgtttccttggtagggatagactttcttcagattccaagtgctctcttaaatggcaaattaagttaaagaatactactgctccattcccctcacttattctccagttaattgcttgtcagttccatttcaagaaagcagtgatgttccaggtttgattcagttttcctgtgcacactattgccaaatttttttttagcaaagattctgcactggaacgtagacagttggaaacagtactacctacctagaggttatgtgttttctctttctccccgctttcacctctttctttcccaattcaaaacagccaagtgagccctgttctggtattttgaatcattagagaaaagaaagggagtggctgttttgagttgtcctttctttgcagaaaggagaaaatgtgattgtgttttttttttaccagcctacttctaagtgtcactgcctggtttttctctttttcaaggattagaactaagaggacacaccagcatcggagtgtattaagcccctgaaacacatggtagctagggactgaacacaggaaccgtatgacagcagcacaaacccccaaaggatgttcctgccttgtgggcccctgagccccttgggagactgagaatcatgaccagattcatccagaactgctgcagtgttaagtgaaaatcctctgtagttgttctgcagaggaaccttccttccattagaaaatttctgctcaatacagaatggtccacatcacccaaagtgcactgttggagatgctgtgaaattaaaacctctttgtacctgagacatctagattcacctcaggaggcctgaaggaaatgtgtaacttgtgggaaagaactagacaaccatttaggaattctctagatatactcagcctaacccagtggcttaacacaaggagattggctttgatctttttttcttgtggcatcttccagcaagttagaagtctcatgggataagactgcagttcccctggttcaatagctggaacagtgattttaaatgtccctttttctggatcccttgtaaacatgaaatcattccatggatggctgccttataattttgtctctttccactttaattgtgaatggttaaaaaaatgctgttttctgatattaaatttttattagtgcataccttaa

SEQ ID NO: 421470 - DNA, 5565 bp, Homo sapiens
tctgtttcagccatcttcgataaaggcaaaaaggtaagggaaagtttccaagctttaggaagaattattttttttcaagacgctgtcttccgtactttcgttattaaacatacggctcaagtgatcaccggtatagacagtgacatcagacatctttcattagccctactcaaaaatggcggcaacgtaagtatcctgggccggaggtcggttgtaacccggaagtgcctttgtaaaggagggggtggttagacaatccggaagtggatggaatgaagagatgccacttggcggccatggcagctgtagtatcggcgactccgggtcaaggcccggtcgagtgcagtaccatgggcagcaccgggtatagggcagagacagctttgtgtcaactttgctgctgaacccctaggacccatcgttagagacctgcaggactcctttcctcatcccaggctcggaggagagtttgctgggactggtgggctggtttcctgctctggggggcggatcaccttcggggccgcctcttggagacaggggcgcctagggaacgaacaggttcgcttgagtcacttacccgccgccgcctaagacattgtgccaccctcaatccgacaatcgaagaaatcgatcattcgcacattttccccattgacttttcccatctctgttaacccacgagaatctaatgactggcatctgagaacccagagcctgggaccttagattgctgtaagctttctctggtgctaatatcagcaaaaagggtctgttgccgggtacgttcaagaggaaggtgcctcgtgaacacatctgctggtgggaaggcctaaagaactggaaagcccactctcttggaaccaccacacctgtttaaagaacctaagcaccatttaaagccactggaaatttgttgtctagtggttgtgggtgaataaaggagggcagaatggatgatttcatctccattagcctgctgtctctggctatgttggtgggatgttacgtggccggaatcattcccttggctgttaatttctcagaggaacgactgaagctggtgactgttttgggtgctggccttctctgtggaactgctctggcagtcatcgtgcctgaaggagtacatgccctttatgaagatattcttgagggaaaacaccaccaagcaagtgaaacacataatgtgattgcatcagacaaagcagcagaaaaatcagttgtccatgaacatgagcacagccacgaccacacacagctgcatgcctatattggtgtttccctcgttctgggcttcgttttcatgttgctggtggaccagattggtaactcccatgtgcattctactgacgatccagaagcagcaaggtctagcaattccaaaatcaccaccacgctgggtctggttgtccatgctgcagctgatggtgttgctttgggagcagcagcatctacttcacagaccagtgtccagttaattgtgtttgtggcaatcatgctacataaggcaccagctgcttttggactggtttccttcttgatgcatgctggcttagagcggaatcgaatcagaaagcacttgctggtctttgcattggcagcaccagttatgtccatggtgacatacttaggactgagtaagagcagtaaagaagccctttcagaggtgaacgccacgggagtggccatgcttttctctgccgggacatttctttatgttgccacagtacatgtcctccctgaggtgggcggaatagggcacagccacaagcccgatgccacgggagggagaggcctcagccgcctggaagtggcagccctggttctgggttgcctcatccctctcatcctgtcagtaggacaccagcattaaatgttcaaggtccagccttggtccagggccgtttgccatccagtgagaacagccggcacgtgacagctactcacttcctcagtctcttgtctcaccttgcgcatctctacatgtattcctagagtccagaggggaggtgaggttaaaacctgagtaatggaaaagcttttagagtagaaacacatttacgttgcagttagctatagacatcccattgtgttatcttttaaaaggcccttgacattttgcgttttaatatttctcttaaccctattctcagggaagatggaatttagttttaaggaaaagaggagaacttcatactcacaatgaaatagtgattatgctgctactttatccattgatttttaacatggttcccaccatgtaagactggtgctttagcatctatgccacatgcgttgatggaaggtcatagcacccactcacttagatgctaaaggtgattctagttaatctgggattagggtcaggaaaatgatagcaagacacattgaaagctctctttatactcaaaagagatatccattgtccagcctgccattccatcaaatggagcaggagaggtgggaggagcttctaaagaggtgactggtattttgtagcattccttgtcaagttctcctttgcagaatacctgtctccacattcctagagaggagccaagttctagtagtttcagttctaggctttccttcaagaacagtcagatcacaaagtgtctttggaaattaagggatattaaattttaagtgatttttggatggttattgatatctttgtagtagctttttttaaaagactaccaaaatgtatggttgtcctttttttttgttttttttttttttaattatttctcttagcagatcagcaatccctctagggacctaaatactaggtcagctttggcgacactgtgtcttctcacataaccacctgtagcaagatggatcataaatgagaagtgtttgcctattgatttaaagcttattggaatcatgtctcttgtctcttcgtcttttctttgcttttcttctaacttttccctctagcctctcctcgccacaatttgctgcttactgctggtgttaatatttgtgtgggatgaattcttatcaggacaaccacttctcgaactgtaataatgaagataataatatctttattctttatcccccttcaaagaaattacctttgtgtcaaatgccgctttgttgagcccttaaaataccacctcctcatgtgtaaattgacacaatcactaatctggtaatttaaacaattgagatagcaaaagtgtttaacagactaggataatttttttttcatatttgccaaaatttttgtaaaccctgtcttgtcaaataagtgtataatattgtattattaatttatttttactttctataccatttcaaaacacattacactaagggggaaccaagactagtttcttcagggcagtggacgtagtagtttgtaaaaacgttttctatgacgcataagctagcatgcctatgatttatttccttcatgaatttgtcactggatcagcagctgtggaaataaagcttgtgagccctctgctggccacagtgaggaaagtagcacaaataggatacagttgtatgtagtcattggcaacaattgcatacaattttactaccaagagaaggtatagtatggaaagtccaaatgacttccttgattggatgttaacagctgactggtgtgagacttgaggtttcatctagtccttcaaaactatatggttgcctagattctctctggaaactgactttgtcaaataaatagcagattgtagtgtctggtttggtttggacagtagtgctttctatcatattgttgtgtgcaatggtaatttgttctactggccaaagcctctttcagcagtgccttgccatcatgcttaaaagtttggctagtatatcttgctggatggagccttgaactccggcaaggattgaaccatctgacttccaaatttgccttcccctctggacctcactattaacaagcaaacctttcagggccctcttagctctcagaagctatgtatgggctttcccagattttaaagctgctgcctcgagaactactcatttctctcctggtcagcagacagaaatagccatactaatctcatagggctcaaatgcatcttcaggcagcagggaaccaagcagcgtggcacaggccttcttgactggaggaagagcttgctggcatggtgggcagtattccaggagaggccatgtccgtgttcacttcttggcacatttcagttccgttttcctcttgtttaaaactgcctctttagatgtggatgccttaatgctgtaacacatttgaaaacattggcaatacttaagttgctgccatgattacagatggaattattggctaccaaagagacgcaattgatgatgagaagcatgattcttgcttccatataaccaaagttaatcttaattgcaatttgactccgtttccttggtagggatagactttcttcagattccaagtgctctcttaaatggcaaattaagttaaagaatactactgctccattcccctcacttattctccagttaattgcttgtcagttccatttcaagaaagcagtgatgttccaggtttgattcagttttcctgtgcacactattgccaaatttttttttagcaaagattctgcactggaacgtagacagttggaaacagtactacctacctagaggttatgtgttttctctttctccccgctttcacctctttctttcccaattcaaaacagccaagtgagccctgttctggtattttgaatcattagagaaaagaaagggagtggctgttttgagttgtcctttctttgcagaaaggagaaaatgtgattgtgttttttttttaccagcctacttctaagtgtcactgcctggtttttctctttttcaaggattagaactaagaggacacaccagcatcggagtgtattaagcccctgaaacacatggtagctagggactgaacacaggaaccgtatgacagcagcacaaacccccaaaggatgttcctgccttgtgggcccctgagccccttgggagactgagaatcatgaccagattcatccagaactgctgcagtgttaagtgaaaatcctctgtagttgttctgcagaggaaccttccttccattagaaaatttctgctcaatacagaatggtccacatcacccaaagtgcactgttggagatgctgtgaaattaaaacctctttgtacctgagacatctagattcacctcaggaggcctgaaggaaatgtgtaacttgtgggaaagaactagacaaccatttaggaattctctagatatactcagcctaacccagtggcttaacacaaggagattggctttgatctttttttcttgtggcatcttccagcaagttagaagtctcatgggataagactgcagttcccctggttcaatagctggaacagtgattttaaatgtccctttttctggatcccttgtaaacatgaaatcattccatggatggctgccttataattttgtctctttccactttaattgtgaatggttaaaaaaatgctgttttctgatattaaatttttattagtgcataccttaa

SEQ ID NO: 421471 - DNA, 6288 bp, Homo sapiens
tctgtttcagccatcttcgataaaggcaaaaaggtaagggaaagtttccaagctttaggaagaattattttttttcaagacgctgtcttccgtactttcgttattaaacatacggctcaagtgatcaccggtatagacagtgacatcagacatctttcattagccctactcaaaaatggcggcaacgtaagtatcctgggccggaggtcggttgtaacccggaagtgcctttgtaaaggagggggtggttagacaatccggaagtggatggaatgaagagatgccacttggcggccatggcagctgtagtatcggcgactccgggtcaaggcccggtcgagtgcagtaccatgggcagcaccgggtatagggcagagacagctttgtgtcaactttgctgctgaacccctaggacccatcgttagagacctgcaggactcctttcctcatcccaggctcggaggagagtttgctgggactggtgggctggtttcctgctctggggggcggatcaccttcggggccgcctcttggagacaggggcgcctagggaacgaacaggttcgcttgagtcacttacccgccgccgcctaagacattgtgccaccctcaatccgacaatcgaagaaatcgatcattcgcacattttccccattgacttttcccatctctgttaacccacgagaatctaatgactggcatctgagaacccagagcctgggaccttagattgctgtaagctttctctggtgctaatatcagcaaaaagggtctgttgccgggtacgttcaagaggaaggtgcctcgtgaacacatctgctggtgggaaggcctaaagaactggaaagcccactctcttggaaccaccacacctgtttaaagaacctaagcaccatttaaagccactggaaatttgttgtctagtggttgtgggtgaataaaggagggcagaatggatgatttcatctccattagcctgctgtctctggctatgttggtgggatgttacgtggccggaatcattcccttggctgttaatttctcagaggaacgactgaagctggtgactgttttgggtgctggccttctctgtggaactgctctggcagtcatcgtgcctgaaggagtacatgccctttatgaagatattcttgagggaaaacaccaccaagcaagtgaaacacataatgtgattgcatcagacaaagcagcagaaaaatcagttgtccatgaacatgagcacagccacgaccacacacagctgcatgcctatattggtgtttccctcgttctgggcttcgttttcatgttgctggtggaccagattggtaactcccatgtgcattctactgacgatccagaagcagcaaggtctagcaattccaaaatcaccaccacgctgggtctggttgtccatgctgcagctgatggtgttgctttgggagcagcagcatctacttcacagaccagtgtccagttaattgtgtttgtggcaatcatgctacataaggcaccagctgcttttggactggtttccttcttgatgcatgctggcttagagcggaatcgaatcagaaagcacttgctggtctttgcattggcagcaccagttatgtccatggtgacatacttaggactgagtaagagcagtaaagaagccctttcagaggtgaacgccacgggagtggccatgcttttctctgccgggacatttctttatgttgccacagtacatgtcctccctgaggtgggcggaatagggcacagccacaagcccgatgccacgggagggagaggcctcagccgcctggaagtggcagccctggttctgggttgcctcatccctctcatcctgtcagtaggacaccagcattaaatgttcaaggtccagccttggtccagggccgtttgccatccagtgagaacagccggcacgtgacagctactcacttcctcagtctcttgtctcaccttgcgcatctctacatgtattcctagagtccagaggggaggtgaggttaaaacctgagtaatggaaaagcttttagagtagaaacacatttacgttgcagttagctatagacatcccattgtgttatcttttaaaaggcccttgacattttgcgttttaatatttctcttaaccctattctcagggaagatggaatttagttttaaggaaaagaggagaacttcatactcacaatgaaatagtgattatgaaaatacagtgttctgtaattaagctatgtctctttcttcttagtttagaggctctgctactttatccattgatttttaacatggttcccaccatgtaagactggtgctttagcatctatgccacatgcgttgatggaaggtcatagcacccactcacttagatgctaaaggtgattctagttaatctgggattagggtcaggaaaatgatagcaagacacattgaaagctctctttatactcaaaagagatatccattgaaaagggatgtctagagggatttaaacagctcctttggcacgtgcctctctgaatccagcctgccattccatcaaatggagcaggagaggtgggaggagcttctaaagaggtgactggtattttgtagcattccttgtcaagttctcctttgcagaatacctgtctccacattcctagagaggagccaagttctagtagtttcagttctaggctttccttcaagaacagtcagatcacaaagtgtctttggaaattaagggatattaaattttaagtgatttttggatggttattgatatctttgtagtagctttttttaaaagactaccaaaatgtatggttgtcctttttttttgttttttttttttttaattatttctcttagcagatcagcaatccctctagggacctaaatactaggtcagctttggcgacactgtgtcttctcacataaccacctgtagcaagatggatcataaatgagaagtgtttgcctattgatttaaagcttattggaatcatgtctcttgtctcttcgtcttttctttgcttttcttctaacttttccctctagcctctcctcgccacaatttgctgcttactgctggtgttaatatttgtgtgggatgaattcttatcaggacaaccacttctcgaactgtaataatgaagataataatatctttattctttatcccccttcaaagaaattacctttgtgtcaaatgccgctttgttgagcccttaaaataccacctcctcatgtgtaaattgacacaatcactaatctggtaatttaaacaattgagatagcaaaagtgtttaacagactaggataatttttttttcatatttgccaaaatttttgtaaaccctgtcttgtcaaataagtgtataatattgtattattaatttatttttactttctataccatttcaaaacacattacactaagggggaaccaagactagtttcttcagggcagtggacgtagtagtttgtaaaaacgttttctatgacgcataagctagcatgcctatgatttatttccttcatgaatttgtcactggatcagcagctgtggaaataaagcttgtgagccctctgctggccacagtgaggaaagtagcacaaataggatacagttgtatgtagtcattggcaacaattgcatacaattttactaccaagagaaggtatagtatggaaagtccaaatgacttccttgattggatgttaacagctgactggtgtgagacttgaggtttcatctagtccttcaaaactatatggttgcctagattctctctggaaactgactttgtcaaataaatagcagattgtagtgtctggtttggtttggacagtagtgctttctatcatattgttgtgtgcaatggtaatttgttctactggccaaagcctctttcagcagtgccttgccatcatgcttaaaagtttggctagtatatcttgctggatggagccttgaactccggcaaggattgaaccatctgacttccaaatttgccttcccctctggacctcactattaacaagcaaacctttcagggccctcttagctctcagaagctatgtatgggctttcccagattttaaagctgctgcctcgagaactactcatttctctcctggtcagcagacagaaatagccatactaatctcatagggctcaaatgcatcttcaggcagcagggaaccaagcagcgtggcacaggccttcttgactggaggaagagcttgctggcatggtgggcagtattccaggagaggccatgtccgtgttcacttcttggcacatttcagttccgttttcctcttgtttaaaactgcctctttagatgtggatgccttaatgctgtaacacatttgaaaacattggcaatacttaagttgctgccatgattacagatggaattattggctaccaaagagacgcaattgatgatgagaagcatgattcttgcttccatataaccaaagttaatcttaattgcaatttgactccgtttccttggtagggatagactttcttcagattccaagtgctctcttaaatggcaaattaagttaaagaatactactgctccattcccctcacttattctccagttaattgcttgtcagttccatttcaagaaagcagtgatgttccaggtttgattcagttttcctgtgcacactattgccaaatttttttttagcaaagattctgcactggaacgtagacagttggaaacagtactacctacctagaggttatgtgttttctctttctccccgctttcacctctttctttcccaattcaaaacagccaagtgagccctgttctggtattttgaatcattagagaaaagaaagggagtggctgttttgagttgtcctttctttgcagaaaggagaaaatgtgattgtgttttttttttaccagcctacttctaagtgtcactgcctggtttttctctttttcaaggattagaactaagaggacacaccagcatcggagtgtattaagcccctgaaacacatggtagctagggactgaacacaggaaccgtatgacagcagcacaaacccccaaaggatgttcctgccttgtgggcccctgagccccttgggagactgagaatcatgaccagattcatccagaactgctgcagtgttaagtgaaaatcctctgtagttgttctgcagaggaaccttccttccattagaaaatttctgctcaatacagaatggtccacatcacccaaagtgcactgttggagatgctgtgaaattaaaacctctttgtacctgagacatctagattcacctcaggaggcctgaaggaaatgtgtaacttgtgggaaagaactagacaaccatttaggaattctctagatatactcagcctaacccagtggcttaacacaaggagattggctttgatctttttttcttgtggcatcttccagcaagttagaagtctcatgggataagactgcagttcccctggttcaatagctggaacagtgattttaaatgtccctttttctggatcccttgtaaacatgaaatcattccatggatggctgccttataattttgtctctttccactttaattgtgaatggttaaaaaaatgctgttttctgatattaaatttttattagtgcataccttaaaaaaaaaaaaaacaaaaaaaaaaaaagaggggagagaaagaaaaaaaaaaaaccccacaaggaggaacaaaaaagaaaaagaaaaacacaacacaaaaaaaaaggagaaaaaagggggccccaaaaagaagagaaagaaaaaaaagagcaaagaaaaggggccagcaagttaaaggcggcgcgcgctgggcaacacccggcgaccggggaccacctcgtgagaagagcaaccccatctaactctgcgaagggcggggggaaccacaataagtggcgcacaaagtaaccccccaaaaacgaagataaaaacacccccctgaaagcggaaaaacaatagaaggcaccattcacagcgaggaatcttagtgggggggtaaacccctaacaggcgacaaatcacgccggacgacacaggcagcagaatcgggcaaccaccagggaggatcccacccattcgcacaacgtatttcacccgcgggatgatctgctacacaacccccggcccaccacctctcgtccctcacgacaaccatagtccaactcagaccgacgaacaatagccagcacgagaaatcgagaacagaatacaaaacccgatcagcagaacaggggaaa

SEQ ID NO: 421472 - DNA, 5393 bp, Homo sapiens
tctgtttcagccatcttcgataaaggcaaaaaggtaagggaaagtttccaagctttaggaagaattattttttttcaagacgctgtcttccgtactttcgttattaaacatacggctcaagtgatcaccggtatagacagtgacatcagacatctttcattagccctactcaaaaatggcggcaacgtaagtatcctgggccggaggtcggttgtaacccggaagtgcctttgtaaaggagggggtggttagacaatccggaagtggatggaatgaagagatgccacttggcggccatggcagctgtagtatcggcgactccgggtcaaggcccggtcgagtgcagtaccatgggcagcaccgggtatagggcagagacagctttgtgtcaactttgctgctgaacccctaggacccatcgttagagacctgcaggactcctttcctcatcccaggctcggaggagagtttgctgggactggtgggctggtttcctgctctggggggcggatcaccttcggggccgcctcttggagacaggggcgcctagggaacgaacaggttcgcttgagtcacttacccgccgccgcctaagacattgtgccaccctcaatccgacaatcgaagaaatcgatcattcgcacattttccccattgacttttcccatctctgttaacccacgagaatctaatgactggcatctgagaacccagagcctgggaccttagattgctgtaagctttctctggtgctaatatcagcaaaaagggtctgttgccgggtacgttcaagaggaaggtgcctcgtgaacacatctgctggtgggaaggcctaaagaactggaaagcccactctcttggaaccaccacacctgtttaaagaacctaagcaccatttaaagccactggaaatttgttgtctagtggttgtgggtgaataaaggagggcagaatggatgatttcatctccattagcctgctgtctctggctatgttggtgggatgttacgtggccggaatcattcccttggctgttaatttctcagaggaacgactgaagctggtgactgttttgggtgctggccttctctgtggaactgctctggcagtcatcgtgcctgaaggagtacatgccctttatgaagatattcttgagggaaaacaccaccaagcaagtgaaacacataatgtgattgcatcagacaaagcagcagaaaaatcagttgtccatgaacatgagcacagccacgaccacacacagctgcatgcctatattggtgtttccctcgttctgggcttcgttttcatgttgctggtggaccagattggtaactcccatgtgcattctactgacgatccagaagcagcaaggtctagcaattccaaaatcaccaccacgctgggtctggttgtccatgctgcagctgatggtgttgctttgggagcagcagcatctacttcacagaccagtgtccagttaattgtgtttgtggcaatcatgctacataaggcaccagctgcttttggactggtttccttcttgatgcatgctggcttagagcggaatcgaatcagaaagcacttgctggtctttgcattggcagcaccagttatgtccatggtgacatacttaggactgagtaagagcagtaaagaagccctttcagaggtgaacgccacgggagtggccatgcttttctctgccgggacatttctttatgttgccacagtacatgtcctccctgaggtgggcggaatagggcacagccacaagcccgatgccacgggagggagaggcctcagccgcctggaagtggcagccctggttctgggttgcctcatccctctcatcctgtcagtaggacaccagcattaaatgttcaaggtccagccttggtccagggccgtttgccatccagtgagaacagccggcacgtgacagctactcacttcctcagtctcttgtctcaccttgcgcatctctacatgtattcctagagtccagaggggaggtgaggttaaaacctgagtaatggaaaagcttttagagtagaaacacatttacgttgcagttagctatagacatcccattgtgttatcttttaaaaggcccttgacattttgcgttttaatatttctcttaaccctattctcagggaagatggaatttagttttaaggaaaagaggagaacttcatactcacaatgaaatagtgattatgaaaatacagtgttctgtaattaagctatgtctctttcttcttagtttagaggctctgctactttatccattgatttttaacatggttcccaccatgtaagactggtgctttagcatctatgccacatgcgttgatggaaggtcatagcacccactcacttagatgctaaaggtgattctagttaatctgggattagggtcaggaaaatgatagcaagacacattgaaagctctctttatactcaaaagagatatccattgaaaagggatgtctagagggatttaaacagctcctttggcacgtgcctctctgaatccagcctgccattccatcaaatggagcaggagaggtgggaggagcttctaaagaggtgactggtattttgtagcattccttgtcaagttctcctttgcagaatacctgtctccacattcctagagaggagccaagttctagtagtttcagttctaggctttccttcaagaacagtcagatcacaaagtgtctttggaaattaagggatattaaattttaagtgatttttggatggttattgatatctttgtagtagctttttttaaaagactaccaaaatgtatggttgtcctttttttttgttttttttttttttaattatttctcttagcagatcagcaatccctctagggacctaaatactaggtcagctttggcgacactgtgtcttctcacataaccacctgtagcaagatggatcataaatgagaagtgtttgcctattgatttaaagcttattggaatcatgtctcttgtctcttcgtcttttctttgcttttcttctaacttttccctctagcctctcctcgccacaatttgctgcttactgctggtgttaatatttgtgtgggatgaattcttatcaggacaaccacttctcgaactgtaataatgaagataataatatctttattctttatcccccttcaaagaaattacctttgtgtcaaatgccgctttgttgagcccttaaaataccacctcctcatgtgtaaattgacacaatcactaatctggtaatttaaacaattgagatagcaaaagtgtttaacagactaggataatttttttttcatatttgccaaaatttttgtaaaccctgtcttgtcaaataagtgtataatattgtattattaatttatttttactttctataccatttcaaaacacattacactaagggggaaccaagactagtttcttcagggcagtggacgtagtagtttgtaaaaacgttttctatgacgcataagctagcatgcctatgatttatttccttcatgaatttgtcactggatcagcagctgtggaaataaagcttgtgagccctctgctggccacagtgaggaaagtagcacaaataggatacagttgtatgtagtcattggcaacaattgcatacaattttactaccaagagaaggtatagtatggaaagtccaaatgacttccttgattggatgttaacagctgactggtgtgagacttgaggtttcatctagtccttcaaaactatatggttgcctagattctctctggaaactgactttgtcaaataaatagcagattgtagtgtctggtttggtttggacagtagtgctttctatcatattgttgtgtgcaatggtaatttgttctactggccaaagcctctttcagcagtgccttgccatcatgcttaaaagtttggctagtatatcttgctggatggagccttgaactccggcaaggattgaaccatctgacttccaaatttgccttcccctctggacctcactattaacaagcaaacctttcagggccctcttagctctcagaagctatgtatgggctttcccagattttaaagctgctgcctcgagaactactcatttctctcctggtcagcagacagaaatagccatactaatctcatagggctcaaatgcatcttcaggcagcagggaaccaagcagcgtggcacaggccttcttgactggaggaagagcttgctggcatggtgggcagtattccaggagaggccatgtccgtgttcacttcttggcacatttcagttccgttttcctcttgtttaaaactgcctctttagatgtggatgccttaatgctgtaacacatttgaaaacattggcaatacttaagttgctgccatgattacagatggaattattggctaccaaagagacgcaattgatgatgagaagcatgattcttgcttccatataaccaaagttaatcttaattgcaatttgactccgtttccttggtagggatagactttcttcagattccaagtgctctcttaaatggcaaattaagttaaagaatactactgctccattcccctcacttattctccagttaattgcttgtcagttccatttcaagaaagcagtgatgttccaggtttgattcagttttcctgtgcacactattgccaaatttttttttagcaaagattctgcactggaacgtagacagttggaaacagtactacctacctagaggttatgtgttttctctttctccccgctttcacctctttctttcccaattcaaaacagccaagtgagccctgttctggtattttgaatcattagagaaaagaaagggagtggctgttttgagttgtcctttctttgcagaaaggagaaaatgtgattgtgttttttttttaccagcctacttctaagtgtcactgcctggtttttctctttttcaaggattagaactaagaggacacaccagcatcggagtgtattaagcccctgaaacacatggtagctagggactgaacacaggaaccgtatgacagcagcacaaacccccaaaggatgttcctgccttgtgggcccctgagccccttgggagactgagaatcatgaccagattcatccagaactgctgcagtgttaagtgaaaatcctctgtagttgttctgcagaggaaccttccttccattagaaaatttctgctcaatacagaatggtccacatcacccaaagtgcactgttggagatgctgtgaaattaaaacctctttgtacctgagacatctagattcacctcaggaggcctgaagggtggaacttttggaatagcaacctttaggatttctaattaccacctccggggttt

SEQ ID NO: 421473 - DNA, 2994 bp, Homo sapiens
gcggccgcaagccgtcgccccctttaagagcctgctccgcgggactaacgttcgaacgggccctggcgcccctcctcgggctccgattggccgtgcgcggcgcacgagggcgcgccggccagccccggaacggttggcggcccttcgtgattggcggtcgagaagcctatataaggcgcggggcagccaggctgccctgtttagcgaccggacccgaaacggggaagttgtcttgtgtggagaggttagtagagcagcgcgcgcgtcaccagagtcgtttctcttcggagtcttaggtgatcgagggtgtgcccagggggcggacttgtttgcgcctcccgttccctcccaatttccaaacgtgtcaccccggcgccgacggccctgtgcaggggaagcagatggagttcaagctggaggctcatcgcatcgtcagcatctctctgggcaagatctacaactcgcgggtccagcgcggcggcatcaagctgcataagaacctcctggtctcgctggtgctgcgcagcgcccgccaagtctacctgagcgacccgtgccccggcctctacctggccggtcccgctgggaccccggcgccgccaccgcagcagcagcccggggagccggcggccgggccacccgccggctggggagagccgcccccgcccgccgctcgtgcctcttggccggagaccgagccgcagccggagcgctcctccgtctcagacgcgccgcgggtaggggacgaggtgccggtggccacggtgactggagtcggggacgtttttcagggcggagaggcggacgcgacggaagctgcctggagccgcgtggaggggccgcgccaggcggcggccagagaagccgagggtaccgccggaggctggggcgtcttccccgaggtatctcgtgccgcgcgccgcccctgcggctgccccctaggcggggaggacccgccgggtacaccggccgcgaccccccgcgctgcctgctgctgcgcgccgcgaccagcggaggacgagccccccgcgccgcccgcggtgtgccccaggaagcgctgcgcggcgggggtgggcggcggcccagcgggctgcccggcgcccggctcgaccccgctcaagaagccccgccggaacttagagcagccgccgagtggaggagaggacgacgacgcggaggagatggagaccgggaacgtggctaacctcatcagcatcttcggttccagtttctcgggactcctacggaaaagccccgggggcggcagagaggaagaggagggagaggagagcggtccggaagccgccgagcccgggcagatctgctgcgataagccggtgctgagagacatgaacccctggagcacagccatcgtggccttctgagcccttggcccccctgcggggaggaggtggagcagcgggcgtccccgaagtgagggccaggcccttcccggctgcgaggacgcccagagaccgcgggcgctgagcgcgttgggcagactggttgcctctgggcatcgcaaactgcccccgggcgcatctggcttatctggagacctgggagcttgaggctcattggaagaggacgatcgttaacttttgtgtttgtgtatgtctgtgtatgtaagtttgtcttgtggcattaagactattttgctcttctggaatgcaccactccttccccagggtttaagagattgggggcagacagggactttcctctgccggctgcgtggagaaggaagcggctaaaaggtttgggccggggagttccccattcgttctccggggagggagggactttacacctacccctcaccggaaagctagacccgcttcagggccaggagtggcgtttccgcacaggatttcctaagacgagagggatttagccaagagcacagacttggattccttctgtccctccccacctttctctcccaatgaagaaacgtttatatcctgtgattactctaggaaaggggcgtattaacggtcctttgcttccccgcaggggagaaaaagcttgacgaacttcacagaagagttcaagcttggaaataatggagtttatagagaaaagatatatttttaaaagctctaggtcagaagtactacacagtgcttttaaaaagtgtttaatgagagtttacagacagaagcccgaagtggaaagaccttatggttttgtagatatggtgactccagtctttgttgtataaaggttgggggagctgataaggtttttgtacagtattttctccttcgttgtattgatttttgtataaaaatgtaacttctacgtgtctaacacgtattaaatattttgaagcaacgtaactgcctgcttgtctgtaataacctgcctgggttgggagggaagtgggaggagggaaaccagggcctgagctagaaaattgaaggtgtggttcttagtatcagtcattcgcagactgaggacattgtttactgactccactaagtatcaagagagacacgtttaatttttcctcctagatcagaggactgctattagatactaatatcggcgacctgtcaggttctagaaacctgccactacaactgccttttctaaggtcagtttagaccaatttgtcacccaatatgtgggtgtctaatactaagtaatttaaccaacttttgaagccccgcttatccacaaaaatgtttttcagcaaaactttgtttcctgttaagctattaatacgggtcatcttttagctttgtaattgaaaaaaaaaaagtttagatagtagtttaccttaaaagcccattcgaactgacataggaagatgaaagagactgacttgtccaaattgtcaggtccacctctgcatcacagtggatgtcaggatgtaaattttcagtttttctcttacatctagaaagtaaatatattgctgagagggaaattgtttgcatcaaaccagataaggaaggagggctaggcaaatttagttctcatttagca

SEQ ID NO: 421474 - DNA, 2941 bp, Homo sapiens
gcggccgcaagccgtcgccccctttaagagcctgctccgcgggactaacgttcgaacgggccctggcgcccctcctcgggctccgattggccgtgcgcggcgcacgagggcgcgccggccagccccggaacggttggcggcccttcgtgattggcggtcgagaagcctatataaggcgcggggcagccaggctgccctgtttagcgaccggacccgaaacggggaagttgtcttgtgtggagaggttagtagagcagcgcgcgcgtcaccagagtcgtttctcttcggagtcttaggtgatcgagggtgtgcccagggggcggacttgtttgcgcctcccgttccctcccaatttccaaacgtgtcaccccggcgccgacggccctgtgcaggggaagcagatggagttcaagctggaggctcatcgcatcgtcagcatctctctgggcaagatctacaactcgcgggtccagcgcggcggcatcaagctgcataagaacctcctggtctcgctggtgctgcgcagcgcccgccaagtctacctgagcgacccgtgccccggcctctacctggccggtcccgctgggaccccggcgccgccaccgcagcagcagcccggggagccggcggccgggccacccgccggctggggagagccgcccccgcccgccgctcgtgcctcttggccggagaccgagccgcagccggagcgctcctccgtctcagacgcgccgcgggtaggggacgaggtgccggtggccacggtgactggagtcggggacgtttttcagggcggagaggcggacgcgacggaagctgcctggagccgcgtggaggggccgcgccaggcggcggccagagaagccgagggtaccgccggaggctggggcgtcttccccgaggtatctcgtgccgcgcgccgcccctgcggctgccccctaggcggggaggacccgccgggtacaccggccgcgaccccccgcgctgcctgctgctgcgcgccgcgaccagcggaggacgagccccccgcgccgcccgcggtgtgccccaggaagcgctgcgcggcgggggtgggcggcggcccagcgggctgcccggcgcccggctcgaccccgctcaagaagccccgccggaacttagagcagccgccgagtggaggagaggacgacgacgcggaggagatggagaccgggaacgtggctaacctcatcagcatcttcggttccagtttctcgggactcctacggaaaagccccgggggcggcagagaggaagaggagggagaggagagcggtccggaagccgccgagcccgggcagatctgctgcgataagccggtgctgagagacatgaacccctggagcacagccatcgtggccttctgagcccttggcccccctgcggggaggaggtggagcagcgggcgtccccgaagtgagggccaggcccttcccggctgcgaggacgcccagagaccgcgggcgctgagcgcgttgggcagactggttgcctctgggcatcgcaaactgcccccgggcgcatctggcttatctggagacctgggagcttgaggctcattggaagaggacgatcgttaacttttgtgtttgtgtatgtctgtgtatgtaagtttgtcttgtggcattaagactattttgctcttctggaatgcaccactccttccccagggtttaagagattgggggcagacagggactttcctctgccggctgcgtggagaaggaagcggctaaaaggtttgggccggggagttccccattcgttctccggggagggagggactttacacctacccctcaccggaaagctagacccgcttcagggccaggagtggcgtttccgcacaggatttcctaagacgagagggatttagccaagagcacagacttggattccttctgtccctccccacctttctctcccaatgaagaaacgtttatatcctgtgattactctaggaaaggggcgtattaacggtcctttgcttccccgcaggggagaaaaagcttgacgaacttcacagaagagttcaagcttggaaataatggagtttatagagaaaagatatatttttaaaagctctaggtcagaagtactacacagtgcttttaaaaagtgtttaatgagagtttacagacagaagcccgaagtggaaagaccttatggttttgtagatatggtgactccagtctttgttgtataaaggttgggggagctgataaggtttttgtacagtattttctccttcgttgtattgatttttgtataaaaatgtaacttctacgtgtctaacacgtattaaatattttgaaaaaaaaaaaaaaaaaaaaaaaaaaaaaaaaaaaaaaaaaaaaaagggggggggggaaaaaaaaacggcggagggggcgcccaagatagacgtgaacccccaccatattggagcgtacaaaaaggggtggcccccaaatgtgaggcacgacgactatcaataaagaacacagggaaggcggacgcgcaagaacaacagagacgcactacagtgcggaaacaacggcgctcacgaggaggcaacatcggaggaagaaaggagacaccaaaaacgaagtgggggatgaggagcacaagtgggagcaagacccacacaaagaagaaattaagcgccaacacgggaaaaaaaaaaaccaaaagagggtcaacgcgggagaccacagccggggaaaaacagtggcgaggataagaacagacacacaagagacaatgagaacaaaacaactcatacaacgcagcgctccagcacaaccacacacgaactcaacaaaacaacaaacaaaccaaacaaccaacaatgagaacaaggaaaaaacaaaaaaaaagacaaacaacgcaccgccagaaagcaacaaaaaaaaacaacacaaagacaaacaacaacaacaag

SEQ ID NO: 421475 - DNA, 766 bp, Homo sapiens
agcgctggtggtggcgcgcggcgcggcgcggcgatggcggcgggtggcagcgatccgcgggctggcgacgtagaggaggacgcctcacagctcatctttcctaaagagtttgaaacagctgagacacttctaaattcagaagttcatatgcttctggaacatcgaaagcagcagaatgagagtgcagaggacgaacaggagctctcagaagtcttcatgaaaacattaaactacacagcccgtttcagtcgtttcaaaaacagagagaccattgccagtgttcgtagagacaaggtctcactgtgttgcccaggctgaagacgtcttgaactcctggactcaagtgatcctcctgccttggcctcccaaagtgctaggattacaggcatgagctgctaagcctggcctcttctacctttttttggtttggtattcgttatggttttgagacagtctcacttcatcacccagattggagtgtagtggtgcggtcttggctcactgcaacctccacctcccaggttaaagcagttctcatgcctcagccttccaaatagctgggactacagacacacaccaccacacccggctaatttttttagttttttgtttttttggttttgtttgtttgtatgtttgtctgttttgagacggagtctagttctgtcacccaggctggagtgcagtggcgtgatcttggctcactgcagcctccgcctcccgggttcaagcaattctcctgcctcagcctcccgagtagctggga

SEQ ID NO: 421476 - DNA, 5024 bp, Homo sapiens
agcgctggtggtggcgcgcggcgcggcgcggcgatggcggcgggtggcagcgatccgcgggctggcgacgtagaggaggacgcctcacagctcatctttcctaaagagtttgaaacagctgagacacttctaaattcagaagttcatatgcttctggaacatcgaaagcagcagaatgagagtgcagaggacgaacaggagctctcagaagtcttcatgaaaacattaaactacacagcccgtttcagtcgtttcaaaaacagagagaccattgccagtgttcgtagcttgctactccagaaaaagcttcataagtttgagttggcctgtttggccaacctttgcccagagactgctgaggagtccaaggctctaatcccaagcttggagggacggtttgaagatgaggagctgcagcagattcttgatgatatccagacaaagcgcagctttcagtattaatctccaaacatcactgctgctcggagaaaccacatccccaggcataacaccaccttcccactgtctggggctgacttgcacagaaattctgttgaagacagttgagaattcctttggagaaaacagcccagcttggcgtggggttaggttgctgtttcaaataactcacaggcccaggtgacatggaatcttggagcagccttgtgcagtggcagccagtggcttcctgaacgtgcctctgcgaagtgtgagatgaggggtcacataaccacactgttgactacctcattcctggtttttggcctccacatcatcttttttcttaatatttcatgttttaatttcagggtgtttatactttttgaaactagaccagaagatagtagactttatagagaaagaccagttttacctagatactaaaggaagaattaaaccgctgttagtttgaaatgctttttttttttttttttaaatggagatagggtcttaactcttgtccaggctggaggagtgcagtcgtacagtcatggctcactgaagtcttgaccccgctgcctcagcctcccaaataactggggccacaggtgtgcaccacaactctcagctaatttttaaaattttttatagaggtggggttttactatgctgtccagactggtcttaaactcctgggctcaagtgatccccctgccttggcctcccaaactggtgagattacaggcatgagccaccacaactggcctgaaattcttaaaggatgggagtgtcgatgacagcaccttggcatcgttgtgcctaacctgggagacggaagaagcacgccatgggaagtgtttacacttggggacaagtgctaagtattgtggagcccatagccccttgagatagatggctactttgcctttcttcttgaactgtcttgcagaatgtggatttggggtaagtggtcttgaaggattcatttagtcaccctcaaattaagatttttacttcatctttcttgggcctgcacctccaagataacaaagaagaagcaatggtcgtgccaaagaggtccacaaccaggtgtgcactgttcactgcagcccatttgctgtatgaactgtggttgttgtgtgcccaatgacaaggctactaagaaattcatcatttgaaacgtagaggccgcagcagtcagcgatgtttctgaaatgagcatccttgacgcctgtgtacttcccaggctggatgtgaagctacattaccatgtgagttgtgccattcacagcacagtggtgaggaattgagctcatgaagcaggcaaggaccgaacacctccaccccaacgtagacctgcaggtgctgccccatgacctccaccaaagcccatataaggagcggagttgttaaggactgaagaaaaacttctctggagaaaaataaaattgcaattctacttaaaaaaatttttttttttttttacttcataggccaggcttgaagttctgaacactttgaagtctccaattatgagagatccagtctaagcctctggcctgctaattagcaataagtgctttatttggaaggagggagtcatccactcttgagccactgcagtgaagtcacttgatctcagtctgggggaaaacacttcaatagctaaacattctagctttgatttttctgaagggaatacacttgttttcaattttggggtttttctttggggcacttgcttgactctgtatgaacttgtgatccaaggaaaaaggagaaagaacagtgttggcttttaaaatcaggatggttttatgtttgctacgaaataaggcaagaataaaaaattcttatttttatttatttatttattttttgagatagagtctggctgtgttgcccaggatgcaatggcgcaatcttggctcactgcaacctctgccttctgggttcaagtgattctcctgcctcagcctcccaagtagctgggattacaggtacctgccaccacgcctggctaattttttgtgtttttagtagagacagggtttcaccacgttcgccaggctagtcttgaactgacctcaagtgatcctcccacctcggcttcccaaagtgctgggattacaggcgtgagccaccggccaatctttttatccttgagcaacttcgcttctttgagcctcattggtgttctcaattgtgaaatatggataatagtatctgccccatgggtattttgagaaggttgaatgaacaggaaattattacaaagagcctagaggtgtctgatatatagtatgttccagtaaatgttcactattcttagcatctcaggcagatgagctagtatagatagatgattaagtcagcttgcttcatagaaattagtgcaagaatttgttagcctaccaactgatagtatcagacttggaaaataaatgaaattgggccaggcgtggtggctcacccttgtaatcccagcgctttcagaggccgaggcaggcggatcacctgaggttgggagtttgagaccatcctgaccaacatggagaaaccccgtctctacttaaaatacaaaattagcggggcgtggtggcgcatgcctgtaatctcagctactctggaggctgaggcaggagaattgcttgaacctgggaggcagagggggtggcgagccaagattgcaccattgtactccagcctaggcaacaagagcgaaactgtctcaaaaaaaaaaaaaaaaaaaaagtgaaattgcttacccaaatctacagttaactttcgttttttaatgcttgatgaatttgcatgtcattcttgggcagtggccatgctgtcttctctgtattgttccaatttgggtatatgtgctgccaaagtgagtactgcagaattatttcttgagagaggcacttacatgtgctgattggcactaaagcagtggaatgggaagaagagacttggaaggcagcccagacgatccaggcgtgtgctagatggcaactgaggagcacggtgctaccatctttactggtgtttccacctatgtgccaggggttctgtgagctacctgagaatactgaagtatataatgctctggcacatagttaggcactaatcagtggtatttatcaaggtgattaaaagcagatttaaaaagcagctcacagttgggcgcggtggctcacacctgtaatcccagcactttgggaggccgaggcgggtggatcaccagaggtcagaagttcgagaccagcctggccaacgttgtgaaaccctgtctctactaaaaatacaaaaattggccacgtgtggtggcgggcacctgtaatcctagctacttgggaagctgagacaggagaattgcttgaacccgggaggtggaggttgccagtgagccaagatcatgccattgcactccagcctgggcaacaagagcgagactccatcttgaaaaaaaataaaataataaaaagcagctcatactagggaacttggtaaagcaacctcatgctgttgtaggttgaaagcctggtcagctattctgcaagacagtcaaaaattgtttacagggctggacagcatattgctattgaaaaatagctattaggagaccttgcacaatttgtgaaacattgttaggctcattgtactgtgtaaaatcaggaaagaatttgggaacatactgatacaacaaaaagataggttgtcaaaccctcacttcaccagaaagctaaattaaccagataagtctttctgaaagttttagtgtcttagtttgttcctgcgctgtaacagaataccttagactgggtaacctataaataataggaatttatttctcacagttttggaggctggcaaatgcaagatccaggtgctggtacgttcagtgtctggcaagggcggctttctggtccaagatggtgcctttttttctgcatcttccatagggaatgaacactccttatggtagaagggatggaaggaccaggcttttttttttttttttggatacagcaggatcttgctctgtcgcccaggctggagtgcagtggcatgattaaggttcactgcagcctcaatctcccgctctccagcgatcatcccacctcagcctcttggatagctgggaccacaggcacgagctaccatgcctggctaatttattttttgtagagacggggtttcgccatgttgcccgggctggtctggaatttctgacctctggcagtccacctgtttccgcctcccaaatgctgagattagaggcatgagtcactgcacccagcccgcagcctcttttataagggcattaatccccttcatgagggatattctctcatgacttaatcacctgccaaagaccccacctcttaatactacatcagtgatgggttcaatgtatcaattgggtgggagggggcacattcagaccatagcatctagtcattctggttttattaagatttattagacctgaggcatgaaaaatagcatactggatgggacttcagcatcgatgagttgccttagtaatactgttaataaaaagcactaaatatgcaaaaaaaaaa

SEQ ID NO: 421477 - DNA, 1904 bp, Homo sapiens
agcgctggtggtggcgcgcggcgcggcgcggcgatggcggcgggtggcagcgatccgcgggctggcgacgtagaggaggacgcctcacagctcatctttcctaaagagtttgaaacagctgagacacttctaaattcagaagttcatatgcttctggaacatcgaaagcagcagaatgagagtgcagaggacgaacaggagctctcagaagtcttcatgaaaacattaaactacacagcccgtttcagtcgtttcaaaaacagagagaccattgccagtgttcgtagcttgctactccagaaaaagcttcataagtttgagttggcctgtttggccaacctttgcccagagactgctgaggagtccaaggctctaatcccaagcttggagggacggtttgaagatgaggagctgcagcagattcttgatgatatccagacaaagcgcagctttcagtattaatctccaaacatcactgctgctcggagaaaccacatccccaggcataacaccaccttcccactgtctggggctgacttgcacagaaattctgttgaagacagttgagaattcctttggagaaaacagcccagcttggcgtggggttaggttgctgtttcaaataactcacaggcccaggtgacatggaatcttggagcagccttgtgcagtggcagccagtggcttcctgaacgtgcctctgcgaagtgtgagatgaggggtcacataaccacactgttgactacctcattcctggtttttggcctccacatcatcttttttcttaatatttcatgttttaatttcagggtgtttatactttttgaaactagaccagaagatagtagactttatagagaaagaccagttttacctagatactaaaggaagaattaaaccgctgttagtttgaaatgctttttttttttttttttaaatggagatagggtcttaactcttgtccaggctggaggagtgcagtcgtacagtcatggctcactgaagtcttgaccccgctgcctcagcctcccaaataactggggccacaggtgtgcaccacaactctcagctaatttttaaaattttttatagaggtggggttttactatgctgtccagactggtcttaaactcctgggctcaagtgatccccctgccttggcctcccaaactggtgagattacaggcatgagccaccacaactggcctgaaattcttaaaggatgggagtgtcgatgacagcaccttggcatcgttgtgcctaacctgggagacggaagaagcacgccatgggaagtgtttacacttggggacaagtgctaagtattgtggagcccatagccccttgagatagatggctactttgcctttcttcttgaactgtcttgcagaatgtggatttggggtaagtggtcttgaaggattcatttagtcaccctcaaattaagatttttacttcatctttcttgggcctgcacctccaagataacaaagaagaagcaatggtcgtgccaaagaggtccacaaccaggtgtgcactgttcactgcagcccatttgctgtatgaactgtggttgttgtgtgcccaatgacaaggctactaagaaattcatcatttgaaacgtagaggccgcagcagtcagcgatgtttctgaaatgagcatccttgacgcctgtgtacttcccaggctggatgtgaagctacattaccatgtgagttgtgccattcacagcacagtggtgaggaattgagctcatgaagcaggcaaggaccgaacacctccaccccaacgtagacctgcaggtgctgccccatgacctccaccaaagcccatataaggagcggagttgttaaggactgaagaaaaacttctctggagaaaaataaaattgcaattctactta

SEQ ID NO: 421478 - DNA, 3521 bp, Homo sapiens
agcgctggtggtggcgcgcggcgcggcgcggcgatggcggcgggtggcagcgatccgcgggctggcgacgtagaggaggacgcctcacagctcatctttcctaaagagtttgaaacagctgagacacttctaaattcagaagttcatatgcttctggaacatcgaaagcagcagaatgagagtgcagaggacgaacaggagctctcagaagtcttcatgaaaacattaaactacacagcccgtttcagtcgtttcaaaaacagagagaccattgccagtgttcgtagcttgctactccagaaaaagcttcataagtttgagttggcctgtttggccaacctttgcccagagactgctgaggagtccaaggctctaatcccaagcttggagggacggtttgaagatgaggagctgcagcagattcttgatgatatccagacaaagcgcagctttcagtattaatctccaaacatcactgctgctcggagaaaccacatccccaggcataacaccaccttcccactgtctggggctgacttgcacagaaattctgttgaagacagttgagaattcctttggagaaaacagcccagcttggcgtggggttaggttgctgtttcaaataactcacaggcccaggtgacatggaatcttggagcagccttgtgcagtggcagccagtggcttcctgaacgtgcctctgcgaagtgtgagatgaggggtcacataaccacactgttgactacctcattcctggtttttggcctccacatcatcttttttcttaatatttcatgttttaatttcagggtgtttatactttttgaaactagaccagaagatagtagactttatagagaaagaccagttttacctagatactaaaggaagaattaaaccgctgttagtttgaaatgctttttttttttttttttaaatggagatagggtcttaactcttgtccaggctggaggagtgcagtcgtacagtcatggctcactgaagtcttgaccccgctgcctcagcctcccaaataactggggccacaggtgtgcaccacaactctcagctaatttttaaaattttttatagaggtggggttttactatgctgtccagactggtcttaaactcctgggctcaagtgatccccctgccttggcctcccaaactggtgagattacaggcatgagccaccacaactggcctgaaattcttaaaggatgggagtgtcgatgacagcaccttggcatcgttgtgcctaacctgggagacggaagaagcacgccatgggaagtgtttacacttggggacaagtgctaagtattgtggagcccatagccccttgagatagatggctactttgcctttcttcttgaactgtcttgcagaatgtggatttggggtaagtggtcttgaaggattcatttagtcaccctcaaattaagatttttacttcatctttcttgggcctgcacctccaagataacaaagaagaagcaatggtcgtgccaaagaggtccacaaccaggtgtgcactgttcactgcagcccatttgctgtatgaactgtggttgttgtgtgcccaatgacaaggctactaagaaattcatcatttgaaacgtagaggccgcagcagtcagcgatgtttctgaaatgagcatccttgacgcctgtgtacttcccaggctggatgtgaagctacattaccatgtgagttgtgccattcacagcacagtggtgaggaattgagctcatgaagcaggcaaggaccgaacacctccaccccaacgtagacctgcaggtgctgccccatgacctccaccaaagcccatataaggagcggagttgttaaggactgaagaaaaacttctctggagaaaaataaaattgcaattctacttaaaaaaatttttttttttttttacttcataggccaggcttgaagttctgaacactttgaagtctccaattatgagagatccagtctaagcctctggcctgctaattagcaataagtgctttatttggaaggagggagtcatccactcttgagccactgcagtgaagtcacttgatctcagtctgggggaaaacacttcaatagctaaacattctagctttgatttttctgaagggaatacacttgttttcaattttggggtttttctttggggcacttgcttgactctgtatgaacttgtgatccaaggaaaaaggagaaagaacagtgttggcttttaaaatcaggatggttttatgtttgctacgaaataaggcaagaataaaaaattcttatttttatttatttatttattttttgagatagagtctggcagtgagccaagatcatgccattgcactccagcctgggcaacaagagcgagactccatcttgaaaaaaaataaaataataaaaagcagctcatactagggaacttggtaaagcaacctcatgctgttgtaggttgaaagcctggtcagctattctgcaagacagtcaaaaattgtttacagggctggacagcatattgctattgaaaaatagctattaggagaccttgcacaatttgtgaaacattgttaggctcattgtactgtgtaaaatcaggaaagaatttgggaacatactgatacaacaaaaagataggttgtcaaaccctcacttcaccagaaagctaaattaaccagataagtctttctgaaagttttagtgtcttagtttgttcctgcgctgtaacagaataccttagactgggtaacctataaataataggaatttatttctcacagttttggaggctggcaaatgcaagatccaggtgctggtacgttcagtgtctggcaagggcggctttctggtccaagatggtgcctttttttctgcatcttccatagggaatgaacactccttatggtagaagggatggaaggaccaggcttttttttttttttttggatacagcaggatcttgctctgtcgcccaggctggagtgcagtggcatgattaaggttcactgcagcctcaatctcccgctctccagcgatcatcccacctcagcctcttggatagctgggaccacaggcacgagctaccatgcctggctaatttattttttgtagagacggggtttcgccatgttgcccgggctggtctggaatttctgacctctggcagtccacctgtttccgcctcccaaatgctgagattagaggcatgagtcactgcacccagcccgcagcctcttttataagggcattaatccccttcatgagggatattctctcatgacttaatcacctgccaaagaccccacctcttaatactacatcagtgatgggttcaatgtatcaattgggtgggagggggcacattcagaccatagcatctagtcattctggttttattaagatttattagacctgaggcatgaaaaatagcatactggatgggacttcagcatcgatgagttgccttagtaatactgttaataaaaagcactaaatatgcaaaaaaaaaa

SEQ ID NO: 421479 - DNA, 4171 bp, Homo sapiens
agcgctggtggtggcgcgcggcgcggcgcggcgatggcggcgggtggcagcgatccgcgggctggcgacgtagaggaggacgcctcacagctcatctttcctaaagagtttgaaacagctgagacacttctaaattcagaagttcatatgcttctggaacatcgaaagcagcagaatgagagtgcagaggacgaacaggagctctcagaagtcttcatgaaaacattaaactacacagcccgtttcagtcgtttcaaaaacagagagaccattgccagtgttcgtagcttgctactccagaaaaagcttcataagtttgagttggcctgtttggccaacctttgcccagagactgctgaggagtccaaggctctaatcccaagcttggagggacggtttgaagatgaggagctgcagcagattcttgatgatatccagacaaagcgcagctttcagtattaatctccaaacatcactgctgctcggagaaaccacatccccaggcataacaccaccttcccactgtctggggctgacttgcacagaaattctgttgaagacagttgagaattcctttggagaaaacagcccagcttggcgtggggttaggttgctgtttcaaataactcacaggcccaggtgacatggaatcttggagcagccttgtgcagtggcagccagtggcttcctgaacgtgcctctgcgaagtgtgagatgaggggtcacataaccacactgttgactacctcattcctggtttttggcctccacatcatcttttttcttaatatttcatgttttaatttcagggtgtttatactttttgaaactagaccagaagatagtagactttatagagaaagaccagttttacctagatactaaaggaagaattaaaccgctgttagtttgaaatgctttttttttttttttttaaatggagatagggtcttaactcttgtccaggctggaggagtgcagtcgtacagtcatggctcactgaagtcttgaccccgctgcctcagcctcccaaataactggggccacaggtgtgcaccacaactctcagctaatttttaaaattttttatagaggtggggttttactatgctgtccagactggtcttaaactcctgggctcaagtgatccccctgccttggcctcccaaactggtgagattacaggcatgagccaccacaactggcctgaaattcttaaaggatgggagtgtcgatgacagcaccttggcatcgttgtgcctaacctgggagacggaagaagcacgccatgggaagtgtttacacttggggacaagtgctaagtattgtggagcccatagccccttgagatagatggctactttgcctttcttcttgaactgtcttgcagaatgtggatttggggtaagtggtcttgaaggattcatttagtcaccctcaaattaagatttttacttcatctttcttgggcctgcacctccaagataacaaagaagaagcaatggtcgtgccaaagaggtccacaaccaggtgtgcactgttcactgcagcccatttgctgtatgaactgtggttgttgtgtgcccaatgacaaggctactaagaaattcatcatttgaaacgtagaggccgcagcagtcagcgatgtttctgaaatgagcatccttgacgcctgtgtacttcccaggctggatgtgaagctacattaccatgtgagttgtgccattcacagcacagtggtgaggaattgagctcatgaagcaggcaaggaccgaacacctccaccccaacgtagacctgcaggtgctgccccatgacctccaccaaagcccatataaggagcggagttgttaaggactgaagaaaaacttctctggagaaaaataaaattgcaattctacttaaaaaaatttttttttttttttacttcataggccaggcttgaagttctgaacactttgaagtctccaattatgagagatccagtctaagcctctggcctgctaattagcaataagtgctttatttggaaggagggagtcatccactcttgagccactgcagtgaagtcacttgatctcagtctgggggaaaacacttcaatagctaaacattctagctttgatttttctgaagggaatacacttgttttcaattttggggtttttctttggggcacttgcttgactctgtatgaacttgtgatccaaggaaaaaggagaaagaacagtagaattgcttgaacctgggaggcagagggggtggcgagccaagattgcaccattgtactccagcctaggcaacaagagcgaaactgtctcaaaaaaaaaaaaaaaaaaaaagtgaaattgcttacccaaatctacagttaactttcgttttttaatgcttgatgaatttgcatgtcattcttgggcagtggccatgctgtcttctctgtattgttccaatttgggtatatgtgctgccaaagtgagtactgcagaattatttcttgagagaggcacttacatgtgctgattggcactaaagcagtggaatgggaagaagagacttggaaggcagcccagacgatccaggcgtgtgctagatggcaactgaggagcacggtgctaccatctttactggtgtttccacctatgtgccaggggttctgtgagctacctgagaatactgaagtatataatgctctggcacatagttaggcactaatcagtggtatttatcaaggtgattaaaagcagatttaaaaagcagctcacagttgggcgcggtggctcacacctgtaatcccagcactttgggaggccgaggcgggtggatcaccagaggtcagaagttcgagaccagcctggccaacgttgtgaaaccctgtctctactaaaaatacaaaaattggccacgtgtggtggcgggcacctgtaatcctagctacttgggaagctgagacaggagaattgcttgaacccgggaggtggaggttgccagtgagccaagatcatgccattgcactccagcctgggcaacaagagcgagactccatcttgaaaaaaaataaaataataaaaagcagctcatactagggaacttggtaaagcaacctcatgctgttgtaggttgaaagcctggtcagctattctgcaagacagtcaaaaattgtttacagggctggacagcatattgctattgaaaaatagctattaggagaccttgcacaatttgtgaaacattgttaggctcattgtactgtgtaaaatcaggaaagaatttgggaacatactgatacaacaaaaagataggttgtcaaaccctcacttcaccagaaagctaaattaaccagataagtctttctgaaagttttagtgtcttagtttgttcctgcgctgtaacagaataccttagactgggtaacctataaataataggaatttatttctcacagttttggaggctggcaaatgcaagatccaggtgctggtacgttcagtgtctggcaagggcggctttctggtccaagatggtgcctttttttctgcatcttccatagggaatgaacactccttatggtagaagggatggaaggaccaggcttttttttttttttttggatacagcaggatcttgctctgtcgcccaggctggagtgcagtggcatgattaaggttcactgcagcctcaatctcccgctctccagcgatcatcccacctcagcctcttggatagctgggaccacaggcacgagctaccatgcctggctaatttattttttgtagagacggggtttcgccatgttgcccgggctggtctggaatttctgacctctggcagtccacctgtttccgcctcccaaatgctgagattagaggcatgagtcactgcacccagcccgcagcctcttttataagggcattaatccccttcatgagggatattctctcatgacttaatcacctgccaaagaccccacctcttaatactacatcagtgatgggttcaatgtatcaattgggtgggagggggcacattcagaccatagcatctagtcattctggttttattaagatttattagacctgaggcatgaaaaatagcatactggatgggacttcagcatcgatgagttgccttagtaatactgttaataaaaagcactaaatatgcaaaaaaaaaa

SEQ ID NO: 421480 - DNA, 3970 bp, Homo sapiens
agcgctggtggtggcgcgcggcgcggcgcggcgatggcggcgggtggcagcgatccgcgggctggcgacgtagaggaggacgcctcacagctcatctttcctaaagagtttgaaacagctgagacacttctaaattcagaagttcatatgcttctggaacatcgaaagcagcagaatgagagtgcagaggacgaacaggagctctcagaagtcttcatgaaaacattaaactacacagcccgtttcagtcgtttcaaaaacagagagaccattgccagtgttcgtagcttgctactccagaaaaagcttcataagtttgagttggcctgtttggccaacctttgcccagagactgctgaggagtccaaggctctaatcccaagcttggagggacggtttgaagatgaggagctgcagcagattcttgatgatatccagacaaagcgcagctttcagtattaatctccaaacatcactgctgctcggagaaaccacatccccaggcataacaccaccttcccactgtctggggctgacttgcacagaaattctgttgaagacagttgagaattcctttggagaaaacagcccagcttggcgtggggttaggttgctgtttcaaataactcacaggcccaggtgacatggaatcttggagcagccttgtgcagtggcagccagtggcttcctgaacgtgcctctgcgaagtgtgagatgaggggtcacataaccacactgttgactacctcattcctggtttttggcctccacatcatcttttttcttaatatttcatgttttaatttcagggtgtttatactttttgaaactagaccagaagatagtagactttatagagaaagaccagttttacctagatactaaaggaagaattaaaccgctgttagtttgaaatgctttttttttttttttttaaatggagatagggtcttaactcttgtccaggctggaggagtgcagtcgtacagtcatggctcactgaagtcttgaccccgctgcctcagcctcccaaataactggggccacaggtgtgcaccacaactctcagctaatttttaaaattttttatagaggtggggttttactatgctgtccagactggtcttaaactcctgggctcaagtgatccccctgccttggcctcccaaactggtgagattacaggcatgagccaccacaactggcctgaaattcttaaaggatgggagtgtcgatgacagcaccttggcatcgttgtgcctaacctgggagacggaagaagcacgccatgggaagtgtttacacttggggacaagtgctaagtattgtggagcccatagccccttgagatagatggctactttgcctttcttcttgaactgtcttgcagaatgtggatttggggtaagtggtcttgaaggattcatttagtcaccctcaaattaagatttttacttcatctttcttgggcctgcacctccaagataacaaagaagaagcaatggtcgtgccaaagaggtccacaaccaggtgtgcactgttcactgcagcccatttgctgtatgaactgtggttgttgtgtgcccaatgacaaggctactaagaaattcatcatttgaaacgtagaggccgcagcagtcagcgatgtttctgaaatgagcatccttgacgcctgtgtacttcccaggctggatgtgaagctacattaccatgtgagttgtgccattcacagcacagtggtgaggaattgagctcatgaagcaggcaaggaccgaacacctccaccccaacgtagacctgcaggtgctgccccatgacctccaccaaagcccatataaggagcggagttgttaaggactgaagaaaaacttctctggagaaaaataaaattgcaattctacttaaaaaaatttttttttttttttacttcataggccaggcttgaagttctgaacactttgaagtctccaattatgagagatccagtctaagcctctggcctgctaattagcaataagtgctttatttggaaggagggagtcatccactcttgagccactgcagtgaagtcacttgatctcagtctgggggaaaacacttcaatagctaaacattctagctttgatttttctgaagggaatacacttgttttcaattttggggtttttctttggggcacttgcttgactctgtatgaacttgtgatccaaggaaaaaggagaaagaacagtgttggcttttaaaatcaggatggttttatgtttgctacgaaataaggcaagaataaaaaattcttatttttatttatttatttattttttgagatagagtctggctgtgttgcccaggatgcaatggcgcaatcttggctcactgcaacctctgccttctgggttcaagtgattctcctgcctcagcctcccaagtagctgggattacaggtacctgccaccacgcctggctaattttttgtgtttttagtagagacagggtttcaccacgttcgccaggctagtcttgaactgacctcaagtgatcctcccacctcggcttcccaaagtgctgggattacaggcgtgagccaccggccaatctttttatccttgagcaacttcgcttctttgagcctcattggtgttctcaattgtgaaatatggataatagtatctgccccatgggtattttgagaaggttgaatgaacaggaaattattacaaagagcctagaggtgtctgatatatagtatgttccagtaaatgttcactattcttagcatctcaggcagatgagctagtatagatagatgattaagtcagcttgcttcatagaaattagtgcaagaatttgttagcctaccaactgatagtatcagacttggaaaataaatgaaattgggccaggcgtggtggctcacccttgtaatcccagcgctttcagaggccgaggcaggcggatcacctgaggttgggagtttgagaccatcctgaccaacatggagaaaccccgtctctacttaaaatacaaaattagcggggcgtggtggcgcatgcctgtaatctcagctactctggaggctgaggcaggagaattgcttgaacctgggaggcagagggggtggcgagccaagattgcaccattgtactccagcctaggcaacaagagcgaaactgtctcaaaaaaaaaaaaaaaaaaaaagtgaaattgcttacccaaatctacagttaactttcgttttttaatgcttgatgaatttgcatgtcattcttgggcagtggccatgctgtcttctctgtattgttccaatttgggtatatgtgctgccaaagtgagtactgcagaattatttcttgagagaggcacttacatgtgctgattggcactaaagcagtggaatgggaagaagagacttggaaggcagcccagacgatccaggcgtgtgctagatggcaactgaggagcacggtgctaccatctttactggtgtttccacctatgtgccaggggttctgtgagctacctgagaatactgaagtatataatgctctggcacatagttaggcactaatcagtggtatttatcaaggtgattaaaagcagatttaaaaagcagctcacagttgggcgcggtggctcacacctgtaatcccaaatgctgagattagaggcatgagtcactgcacccagcccgcagcctcttttataagggcattaatccccttcatgagggatattctctcatgacttaatcacctgccaaagaccccacctcttaatactacatcagtgatgggttcaatgtatcaattgggtgggagggggcacattcagaccatagcatctagtcattctggttttattaagatttattagacctgaggcatgaaaaatagcatactggatgggacttcagcatcgatgagttgccttagtaatactgttaataaaaagcactaaatatgcaaaaaaaaaa

SEQ ID NO: 421481 - DNA, 3979 bp, Homo sapiens
agcgctggtggtggcgcgcggcgcggcgcggcgatggcggcgggtggcagcgatccgcgggctggcgacgtagaggaggacgcctcacagctcatctttcctaaagagtttgaaacagctgagacacttctaaattcagaagttcatatgcttctggaacatcgaaagcagcagaatgagagtgcagaggacgaacaggagctctcagaagtcttcatgaaaacattaaactacacagcccgtttcagtcgtttcaaaaacagagagaccattgccagtgttcgtagcttgctactccagaaaaagcttcataagtttgagttggcctgtttggccaacctttgcccagagactgctgaggagtccaaggctctaatcccaagcttggagggacggtttgaagatgaggagctgcagcagattcttgatgatatccagacaaagcgcagctttcagtattaatctccaaacatcactgctgctcggagaaaccacatccccaggcataacaccaccttcccactgtctggggctgacttgcacagaaattctgttgaagacagttgagaattcctttggagaaaacagcccagcttggcgtggggttaggttgctgtttcaaataactcacaggcccaggtgacatggaatcttggagcagccttgtgcagtggcagccagtggcttcctgaacgtgcctctgcgaagtgtgagatgaggggtcacataaccacactgttgactacctcattcctggtttttggcctccacatcatcttttttcttaatatttcatgttttaatttcagggtgtttatactttttgaaactagaccagaagatagtagactttatagagaaagaccagttttacctagatactaaaggaagaattaaaccgctgttagtttgaaatgctttttttttttttttttaaatggagatagggtcttaactcttgtccaggctggaggagtgcagtcgtacagtcatggctcactgaagtcttgaccccgctgcctcagcctcccaaataactggggccacaggtgtgcaccacaactctcagctaatttttaaaattttttatagaggtggggttttactatgctgtccagactggtcttaaactcctgggctcaagtgatccccctgccttggcctcccaaactggtgagattacaggcatgagccaccacaactggcctgaaattcttaaaggatgggagtgtcgatgacagcaccttggcatcgttgtgcctaacctgggagacggaagaagcacgccatgggaagtgtttacacttggggacaagtgctaagtattgtggagcccatagccccttgagatagatggctactttgcctttcttcttgaactgtcttgcagaatgtggatttggggtaagtggtcttgaaggattcatttagtcaccctcaaattaagatttttacttcatctttcttgggcctgcacctccaagataacaaagaagaagcaatggtcgtgccaaagaggtccacaaccaggtgtgcactgttcactgcagcccatttgctgtatgaactgtggttgttgtgtgcccaatgacaaggctactaagaaattcatcatttgaaacgtagaggccgcagcagtcagcgatgtttctgaaatgagcatccttgacgcctgtgtacttcccaggctggatgtgaagctacattaccatgtgagttgtgccattcacagcacagtggtgaggaattgagctcatgaagcaggcaaggaccgaacacctccaccccaacgtagacctgcaggtgctgccccatgacctccaccaaagcccatataaggagcggagttgttaaggactgaagaaaaacttctctggagaaaaataaaattgcaattctacttaaaaaaatttttttttttttttacttcataggccaggcttgaagttctgaacactttgaagtctccaattatgagagatccagtctaagcctctggcctgctaattagcaataagtgctttatttggaaggagggaagaattgcttgaacctgggaggcagagggggtggcgagccaagattgcaccattgtactccagcctaggcaacaagagcgaaactgtctcaaaaaaaaaaaaaaaaaaaaagtgaaattgcttacccaaatctacagttaactttcgttttttaatgcttgatgaatttgcatgtcattcttgggcagtggccatgctgtcttctctgtattgttccaatttgggtatatgtgctgccaaagtgagtactgcagaattatttcttgagagaggcacttacatgtgctgattggcactaaagcagtggaatgggaagaagagacttggaaggcagcccagacgatccaggcgtgtgctagatggcaactgaggagcacggtgctaccatctttactggtgtttccacctatgtgccaggggttctgtgagctacctgagaatactgaagtatataatgctctggcacatagttaggcactaatcagtggtatttatcaaggtgattaaaagcagatttaaaaagcagctcacagttgggcgcggtggctcacacctgtaatcccagcactttgggaggccgaggcgggtggatcaccagaggtcagaagttcgagaccagcctggccaacgttgtgaaaccctgtctctactaaaaatacaaaaattggccacgtgtggtggcgggcacctgtaatcctagctacttgggaagctgagacaggagaattgcttgaacccgggaggtggaggttgccagtgagccaagatcatgccattgcactccagcctgggcaacaagagcgagactccatcttgaaaaaaaataaaataataaaaagcagctcatactagggaacttggtaaagcaacctcatgctgttgtaggttgaaagcctggtcagctattctgcaagacagtcaaaaattgtttacagggctggacagcatattgctattgaaaaatagctattaggagaccttgcacaatttgtgaaacattgttaggctcattgtactgtgtaaaatcaggaaagaatttgggaacatactgatacaacaaaaagataggttgtcaaaccctcacttcaccagaaagctaaattaaccagataagtctttctgaaagttttagtgtcttagtttgttcctgcgctgtaacagaataccttagactgggtaacctataaataataggaatttatttctcacagttttggaggctggcaaatgcaagatccaggtgctggtacgttcagtgtctggcaagggcggctttctggtccaagatggtgcctttttttctgcatcttccatagggaatgaacactccttatggtagaagggatggaaggaccaggcttttttttttttttttggatacagcaggatcttgctctgtcgcccaggctggagtgcagtggcatgattaaggttcactgcagcctcaatctcccgctctccagcgatcatcccacctcagcctcttggatagctgggaccacaggcacgagctaccatgcctggctaatttattttttgtagagacggggtttcgccatgttgcccgggctggtctggaatttctgacctctggcagtccacctgtttccgcctcccaaatgctgagattagaggcatgagtcactgcacccagcccgcagcctcttttataagggcattaatccccttcatgagggatattctctcatgacttaatcacctgccaaagaccccacctcttaatactacatcagtgatgggttcaatgtatcaattgggtgggagggggcacattcagaccatagcatctagtcattctggttttattaagatttattagacctgaggcatgaaaaatagcatactggatgggacttcagcatcgatgagttgccttagtaatactgttaataaaaagcactaaatatgcaaaaaaaaaa

SEQ ID NO: 421482 - DNA, 4045 bp, Homo sapiens
  misc_feature (3786)..(3786): n is a, c, g, or t
  misc_feature (3829)..(3829): n is a, c, g, or t
  misc_feature (3869)..(3869): n is a, c, g, or t
  misc_feature (3874)..(3874): n is a, c, g, or t
  misc_feature (3921)..(3921): n is a, c, g, or t
  misc_feature (3948)..(3948): n is a, c, g, or t
  misc_feature (4010)..(4010): n is a, c, g, or t
agcgctggtggtggcgcgcggcgcggcgcggcgatggcggcgggtggcagcgatccgcgggctggcgacgtagaggaggacgcctcacagctcatctttcctaaagagtttgaaacagctgagacacttctaaattcagaagttcatatgcttctggaacatcgaaagcagcagaatgagagtgcagaggacgaacaggagctctcagaagtcttcatgaaaacattaaactacacagcccgtttcagtcgtttcaaaaacagagagaccattgccagtgttcgtagcttgctactccagaaaaagcttcataagtttgagttggcctgtttggccaacctttgcccagagactgctgaggagtccaaggctctaatcccaagcttggagggacggtttgaagatgaggagctgcagcagattcttgatgatatccagacaaagcgcagctttcagtattaatctccaaacatcactgctgctcggagaaaccacatccccaggcataacaccaccttcccactgtctggggctgacttgcacagaaattctgttgaagacagttgagaattcctttggagaaaacagcccagcttggcgtggggttaggttgctgtttcaaataactcacaggcccaggtgacatggaatcttggagcagccttgtgcagtggcagccagtggcttcctgaacgtgcctctgcgaagtgtgagatgaggggtcacataaccacactgttgactacctcattcctggtttttggcctccacatcatcttttttcttaatatttcatgttttaatttcagggtgtttatactttttgaaactagaccagaagatagtagactttatagagaaagaccagttttacctagatactaaaggaagaattaaaccgctgttagtttgaaatgctttttttttttttttttaaatggagatagggtcttaactcttgtccaggctggaggagtgcagtcgtacagtcatggctcactgaagtcttgaccccgctgcctcagcctcccaaataactggggccacaggtgtgcaccacaactctcagctaatttttaaaattttttatagaggtggggttttactatgctgtccagactggtcttaaactcctgggctcaagtgatccccctgccttggcctcccaaactggtgagattacaggcatgagccaccacaactggcctgaaattcttaaaggatgggagtgtcgatgacagcaccttggcatcgttgtgcctaacctgggagacggaagaagcacgccatgggaagtgtttacacttggggacaagtgctaagtattgtggagcccatagccccttgagatagatggctactttgcctttcttcttgaactgtcttgcagaatgtggatttggggtaagtggtcttgaaggattcatttagtcaccctcaaattaagatttttacttcatctttcttgggcctgcacctccaagataacaaagaagaagcaatggtcgtgccaaagaggtccacaaccaggtgtgcactgttcactgcagcccatttgctgtatgaactgtggttgttgtgtgcccaatgacaaggctactaagaaattcatcatttgaaacgtagaggccgcagcagtcagcgatgtttctgaaatgagcatccttgacgcctgtgtacttcccaggctggatgtgaagctacattaccatgtgagttgtgccattcacagcacagtggtgaggaattgagctcatgaagcaggcaaggaccgaacacctccaccccaacgtagacctgcaggtgctgccccatgacctccaccaaagcccatataaggagcggagttgttaaggactgaagaaaaacttctctggagaaaaataaaattgcaattctacttaaaaaaatttttttttttttttacttcataggccaggcttgaagttctgaacactttgaagtctccaattatgagagatccagtctaagcctctggcctgctaattagcaataagtgctttatttggaaggagggagtcatccactcttgagccactgcagtgaagtcacttgatctcagtctgggggaaaacacttcaatagctaaacattctagctttgatttttctgaagggaatacacttgttttcaattttggggtttttctttggggcacttgcttgactctgtatgaacttgtgatccaaggaaaaaggagaaagaacagtgttggcttttaaaatcaggatggttttatgtttgctacgaaataaggcaagaataaaaaattcttatttttatttatttatttattttttgagatagagtctggctgtgttgcccaggatgcaatggcgcaatcttggctcactgcaacctctgccttctgggttcaagtgattctcctgcctcagcctcccaagtagctgggattacaggtacctgccaccacgcctggctaattttttgtgtttttagtagagacagggtttcaccacgttcgccaggctagtcttgaactgacctcaagtgatcctcccacctcggcttcccaaagtgctgggattacaggcgtgagccaccggccaatctttttatccttgagcaacttcgcttctttgagcctcattggtgttctcaattgtgaaatatggataatagtatctgccccatgggtattttgagaaggttgaatgaacaggaaattattacaaagagcctagaggtgtctgatatatagtatgttccagtaaatgttcactattcttagcatctcaggcagatgagctagtatagatagatgattaagtcagcttgcttcatagaaattagtgcaagaatttgttagcctaccaactgatagtatcagacttggaaaataaatgaaattgggccaggcgtggtggctcacccttgtaatcccagcgctttcagaggccgaggcaggcggatcacctgaggttgggagtttgagaccatcctgaccaacatggagaaaccccgtctctacttaaaatacaaaattagcggggcgtggtggcgcatgcctgtaatctcagctactctggaggctgaggcaggagaattgcttgaacctgggaggcagagggggtggcgagccaagattgcaccattgtactccagcctaggcaacaagagcgaaactgtctcaaaaaaaaaaaaaaaaaaaaagtgaaattgcttacccaaatctacagttaactttcgttttttaatgcttgatgaatttgcatgtcattcttgggcagtggccatgctgtcttctctgtattgttccaatttgggtatatgtgctgccaaagtgagtactgcagaattatttcttgagagaggcacttacatgtgctgattggcactaaagcagtggaatgggaagaagagacttggaaggcagcccagacgatccaggcgtgtgctagatggcaactgaggagcacggtgctaccatctttactggtgtttccacctatgtgccaggggttctgtgagctacctgagaatactgaagtatataatgctctggcacatagttaggcactaatcagtggtatttatcaaggtgattaaaagcagatttaaaaagcagctcacagttgggcgcggtggctcacacctgtaatcccagcactttgggaggccgaggcgggtggatcaccagaggtcagaagttcgagaccagcctggccaacgttgtgaaaccctgtctctactaaaaatacaggcatgagccaccacaactggcctgaaattcttaaaggatgngagtgtcgatgacagcaccttgggcatcgtgtgcctaacctgngagacggaagaagcacgccatgggaagtgttacacttggngacangtgctaagcatgtggagcccataggcccttgagatagatgggtaccnttgctttcttcttgaactcgcttgcanaatgtggatttggggtaagtggtctttgaggattcacttagtcaccctcaaactaagacttntacttcatctttcttgggcctgcaccttcagataa

SEQ ID NO: 421483 - DNA, 2303 bp, Homo sapiens
agcgctggtggtggcgcgcggcgcggcgcggcgatggcggcgggtggcagcgatccgcgggctggcgacgtagaggaggacgcctcacagctcatctttcctaaagagtttgaaacagctgagacacttctaaattcagaagttcatatgcttctggaacatcgaaagcagcagaatgagagtgcagaggacgaacaggagctctcagaagtcttcatgaaaacattaaactacacagcccgtttcagtcgtttcaaaaacagagagaccattgccagtgttcgtagcttgctactccagaaaaagcttcataagtttgagttggcctgtttggccaacctttgcccagagactgctgaggagtccaaggctctaatcccaagcttggagggacggtttgaagatgaggagctgcagcagattcttgatgatatccagacaaagcgcagctttcagtattaatctccaaacatcactgctgctcggagaaaccacatccccaggcataacaccaccttcccactgtctggggctgacttgcacagaaattctgttgaagacagttgagaattcctttggagaaaacagcccagcttggcgtggggttaggttgctgtttcaaataactcacaggcccaggtgacatggaatcttggagcagccttgtgcagtggcagccagtggcttcctgaacgtgcctctgcgaagtgtgagatgaggggtcacataaccacactgttgactacctcattcctggtttttggcctccacatcatcttttttcttaatatttcatgttttaatttcagggtgtttatactttttgaaactagaccagaagatagtagactttatagagaaagaccagttttacctagatactaaaggaagaattaaaccgctgttagtttgaaatgctttttttttttttttttaaatggagatagggtcttaactcttgtccaggctggaggagtgcagtcgtacagtcatggctcactgaagtcttgaccccgctgcctcagcctcccaaataactggggccacaggtgtgcaccacaactctcagctaatttttaaaattttttatagaggtggggttttactatgctgtccagactggtcttaaactcctgggctcaagtgatccccctgccttggcctcccaaactggtgagattacaggcatgagccaccacaactggcctgaaattcttaaaggatgggagtgtcgatgacagcaccttggcatcgttgtgcctaacctgggagacggaagaagcacgccatgggaagtgtttacacttggggacaagtgctaagtattgtggagcccatagccccttgagatagatggctactttgcctttcttcttgaactgtcttgcagaatgtggatttggggtaagtggtcttgaaggattcatttagtcaccctcaaattaagatttttacttcatctttcttgggcctgcacctccaagataacaaagaagaagcaatggtcgtgccaaagaggtccacaaccaggtgtgcactgttcactgcagcccatttgctgtatgaactgtggttgttgtgtgcccaatgacaaggctactaagaaattcatcatttgaaacgtagaggccgcagcagtcagcgatgtttctgaaatgagcatccttgacgcctgtgtacttcccaggctggatgtgaagctacattaccatgtgagttgtgccattcacagcacagtggtgaggaattgagctcatgaagcaggcaaggaccgaacacctccaccccaacgtagacctgcaggtgctgccccatgacctccaccaaagcccatataaggagcggagttgttaaggactgaagaaaaacttctctggagaaaaataaaattgcaattctacttaaaaaaatttttttttttttttacttcataggccaggcttgaagttctgaacactttgaagtctccaattatgagagatccagtctaagcctctggcctgctaattagcaataagtgctttatttggaaggagggagtcatccactcttgagccactgcagtgaagtcacttgatctcagtctgggggaaaacacttcaatagctaaacattctagctttgatttttctgaagggaatacacttgttttcaattttggggtttttctttggggcacttgcttgactctgtatgaacttgtgatccaaggaaaaaggagaaagaacagtgttggcttttaaaatcaggatggttttatgtttgctacgaaataaggcaagaataaaaaattcttattttta

SEQ ID NO: 421484 - DNA, 2867 bp, Homo sapiens
agcgctggtggtggcgcgcggcgcggcgcggcgatggcggcgggtggcagcgatccgcgggctggcgacgtagaggaggacgcctcacagctcatctttcctaaagagtttgaaacagctgagacacttctaaattcagaagttcatatgcttctggaacatcgaaagcagcagaatgagagtgcagaggacgaacaggagctctcagaagtcttcatgaaaacattaaactacacagcccgtttcagtcgtttcaaaaacagagagaccattgccagtgttcgtagcttgctactccagaaaaagcttcataagtttgagttggcctgtttggccaacctttgcccagagactgctgaggagtccaaggctctaatcccaagcttggagggacggtttgaagatgaggagctgcagcagattcttgatgatatccagacaaagcgcagctttcagtattaatctccaaacatcactgctgctcggagaaaccacatccccaggcataacaccaccttcccactgtctggggctgacttgcacagaaattctgttgaagacagttgagaattcctttggagaaaacagcccagcttggcgtggggttaggttgctgtttcaaataactcacaggcccaggtgacatggaatcttggagcagccttgtgcagtggcagccagtggcttcctgaacgtgcctctgcgaagtgtgagatgaggggtcacataaccacactgttgactacctcattcctggtttttggcctccacatcatcttttttcttaatatttcatgttttaatttcagggtgtttatactttttgaaactagaccagaagatagtagactttatagagaaagaccagttttacctagatactaaaggaagaattaaaccgctgttagtttgaaatgctttttttttttttttttaaatggagatagggtcttaactcttgtccaggctggaggagtgcagtcgtacagtcatggctcactgaagtcttgaccccgctgcctcagcctcccaaataactggggccacaggtgtgcaccacaactctcagctaatttttaaaattttttatagaggtggggttttactatgctgtccagactggtcttaaactcctgggctcaagtgatccccctgccttggcctcccaaactggtgagattacaggcatgagccaccacaactggcctgaaattcttaaaggatgggagtgtcgatgacagcaccttggcatcgttgtgcctaacctgggagacggaagaagcacgccatgggaagtgtttacacttggggacaagtgctaagtattgtggagcccatagccccttgagatagatggctactttgcctttcttcttgaactgtcttgcagaatgtggatttggggtaagtggtcttgaaggattcatttagtcaccctcaaattaagatttttacttcatctttcttgggcctgcacctccaagataacaaagaagaagcaatggtcgtgccaaagaggtccacaaccaggtgtgcactgttcactgcagcccatttgctgtatgaactgtggttgttgtgtgcccaatgacaaggctactaagaaattcatcatttgaaacgtagaggccgcagcagtcagcgatgtttctgaaatgagcatccttgacgcctgtgtacttcccaggctggatgtgaagctacattaccatgtgagttgtgccattcacagcacagtggtgaggaattgagctcatgaagcaggcaaggaccgaacacctccaccccaacgtagacctgcaggtgctgccccatgacctccaccaaagcccatataaggagcggagttgttaaggactgaagaaaaacttctctggagaaaaataaaattgcaattctacttaaaaaaatttttttttttttttacttcataggccaggcttgaagttctgaacactttgaagtctccaattatgagagatccagtctaagcctctggcctgctaattagcaataagtgctttatttggaaggagggagtcatccactcttgagccactgcagtgaagtcacttgatctcagtctgggggaaaacacttcaatagctaaacattctagctttgatttttctgaagggaatacacttgttttcaattttggggtttttctttggggcacttgcttgactctgtatgaacttgtgatccaaggaaaaaggagaaagaacagtgttggcttttaaaatcaggatggttttatgtttgctacgaaataaggcaagaataaaaaattcttatttttatttatttatttattttttgagatagagtctggctgtgttgcccaggatgcaatggcgcaatcttggctcactgcaacctctgccttctgggttcaagtgattctcctgcctcagcctcccaagtagctgggattacaggtacctgccaccacgcctggctaattttttgtgtttttagtagagacagggtttcaccacgttcgccaggctagtcttgaactgacctcaagtgatcctcccacctcggcttcccaaagtgctgggattacaggcgtgagccaccggccaatctttttatccttgagcaacttcgcttctttgagcctcattggtgttctcaattgtgaaatatggataatagtatctgccccatgggtattttgagaaggttgaatgaacaggaaattattacaaagagcctagaggtgtctgatatatagtatgttccagtaaatgttcactattcttagcatctcaggcagatactatatcccatatttcacaattgagacaccatgaagctcaagaagctaagtgctggtggaagggagggtaccgagctcc

SEQ ID NO: 421485 - DNA, 5143 bp, Homo sapiens
cgcgtggtcgccgcaggcctggcgttatgcgcgcttcgcccaaggccctgcctcagcggcggcttgggcaagccccagcgcggcgtggggctggggagggaacatggccttgggagggaccatggccttgggagggaccgcctgggcaactgggttattttatgtgataaactgcgaagttccggggacctgtgtcaaagataaacaaagccggacactcaggtgagtttgaaacagctgagacacttctaaattcagaagttcatatgcttctggaacatcgaaagcagcagaatgagagtgcagaggacgaacaggagctctcagaagtcttcatgaaaacattaaactacacagcccgtttcagtcgtttcaaaaacagagagaccattgccagtgttcgtagcttgctactccagaaaaagcttcataagtttgagttggcctgtttggccaacctttgcccagagactgctgaggagtccaaggctctaatcccaagcttggagggacggtttgaagatgaggagctgcagcagattcttgatgatatccagacaaagcgcagctttcagtattaatctccaaacatcactgctgctcggagaaaccacatccccaggcataacaccaccttcccactgtctggggctgacttgcacagaaattctgttgaagacagttgagaattcctttggagaaaacagcccagcttggcgtggggttaggttgctgtttcaaataactcacaggcccaggtgacatggaatcttggagcagccttgtgcagtggcagccagtggcttcctgaacgtgcctctgcgaagtgtgagatgaggggtcacataaccacactgttgactacctcattcctggtttttggcctccacatcatcttttttcttaatatttcatgttttaatttcagggtgtttatactttttgaaactagaccagaagatagtagactttatagagaaagaccagttttacctagatactaaaggaagaattaaaccgctgttagtttgaaatgctttttttttttttttttaaatggagatagggtcttaactcttgtccaggctggaggagtgcagtcgtacagtcatggctcactgaagtcttgaccccgctgcctcagcctcccaaataactggggccacaggtgtgcaccacaactctcagctaatttttaaaattttttatagaggtggggttttactatgctgtccagactggtcttaaactcctgggctcaagtgatccccctgccttggcctcccaaactggtgagattacaggcatgagccaccacaactggcctgaaattcttaaaggatgggagtgtcgatgacagcaccttggcatcgttgtgcctaacctgggagacggaagaagcacgccatgggaagtgtttacacttggggacaagtgctaagtattgtggagcccatagccccttgagatagatggctactttgcctttcttcttgaactgtcttgcagaatgtggatttggggtaagtggtcttgaaggattcatttagtcaccctcaaattaagatttttacttcatctttcttgggcctgcacctccaagataacaaagaagaagcaatggtcgtgccaaagaggtccacaaccaggtgtgcactgttcactgcagcccatttgctgtatgaactgtggttgttgtgtgcccaatgacaaggctactaagaaattcatcatttgaaacgtagaggccgcagcagtcagcgatgtttctgaaatgagcatccttgacgcctgtgtacttcccaggctggatgtgaagctacattaccatgtgagttgtgccattcacagcacagtggtgaggaattgagctcatgaagcaggcaaggaccgaacacctccaccccaacgtagacctgcaggtgctgccccatgacctccaccaaagcccatataaggagcggagttgttaaggactgaagaaaaacttctctggagaaaaataaaattgcaattctacttaaaaaaatttttttttttttttacttcataggccaggcttgaagttctgaacactttgaagtctccaattatgagagatccagtctaagcctctggcctgctaattagcaataagtgctttatttggaaggagggagtcatccactcttgagccactgcagtgaagtcacttgatctcagtctgggggaaaacacttcaatagctaaacattctagctttgatttttctgaagggaatacacttgttttcaattttggggtttttctttggggcacttgcttgactctgtatgaacttgtgatccaaggaaaaaggagaaagaacagtgttggcttttaaaatcaggatggttttatgtttgctacgaaataaggcaagaataaaaaattcttatttttatttatttatttattttttgagatagagtctggctgtgttgcccaggatgcaatggcgcaatcttggctcactgcaacctctgccttctgggttcaagtgattctcctgcctcagcctcccaagtagctgggattacaggtacctgccaccacgcctggctaattttttgtgtttttagtagagacagggtttcaccacgttcgccaggctagtcttgaactgacctcaagtgatcctcccacctcggcttcccaaagtgctgggattacaggcgtgagccaccggccaatctttttatccttgagcaacttcgcttctttgagcctcattggtgttctcaattgtgaaatatggataatagtatctgccccatgggtattttgagaaggttgaatgaacaggaaattattacaaagagcctagaggtgtctgatatatagtatgttccagtaaatgttcactattcttagcatctcaggcagatgagctagtatagatagatgattaagtcagcttgcttcatagaaattagtgcaagaatttgttagcctaccaactgatagtatcagacttggaaaataaatgaaattgggccaggcgtggtggctcacccttgtaatcccagcgctttcagaggccgaggcaggcggatcacctgaggttgggagtttgagaccatcctgaccaacatggagaaaccccgtctctacttaaaatacaaaattagcggggcgtggtggcgcatgcctgtaatctcagctactctggaggctgaggcaggagaattgcttgaacctgggaggcagagggggtggcgagccaagattgcaccattgtactccagcctaggcaacaagagcgaaactgtctcaaaaaaaaaaaaaaaaaaaaagtgaaattgcttacccaaatctacagttaactttcgttttttaatgcttgatgaatttgcatgtcattcttgggcagtggccatgctgtcttctctgtattgttccaatttgggtatatgtgctgccaaagtgagtactgcagaattatttcttgagagaggcacttacatgtgctgattggcactaaagcagtggaatgggaagaagagacttggaaggcagcccagacgatccaggcgtgtgctagatggcaactgaggagcacggtgctaccatctttactggtgtttccacctatgtgccaggggttctgtgagctacctgagaatactgaagtatataatgctctggcacatagttaggcactaatcagtggtatttatcaaggtgattaaaagcagatttaaaaagcagctcacagttgggcgcggtggctcacacctgtaatcccagcactttgggaggccgaggcgggtggatcaccagaggtcagaagttcgagaccagcctggccaacgttgtgaaaccctgtctctactaaaaatacaaaaattggccacgtgtggtggcgggcacctgtaatcctagctacttgggaagctgagacaggagaattgcttgaacccgggaggtggaggttgccagtgagccaagatcatgccattgcactccagcctgggcaacaagagcgagactccatcttgaaaaaaaataaaataataaaaagcagctcatactagggaacttggtaaagcaacctcatgctgttgtaggttgaaagcctggtcagctattctgcaagacagtcaaaaattgtttacagggctggacagcatattgctattgaaaaatagctattaggagaccttgcacaatttgtgaaacattgttaggctcattgtactgtgtaaaatcaggaaagaatttgggaacatactgatacaacaaaaagataggttgtcaaaccctcacttcaccagaaagctaaattaaccagataagtctttctgaaagttttagtgtcttagtttgttcctgcgctgtaacagaataccttagactgggtaacctataaataataggaatttatttctcacagttttggaggctggcaaatgcaagatccaggtgctggtacgttcagtgtctggcaagggcggctttctggtccaagatggtgcctttttttctgcatcttccatagggaatgaacactccttatggtagaagggatggaaggaccaggcttttttttttttttttggatacagcaggatcttgctctgtcgcccaggctggagtgcagtggcatgattaaggttcactgcagcctcaatctcccgctctccagcgatcatcccacctcagcctcttggatagctgggaccacaggcacgagctaccatgcctggctaatttattttttgtagagacggggtttcgccatgttgcccgggctggtctggaatttctgacctctggcagtccacctgtttccgcctcccaaatgctgagattagaggcatgagtcactgcacccagcccgcagcctcttttataagggcattaatccccttcatgagggatattctctcatgacttaatcacctgccaaagaccccacctcttaatactacatcagtgatgggttcaatgtatcaattgggtgggagggggcacattcagaccatagcatctagtcattctggttttattaagatttattagacctgaggcatgaaaaatagcatactggatgggacttcagcatcgatgagttgccttagtaatactgttaataaaaagcactaaatatgcaaaaaaaaaa

SEQ ID NO: 421486 - DNA, 4928 bp, Homo sapiens
agcgctggtggtggcgcgcggcgcggcgcggcgatggcggcgggtggcagcgatccgcgggctggcgacgtagaggaggacgcctcacagctcatctttcctaaagagtttgaaacagctgagacacttctaaattcagaagttcatatgcttctggaacatcgaaagcagcagaatgagagtgcagaggacgaacaggagctctcagaagtcttcatgaaaacattaaactacacagcccgtttcagtcgtttcaaaaacagagagaccattgccagtgttcgtagcttggagggacggtttgaagatgaggagctgcagcagattcttgatgatatccagacaaagcgcagctttcagtattaatctccaaacatcactgctgctcggagaaaccacatccccaggcataacaccaccttcccactgtctggggctgacttgcacagaaattctgttgaagacagttgagaattcctttggagaaaacagcccagcttggcgtggggttaggttgctgtttcaaataactcacaggcccaggtgacatggaatcttggagcagccttgtgcagtggcagccagtggcttcctgaacgtgcctctgcgaagtgtgagatgaggggtcacataaccacactgttgactacctcattcctggtttttggcctccacatcatcttttttcttaatatttcatgttttaatttcagggtgtttatactttttgaaactagaccagaagatagtagactttatagagaaagaccagttttacctagatactaaaggaagaattaaaccgctgttagtttgaaatgctttttttttttttttttaaatggagatagggtcttaactcttgtccaggctggaggagtgcagtcgtacagtcatggctcactgaagtcttgaccccgctgcctcagcctcccaaataactggggccacaggtgtgcaccacaactctcagctaatttttaaaattttttatagaggtggggttttactatgctgtccagactggtcttaaactcctgggctcaagtgatccccctgccttggcctcccaaactggtgagattacaggcatgagccaccacaactggcctgaaattcttaaaggatgggagtgtcgatgacagcaccttggcatcgttgtgcctaacctgggagacggaagaagcacgccatgggaagtgtttacacttggggacaagtgctaagtattgtggagcccatagccccttgagatagatggctactttgcctttcttcttgaactgtcttgcagaatgtggatttggggtaagtggtcttgaaggattcatttagtcaccctcaaattaagatttttacttcatctttcttgggcctgcacctccaagataacaaagaagaagcaatggtcgtgccaaagaggtccacaaccaggtgtgcactgttcactgcagcccatttgctgtatgaactgtggttgttgtgtgcccaatgacaaggctactaagaaattcatcatttgaaacgtagaggccgcagcagtcagcgatgtttctgaaatgagcatccttgacgcctgtgtacttcccaggctggatgtgaagctacattaccatgtgagttgtgccattcacagcacagtggtgaggaattgagctcatgaagcaggcaaggaccgaacacctccaccccaacgtagacctgcaggtgctgccccatgacctccaccaaagcccatataaggagcggagttgttaaggactgaagaaaaacttctctggagaaaaataaaattgcaattctacttaaaaaaatttttttttttttttacttcataggccaggcttgaagttctgaacactttgaagtctccaattatgagagatccagtctaagcctctggcctgctaattagcaataagtgctttatttggaaggagggagtcatccactcttgagccactgcagtgaagtcacttgatctcagtctgggggaaaacacttcaatagctaaacattctagctttgatttttctgaagggaatacacttgttttcaattttggggtttttctttggggcacttgcttgactctgtatgaacttgtgatccaaggaaaaaggagaaagaacagtgttggcttttaaaatcaggatggttttatgtttgctacgaaataaggcaagaataaaaaattcttatttttatttatttatttattttttgagatagagtctggctgtgttgcccaggatgcaatggcgcaatcttggctcactgcaacctctgccttctgggttcaagtgattctcctgcctcagcctcccaagtagctgggattacaggtacctgccaccacgcctggctaattttttgtgtttttagtagagacagggtttcaccacgttcgccaggctagtcttgaactgacctcaagtgatcctcccacctcggcttcccaaagtgctgggattacaggcgtgagccaccggccaatctttttatccttgagcaacttcgcttctttgagcctcattggtgttctcaattgtgaaatatggataatagtatctgccccatgggtattttgagaaggttgaatgaacaggaaattattacaaagagcctagaggtgtctgatatatagtatgttccagtaaatgttcactattcttagcatctcaggcagatgagctagtatagatagatgattaagtcagcttgcttcatagaaattagtgcaagaatttgttagcctaccaactgatagtatcagacttggaaaataaatgaaattgggccaggcgtggtggctcacccttgtaatcccagcgctttcagaggccgaggcaggcggatcacctgaggttgggagtttgagaccatcctgaccaacatggagaaaccccgtctctacttaaaatacaaaattagcggggcgtggtggcgcatgcctgtaatctcagctactctggaggctgaggcaggagaattgcttgaacctgggaggcagagggggtggcgagccaagattgcaccattgtactccagcctaggcaacaagagcgaaactgtctcaaaaaaaaaaaaaaaaaaaaagtgaaattgcttacccaaatctacagttaactttcgttttttaatgcttgatgaatttgcatgtcattcttgggcagtggccatgctgtcttctctgtattgttccaatttgggtatatgtgctgccaaagtgagtactgcagaattatttcttgagagaggcacttacatgtgctgattggcactaaagcagtggaatgggaagaagagacttggaaggcagcccagacgatccaggcgtgtgctagatggcaactgaggagcacggtgctaccatctttactggtgtttccacctatgtgccaggggttctgtgagctacctgagaatactgaagtatataatgctctggcacatagttaggcactaatcagtggtatttatcaaggtgattaaaagcagatttaaaaagcagctcacagttgggcgcggtggctcacacctgtaatcccagcactttgggaggccgaggcgggtggatcaccagaggtcagaagttcgagaccagcctggccaacgttgtgaaaccctgtctctactaaaaatacaaaaattggccacgtgtggtggcgggcacctgtaatcctagctacttgggaagctgagacaggagaattgcttgaacccgggaggtggaggttgccagtgagccaagatcatgccattgcactccagcctgggcaacaagagcgagactccatcttgaaaaaaaataaaataataaaaagcagctcatactagggaacttggtaaagcaacctcatgctgttgtaggttgaaagcctggtcagctattctgcaagacagtcaaaaattgtttacagggctggacagcatattgctattgaaaaatagctattaggagaccttgcacaatttgtgaaacattgttaggctcattgtactgtgtaaaatcaggaaagaatttgggaacatactgatacaacaaaaagataggttgtcaaaccctcacttcaccagaaagctaaattaaccagataagtctttctgaaagttttagtgtcttagtttgttcctgcgctgtaacagaataccttagactgggtaacctataaataataggaatttatttctcacagttttggaggctggcaaatgcaagatccaggtgctggtacgttcagtgtctggcaagggcggctttctggtccaagatggtgcctttttttctgcatcttccatagggaatgaacactccttatggtagaagggatggaaggaccaggcttttttttttttttttggatacagcaggatcttgctctgtcgcccaggctggagtgcagtggcatgattaaggttcactgcagcctcaatctcccgctctccagcgatcatcccacctcagcctcttggatagctgggaccacaggcacgagctaccatgcctggctaatttattttttgtagagacggggtttcgccatgttgcccgggctggtctggaatttctgacctctggcagtccacctgtttccgcctcccaaatgctgagattagaggcatgagtcactgcacccagcccgcagcctcttttataagggcattaatccccttcatgagggatattctctcatgacttaatcacctgccaaagaccccacctcttaatactacatcagtgatgggttcaatgtatcaattgggtgggagggggcacattcagaccatagcatctagtcattctggttttattaagatttattagacctgaggcatgaaaaatagcatactggatgggacttcagcatcgatgagttgccttagtaatactgttaataaaaagcactaaatatgcaaaaaaaaaa

SEQ ID NO: 421487 - DNA, 4843 bp, Homo sapiens
agcgctggtggtggcgcgcggcgcggcgcggcgatggcggcgggtggcagcgatccgcgggctggcgacgtagaggaggacgcctcacagctcatctttcctaaagcttgctactccagaaaaagcttcataagtttgagttggcctgtttggccaacctttgcccagagactgctgaggagtccaaggctctaatcccaagcttggagggacggtttgaagatgaggagctgcagcagattcttgatgatatccagacaaagcgcagctttcagtattaatctccaaacatcactgctgctcggagaaaccacatccccaggcataacaccaccttcccactgtctggggctgacttgcacagaaattctgttgaagacagttgagaattcctttggagaaaacagcccagcttggcgtggggttaggttgctgtttcaaataactcacaggcccaggtgacatggaatcttggagcagccttgtgcagtggcagccagtggcttcctgaacgtgcctctgcgaagtgtgagatgaggggtcacataaccacactgttgactacctcattcctggtttttggcctccacatcatcttttttcttaatatttcatgttttaatttcagggtgtttatactttttgaaactagaccagaagatagtagactttatagagaaagaccagttttacctagatactaaaggaagaattaaaccgctgttagtttgaaatgctttttttttttttttttaaatggagatagggtcttaactcttgtccaggctggaggagtgcagtcgtacagtcatggctcactgaagtcttgaccccgctgcctcagcctcccaaataactggggccacaggtgtgcaccacaactctcagctaatttttaaaattttttatagaggtggggttttactatgctgtccagactggtcttaaactcctgggctcaagtgatccccctgccttggcctcccaaactggtgagattacaggcatgagccaccacaactggcctgaaattcttaaaggatgggagtgtcgatgacagcaccttggcatcgttgtgcctaacctgggagacggaagaagcacgccatgggaagtgtttacacttggggacaagtgctaagtattgtggagcccatagccccttgagatagatggctactttgcctttcttcttgaactgtcttgcagaatgtggatttggggtaagtggtcttgaaggattcatttagtcaccctcaaattaagatttttacttcatctttcttgggcctgcacctccaagataacaaagaagaagcaatggtcgtgccaaagaggtccacaaccaggtgtgcactgttcactgcagcccatttgctgtatgaactgtggttgttgtgtgcccaatgacaaggctactaagaaattcatcatttgaaacgtagaggccgcagcagtcagcgatgtttctgaaatgagcatccttgacgcctgtgtacttcccaggctggatgtgaagctacattaccatgtgagttgtgccattcacagcacagtggtgaggaattgagctcatgaagcaggcaaggaccgaacacctccaccccaacgtagacctgcaggtgctgccccatgacctccaccaaagcccatataaggagcggagttgttaaggactgaagaaaaacttctctggagaaaaataaaattgcaattctacttaaaaaaatttttttttttttttacttcataggccaggcttgaagttctgaacactttgaagtctccaattatgagagatccagtctaagcctctggcctgctaattagcaataagtgctttatttggaaggagggagtcatccactcttgagccactgcagtgaagtcacttgatctcagtctgggggaaaacacttcaatagctaaacattctagctttgatttttctgaagggaatacacttgttttcaattttggggtttttctttggggcacttgcttgactctgtatgaacttgtgatccaaggaaaaaggagaaagaacagtgttggcttttaaaatcaggatggttttatgtttgctacgaaataaggcaagaataaaaaattcttatttttatttatttatttattttttgagatagagtctggctgtgttgcccaggatgcaatggcgcaatcttggctcactgcaacctctgccttctgggttcaagtgattctcctgcctcagcctcccaagtagctgggattacaggtacctgccaccacgcctggctaattttttgtgtttttagtagagacagggtttcaccacgttcgccaggctagtcttgaactgacctcaagtgatcctcccacctcggcttcccaaagtgctgggattacaggcgtgagccaccggccaatctttttatccttgagcaacttcgcttctttgagcctcattggtgttctcaattgtgaaatatggataatagtatctgccccatgggtattttgagaaggttgaatgaacaggaaattattacaaagagcctagaggtgtctgatatatagtatgttccagtaaatgttcactattcttagcatctcaggcagatgagctagtatagatagatgattaagtcagcttgcttcatagaaattagtgcaagaatttgttagcctaccaactgatagtatcagacttggaaaataaatgaaattgggccaggcgtggtggctcacccttgtaatcccagcgctttcagaggccgaggcaggcggatcacctgaggttgggagtttgagaccatcctgaccaacatggagaaaccccgtctctacttaaaatacaaaattagcggggcgtggtggcgcatgcctgtaatctcagctactctggaggctgaggcaggagaattgcttgaacctgggaggcagagggggtggcgagccaagattgcaccattgtactccagcctaggcaacaagagcgaaactgtctcaaaaaaaaaaaaaaaaaaaaagtgaaattgcttacccaaatctacagttaactttcgttttttaatgcttgatgaatttgcatgtcattcttgggcagtggccatgctgtcttctctgtattgttccaatttgggtatatgtgctgccaaagtgagtactgcagaattatttcttgagagaggcacttacatgtgctgattggcactaaagcagtggaatgggaagaagagacttggaaggcagcccagacgatccaggcgtgtgctagatggcaactgaggagcacggtgctaccatctttactggtgtttccacctatgtgccaggggttctgtgagctacctgagaatactgaagtatataatgctctggcacatagttaggcactaatcagtggtatttatcaaggtgattaaaagcagatttaaaaagcagctcacagttgggcgcggtggctcacacctgtaatcccagcactttgggaggccgaggcgggtggatcaccagaggtcagaagttcgagaccagcctggccaacgttgtgaaaccctgtctctactaaaaatacaaaaattggccacgtgtggtggcgggcacctgtaatcctagctacttgggaagctgagacaggagaattgcttgaacccgggaggtggaggttgccagtgagccaagatcatgccattgcactccagcctgggcaacaagagcgagactccatcttgaaaaaaaataaaataataaaaagcagctcatactagggaacttggtaaagcaacctcatgctgttgtaggttgaaagcctggtcagctattctgcaagacagtcaaaaattgtttacagggctggacagcatattgctattgaaaaatagctattaggagaccttgcacaatttgtgaaacattgttaggctcattgtactgtgtaaaatcaggaaagaatttgggaacatactgatacaacaaaaagataggttgtcaaaccctcacttcaccagaaagctaaattaaccagataagtctttctgaaagttttagtgtcttagtttgttcctgcgctgtaacagaataccttagactgggtaacctataaataataggaatttatttctcacagttttggaggctggcaaatgcaagatccaggtgctggtacgttcagtgtctggcaagggcggctttctggtccaagatggtgcctttttttctgcatcttccatagggaatgaacactccttatggtagaagggatggaaggaccaggcttttttttttttttttggatacagcaggatcttgctctgtcgcccaggctggagtgcagtggcatgattaaggttcactgcagcctcaatctcccgctctccagcgatcatcccacctcagcctcttggatagctgggaccacaggcacgagctaccatgcctggctaatttattttttgtagagacggggtttcgccatgttgcccgggctggtctggaatttctgacctctggcagtccacctgtttccgcctcccaaatgctgagattagaggcatgagtcactgcacccagcccgcagcctcttttataagggcattaatccccttcatgagggatattctctcatgacttaatcacctgccaaagaccccacctcttaatactacatcagtgatgggttcaatgtatcaattgggtgggagggggcacattcagaccatagcatctagtcattctggttttattaagatttattagacctgaggcatgaaaaatagcatactggatgggacttcagcatcgatgagttgccttagtaatactgttaataaaaagcactaaatatgcaaaaaaaaaa

SEQ ID NO: 421488 - DNA, 4747 bp, Homo sapiens
agcgctggtggtggcgcgcggcgcggcgcggcgatggcggcgggtggcagcgatccgcgggctggcgacgtagaggaggacgcctcacagctcatctttcctaaagcttggagggacggtttgaagatgaggagctgcagcagattcttgatgatatccagacaaagcgcagctttcagtattaatctccaaacatcactgctgctcggagaaaccacatccccaggcataacaccaccttcccactgtctggggctgacttgcacagaaattctgttgaagacagttgagaattcctttggagaaaacagcccagcttggcgtggggttaggttgctgtttcaaataactcacaggcccaggtgacatggaatcttggagcagccttgtgcagtggcagccagtggcttcctgaacgtgcctctgcgaagtgtgagatgaggggtcacataaccacactgttgactacctcattcctggtttttggcctccacatcatcttttttcttaatatttcatgttttaatttcagggtgtttatactttttgaaactagaccagaagatagtagactttatagagaaagaccagttttacctagatactaaaggaagaattaaaccgctgttagtttgaaatgctttttttttttttttttaaatggagatagggtcttaactcttgtccaggctggaggagtgcagtcgtacagtcatggctcactgaagtcttgaccccgctgcctcagcctcccaaataactggggccacaggtgtgcaccacaactctcagctaatttttaaaattttttatagaggtggggttttactatgctgtccagactggtcttaaactcctgggctcaagtgatccccctgccttggcctcccaaactggtgagattacaggcatgagccaccacaactggcctgaaattcttaaaggatgggagtgtcgatgacagcaccttggcatcgttgtgcctaacctgggagacggaagaagcacgccatgggaagtgtttacacttggggacaagtgctaagtattgtggagcccatagccccttgagatagatggctactttgcctttcttcttgaactgtcttgcagaatgtggatttggggtaagtggtcttgaaggattcatttagtcaccctcaaattaagatttttacttcatctttcttgggcctgcacctccaagataacaaagaagaagcaatggtcgtgccaaagaggtccacaaccaggtgtgcactgttcactgcagcccatttgctgtatgaactgtggttgttgtgtgcccaatgacaaggctactaagaaattcatcatttgaaacgtagaggccgcagcagtcagcgatgtttctgaaatgagcatccttgacgcctgtgtacttcccaggctggatgtgaagctacattaccatgtgagttgtgccattcacagcacagtggtgaggaattgagctcatgaagcaggcaaggaccgaacacctccaccccaacgtagacctgcaggtgctgccccatgacctccaccaaagcccatataaggagcggagttgttaaggactgaagaaaaacttctctggagaaaaataaaattgcaattctacttaaaaaaatttttttttttttttacttcataggccaggcttgaagttctgaacactttgaagtctccaattatgagagatccagtctaagcctctggcctgctaattagcaataagtgctttatttggaaggagggagtcatccactcttgagccactgcagtgaagtcacttgatctcagtctgggggaaaacacttcaatagctaaacattctagctttgatttttctgaagggaatacacttgttttcaattttggggtttttctttggggcacttgcttgactctgtatgaacttgtgatccaaggaaaaaggagaaagaacagtgttggcttttaaaatcaggatggttttatgtttgctacgaaataaggcaagaataaaaaattcttatttttatttatttatttattttttgagatagagtctggctgtgttgcccaggatgcaatggcgcaatcttggctcactgcaacctctgccttctgggttcaagtgattctcctgcctcagcctcccaagtagctgggattacaggtacctgccaccacgcctggctaattttttgtgtttttagtagagacagggtttcaccacgttcgccaggctagtcttgaactgacctcaagtgatcctcccacctcggcttcccaaagtgctgggattacaggcgtgagccaccggccaatctttttatccttgagcaacttcgcttctttgagcctcattggtgttctcaattgtgaaatatggataatagtatctgccccatgggtattttgagaaggttgaatgaacaggaaattattacaaagagcctagaggtgtctgatatatagtatgttccagtaaatgttcactattcttagcatctcaggcagatgagctagtatagatagatgattaagtcagcttgcttcatagaaattagtgcaagaatttgttagcctaccaactgatagtatcagacttggaaaataaatgaaattgggccaggcgtggtggctcacccttgtaatcccagcgctttcagaggccgaggcaggcggatcacctgaggttgggagtttgagaccatcctgaccaacatggagaaaccccgtctctacttaaaatacaaaattagcggggcgtggtggcgcatgcctgtaatctcagctactctggaggctgaggcaggagaattgcttgaacctgggaggcagagggggtggcgagccaagattgcaccattgtactccagcctaggcaacaagagcgaaactgtctcaaaaaaaaaaaaaaaaaaaaagtgaaattgcttacccaaatctacagttaactttcgttttttaatgcttgatgaatttgcatgtcattcttgggcagtggccatgctgtcttctctgtattgttccaatttgggtatatgtgctgccaaagtgagtactgcagaattatttcttgagagaggcacttacatgtgctgattggcactaaagcagtggaatgggaagaagagacttggaaggcagcccagacgatccaggcgtgtgctagatggcaactgaggagcacggtgctaccatctttactggtgtttccacctatgtgccaggggttctgtgagctacctgagaatactgaagtatataatgctctggcacatagttaggcactaatcagtggtatttatcaaggtgattaaaagcagatttaaaaagcagctcacagttgggcgcggtggctcacacctgtaatcccagcactttgggaggccgaggcgggtggatcaccagaggtcagaagttcgagaccagcctggccaacgttgtgaaaccctgtctctactaaaaatacaaaaattggccacgtgtggtggcgggcacctgtaatcctagctacttgggaagctgagacaggagaattgcttgaacccgggaggtggaggttgccagtgagccaagatcatgccattgcactccagcctgggcaacaagagcgagactccatcttgaaaaaaaataaaataataaaaagcagctcatactagggaacttggtaaagcaacctcatgctgttgtaggttgaaagcctggtcagctattctgcaagacagtcaaaaattgtttacagggctggacagcatattgctattgaaaaatagctattaggagaccttgcacaatttgtgaaacattgttaggctcattgtactgtgtaaaatcaggaaagaatttgggaacatactgatacaacaaaaagataggttgtcaaaccctcacttcaccagaaagctaaattaaccagataagtctttctgaaagttttagtgtcttagtttgttcctgcgctgtaacagaataccttagactgggtaacctataaataataggaatttatttctcacagttttggaggctggcaaatgcaagatccaggtgctggtacgttcagtgtctggcaagggcggctttctggtccaagatggtgcctttttttctgcatcttccatagggaatgaacactccttatggtagaagggatggaaggaccaggcttttttttttttttttggatacagcaggatcttgctctgtcgcccaggctggagtgcagtggcatgattaaggttcactgcagcctcaatctcccgctctccagcgatcatcccacctcagcctcttggatagctgggaccacaggcacgagctaccatgcctggctaatttattttttgtagagacggggtttcgccatgttgcccgggctggtctggaatttctgacctctggcagtccacctgtttccgcctcccaaatgctgagattagaggcatgagtcactgcacccagcccgcagcctcttttataagggcattaatccccttcatgagggatattctctcatgacttaatcacctgccaaagaccccacctcttaatactacatcagtgatgggttcaatgtatcaattgggtgggagggggcacattcagaccatagcatctagtcattctggttttattaagatttattagacctgaggcatgaaaaatagcatactggatgggacttcagcatcgatgagttgccttagtaatactgttaataaaaagcactaaatatgcaaaaaaaaaa

SEQ ID NO: 421489 - DNA, 4027 bp, Homo sapiens
tgaggatcccgtatatgctgtctcagacacctgactacctggcactgcaggtatatagcaccatgcccaaagctaatttttaaaattttttatagaggtggggttttactatgctgtccagactggtcttaaactcctgggctcaagtgatccccctgccttggcctcccaaactggtgagattacaggcatgagccaccacaactggcctgaaattcttaaaggatgggagtgtcgatgacagcaccttggcatcgttgtgcctaacctgggagacggaagaagcacgccatgggaagtgtttacacttggggacaagtgctaagtattgtggagcccatagccccttgagatagatggctactttgcctttcttcttgaactgtcttgcagaatgtggatttggggtaagtggtcttgaaggattcatttagtcaccctcaaattaagatttttacttcatctttcttgggcctgcacctccaagataacaaagaagaagcaatggtcgtgccaaagaggtccacaaccaggtgtgcactgttcactgcagcccatttgctgtatgaactgtggttgttgtgtgcccaatgacaaggctactaagaaattcatcatttgaaacgtagaggccgcagcagtcagcgatgtttctgaaatgagcatccttgacgcctgtgtacttcccaggctggatgtgaagctacattaccatgtgagttgtgccattcacagcacagtggtgaggaattgagctcatgaagcaggcaaggaccgaacacctccaccccaacgtagacctgcaggtgctgccccatgacctccaccaaagcccatataaggagcggagttgttaaggactgaagaaaaacttctctggagaaaaataaaattgcaattctacttaaaaaaatttttttttttttttacttcataggccaggcttgaagttctgaacactttgaagtctccaattatgagagatccagtctaagcctctggcctgctaattagcaataagtgctttatttggaaggagggagtcatccactcttgagccactgcagtgaagtcacttgatctcagtctgggggaaaacacttcaatagctaaacattctagctttgatttttctgaagggaatacacttgttttcaattttggggtttttctttggggcacttgcttgactctgtatgaacttgtgatccaaggaaaaaggagaaagaacagtgttggcttttaaaatcaggatggttttatgtttgctacgaaataaggcaagaataaaaaattcttatttttatttatttatttattttttgagatagagtctggctgtgttgcccaggatgcaatggcgcaatcttggctcactgcaacctctgccttctgggttcaagtgattctcctgcctcagcctcccaagtagctgggattacaggtacctgccaccacgcctggctaattttttgtgtttttagtagagacagggtttcaccacgttcgccaggctagtcttgaactgacctcaagtgatcctcccacctcggcttcccaaagtgctgggattacaggcgtgagccaccggccaatctttttatccttgagcaacttcgcttctttgagcctcattggtgttctcaattgtgaaatatggataatagtatctgccccatgggtattttgagaaggttgaatgaacaggaaattattacaaagagcctagaggtgtctgatatatagtatgttccagtaaatgttcactattcttagcatctcaggcagatgagctagtatagatagatgattaagtcagcttgcttcatagaaattagtgcaagaatttgttagcctaccaactgatagtatcagacttggaaaataaatgaaattgggccaggcgtggtggctcacccttgtaatcccagcgctttcagaggccgaggcaggcggatcacctgaggttgggagtttgagaccatcctgaccaacatggagaaaccccgtctctacttaaaatacaaaattagcggggcgtggtggcgcatgcctgtaatctcagctactctggaggctgaggcaggagaattgcttgaacctgggaggcagagggggtggcgagccaagattgcaccattgtactccagcctaggcaacaagagcgaaactgtctcaaaaaaaaaaaaaaaaaaaaagtgaaattgcttacccaaatctacagttaactttcgttttttaatgcttgatgaatttgcatgtcattcttgggcagtggccatgctgtcttctctgtattgttccaatttgggtatatgtgctgccaaagtgagtactgcagaattatttcttgagagaggcacttacatgtgctgattggcactaaagcagtggaatgggaagaagagacttggaaggcagcccagacgatccaggcgtgtgctagatggcaactgaggagcacggtgctaccatctttactggtgtttccacctatgtgccaggggttctgtgagctacctgagaatactgaagtatataatgctctggcacatagttaggcactaatcagtggtatttatcaaggtgattaaaagcagatttaaaaagcagctcacagttgggcgcggtggctcacacctgtaatcccagcactttgggaggccgaggcgggtggatcaccagaggtcagaagttcgagaccagcctggccaacgttgtgaaaccctgtctctactaaaaatacaaaaattggccacgtgtggtggcgggcacctgtaatcctagctacttgggaagctgagacaggagaattgcttgaacccgggaggtggaggttgccagtgagccaagatcatgccattgcactccagcctgggcaacaagagcgagactccatcttgaaaaaaaataaaataataaaaagcagctcatactagggaacttggtaaagcaacctcatgctgttgtaggttgaaagcctggtcagctattctgcaagacagtcaaaaattgtttacagggctggacagcatattgctattgaaaaatagctattaggagaccttgcacaatttgtgaaacattgttaggctcattgtactgtgtaaaatcaggaaagaatttgggaacatactgatacaacaaaaagataggttgtcaaaccctcacttcaccagaaagctaaattaaccagataagtctttctgaaagttttagtgtcttagtttgttcctgcgctgtaacagaataccttagactgggtaacctataaataataggaatttatttctcacagttttggaggctggcaaatgcaagatccaggtgctggtacgttcagtgtctggcaagggcggctttctggtccaagatggtgcctttttttctgcatcttccatagggaatgaacactccttatggtagaagggatggaaggaccaggcttttttttttttttttggatacagcaggatcttgctctgtcgcccaggctggagtgcagtggcatgattaaggttcactgcagcctcaatctcccgctctccagcgatcatcccacctcagcctcttggatagctgggaccacaggcacgagctaccatgcctggctaatttattttttgtagagacggggtttcgccatgttgcccgggctggtctggaatttctgacctctggcagtccacctgtttccgcctcccaaatgctgagattagaggcatgagtcactgcacccagcccgcagcctcttttataagggcattaatccccttcatgagggatattctctcatgacttaatcacctgccaaagaccccacctcttaatactacatcagtgatgggttcaatgtatcaattgggtgggagggggcacattcagaccatagcatctagtcattctggttttattaagatttattagacctgaggcatgaaaaatagcatactggatgggacttcagcatcgatgagttgccttagtaatactgttaataaaaagcactaaatatgcaaaaaaaaaa

SEQ ID NO: 421490 - DNA, 591 bp, Homo sapiens
aaggaacaagaccacgatatcatagtcccacaattttccatttctccccaacttaaaaacaaacagaaaggtttaagtgtttaaaatgaaatctacttagtatatgaaagacagttaaaaatatttaatatcattttagtttctcttatgaaacaattaagctaaaatactgactcattatatttttccttatcaaaactcttgaccatagttgactcctattcttttggatgttatcctatcctcaagctcatatcagctcagattgaaataaagtatttacatggggataagagtagacttcttaagactttatatttcaaataactatttttaagtaacttattaagaatttaggctggacgcagtggctcatgcctgtaatcccagcactttgggaggccaaggcgggcggatcacctggggttgggagttcgagaccagcctgaccaacatggagaaaccccatctctactaaaaatacaaaattagccaggcatggtggcacatgcctgtaatcccagctactcaggaggctgaggcaggagaactgcttgaacttaggaggtggaggttgtggtgagccgagat

SEQ ID NO: 421491 - DNA, 2457 bp, Homo sapiens
aggagggattggctgaggagcttggagagggggcgtcatcacctcacccaaaggttaaataggggttgagatatgatgctcaggagaagcgctttctttcgcgagcaccctgaaccagaccatgacccagaccctcaagtacgcctccagagtgttccatcgcgtccgctgggcgcccgagttgggcgcctccctaggctaccgagagtaccactcagcacgccggagcttggcagacatcccaggcccctctacgcccagctttctggccgaacttttctgcaagggggggctgtcgaggctacacgagctgcaggtgcagggcgccgcgcacttcgggccggtgtggctagccagctttgggacagtgcgcaccgtgtacgtggctgcccctgcactcgtcgaggagctgctgcgacaggagggaccccggcccgagcgctgcagcttctcgccctggacggagcaccgccgctgccgccagcgggcttgcggactgctcactgcggaaggcgaagaatggcaaaggctccgcagtctcctggccccgctcctcctccggcctcaagcggccgcccgctacgccggaaccctgaacaacgtagtctgcgaccttgtgcggcgtctgaggcgccagcggggacgtggcacggggccgcccgccctggttcgggacgtggcgggggaattttacaagttcggactggaaggcatcgccgcggttctgctcggctcgcgcttgggctgcctggaggctcaagtgccacccgacacggagaccttcatccgcgctgtgggctcggtgtttgtgtccacgctgttgaccatggcgatgccccactggctgcgccaccttgtgcctgggccctggggccgcctctgccgagactgggaccagatgtttgcatttgctcagaggcacgtggagcggcgagaggcagaggcagccatgaggaacggaggacagcccgagaaggacctggagtctggggcgcacctgacccacttcctgttccgggaagagttgcctgcccagtccatcctgggaaatgtgacagagttgctattggcgggagtggacacggtgtccaacacgctctcttgggctctgtatgagctctcccggcaccccgaagtccagacagcactccactcagagatcacagctgccctgagccctggctccagtgcctacccctcagccactgttctgtcccagctgcccctgctgaaggcggtggtcaaggaagtgctaagactgtaccctgtggtacctggaaattctcgtgtcccagacaaagacattcatgtgggtgactatattatccccaaaaatacgctggtcactctgtgtcactatgccacttcaagggaccctgcccagttcccagagccaaattcttttcgtccagctcgctggctgggggagggtcccaccccccacccatttgcatctcttccctttggctttggcaagcgcagctgtatggggagacgcctggcagagcttgaattgcaaatggctttggcccagatcctaacacattttgaggtgcagcctgagccaggtgcggccccagttagacccaagacccggactgtcctggtacctgaaaggagcatcaacctacagtttttggacagatagtcccatggaaagagactgtcatcatcaccctttcattcatcatagggataagattttttgtaggcacaagaccaaggtatacatcttcccctaatgcctatctgaccaaactggatagaaccaccatagtgaagtgtgaggcggccctgaccaatgtgtgaagtatgcacttggcctgactcaggaagccaggtgagaaaaccatggtctctctgcttgcttggcccttctgatcatgtatgcatcccccaaggatgaaatcagattttaactaataatgctggatggcctgaggaaagattcaactgcctctctttttgggctttcatagtgttcattgatgctgctggctaagcatttatcaaagcataagctcagtaactgtgcatctggtctgtacctggttggtccttcgtctttgcatgtaagctctttgagaggaagggtgaagccttatttgttttttatgtcccctgccagggcctgtctctgactaggtgtcaccatacacattcttagattgaatctgaaccatgtggcagaagggataagcagcttacttagtaggctctgtctacccccttccttctttgtcttgcccctaggaaggtgaatctgccctagcctggtttacggtttcttataactctcctttgctctctggccactattaagtgggtttgccccatcacttagttctcaggcagagacatctttgggcctgtccctgcccaggcctctggctttttatattgaaaatttttaaatattcacaaattttagaataaatcaaatattccattcttgat

SEQ ID NO: 421492 - DNA, 2542 bp, Homo sapiens
aggagggattggctgaggagcttggagagggggcgtcatcacctcacccaaaggttaaataggggttgagatatgatgctcaggagaagcgctttctttcgcgagcaccctgaaccagaccatgacccagaccctcaagtacgcctccagagtgttccatcgcgtccgctgggcgcccgagttgggcgcctccctaggctaccgagagtaccactcagcacgccggagcttggcagacatcccaggcccctctacgcccagctttctggccgaacttttctgcaagggggggctgtcgaggctacacgagctgcaggtgcagggcgccgcgcacttcgggccggtgtggctagccagctttgggacagtgcgcaccgtgtacgtggctgcccctgcactcgtcgaggagctgctgcgacaggagggaccccggcccgagcgctgcagcttctcgccctggacggagcaccgccgctgccgccagcgggcttgcggactgctcactgcggaaggcgaagaatggcaaaggctccgcagtctcctggccccgctcctcctccggcctcaagcggccgcccgctacgccggaaccctgaacaacgtagtctgcgaccttgtgcggcgtctgaggcgccagcggggacgtggcacggggccgcccgccctggttcgggacgtggcgggggaattttacaagttcggactggaaggtgagtcccaggacagagctgggcaggcgtcgggggcgccctaccagagcctcccggaaccctgacggcgccccctcccgacaaggcatcgccgcggttctgctcggctcgcgcttgggctgcctggaggctcaagtgccacccgacacggagaccttcatccgcgctgtgggctcggtgtttgtgtccacgctgttgaccatggcgatgccccactggctgcgccaccttgtgcctgggccctggggccgcctctgccgagactgggaccagatgtttgcatttgctcagaggcacgtggagcggcgagaggcagaggcagccatgaggaacggaggacagcccgagaaggacctggagtctggggcgcacctgacccacttcctgttccgggaagagttgcctgcccagtccatcctgggaaatgtgacagagttgctattggcgggagtggacacggtgtccaacacgctctcttgggctctgtatgagctctcccggcaccccgaagtccagacagcactccactcagagatcacagctgccctgagccctggctccagtgcctacccctcagccactgttctgtcccagctgcccctgctgaaggcggtggtcaaggaagtgctaagactgtaccctgtggtacctggaaattctcgtgtcccagacaaagacattcatgtgggtgactatattatccccaaaaatacgctggtcactctgtgtcactatgccacttcaagggaccctgcccagttcccagagccaaattcttttcgtccagctcgctggctgggggagggtcccaccccccacccatttgcatctcttccctttggctttggcaagcgcagctgtatggggagacgcctggcagagcttgaattgcaaatggctttggcccagatcctaacacattttgaggtgcagcctgagccaggtgcggccccagttagacccaagacccggactgtcctggtacctgaaaggagcatcaacctacagtttttggacagatagtcccatggaaagagactgtcatcatcaccctttcattcatcatagggataagattttttgtaggcacaagaccaaggtatacatcttcccctaatgcctatctgaccaaactggatagaaccaccatagtgaagtgtgaggcggccctgaccaatgtgtgaagtatgcacttggcctgactcaggaagccaggtgagaaaaccatggtctctctgcttgcttggcccttctgatcatgtatgcatcccccaaggatgaaatcagattttaactaataatgctggatggcctgaggaaagattcaactgcctctctttttgggctttcatagtgttcattgatgctgctggctaagcatttatcaaagcataagctcagtaactgtgcatctggtctgtacctggttggtccttcgtctttgcatgtaagctctttgagaggaagggtgaagccttatttgttttttatgtcccctgccagggcctgtctctgactaggtgtcaccatacacattcttagattgaatctgaaccatgtggcagaagggataagcagcttacttagtaggctctgtctacccccttccttctttgtcttgcccctaggaaggtgaatctgccctagcctggtttacggtttcttataactctcctttgctctctggccactattaagtgggtttgccccatcacttagttctcaggcagagacatctttgggcctgtccctgcccaggcctctggctttttatattgaaaatttttaaatattcacaaattttagaataaatcaaatattccattcttgat

SEQ ID NO: 421493 - DNA, 550 bp, Homo sapiens
aggagggattggctgaggagcttggagagggggcgtcatcacctcacccaaaggttaaataggggttgagatatgatgctcaggagaagcgctttctttcgcgagcaccctgaaccagaccatgacccagaccctcaagtacgcctccagagtgttccatcgcgtccgctgggcgcccgagttgggcgcctccctaggctaccgagagtaccactcagcacgccggagcttggcagacatcccaggcccctctacgcccagctttctggccgaacttttctgcaagggggggctgtcgaggctacacgagctgcaggtaggaagggacgcctttcccgagacagagtgctggggaaactggttttgacagcgtcagaaaggactgactagtgcagagcaaatgtgggacagccagagagaacggatgcccatgaaataaggaaaaggcgagttgaggctgggggcggtgtggctacactcgggcagagcccgtcccgactcttagcagagggcgctgcgaaagcgccttctcgctgtcctgaggtgtgga

SEQ ID NO: 421494 - DNA, 2249 bp, Homo sapiens
gctaccttagctggacctcgtctcccagggactagagaaaagagcaggagtcctgggtcttcccagttgagactgctggagctgagacacagtactctcttaaagaaggtgcagggcgccgcgcacttcgggccggtgtggctagccagctttgggacagtgcgcaccgtgtacgtggctgcccctgcactcgtcgaggagctgctgcgacaggagggaccccggcccgagcgctgcagcttctcgccctggacggagcaccgccgctgccgccagcgggcttgcggactgctcactgcggaaggcgaagaatggcaaaggctccgcagtctcctggccccgctcctcctccggcctcaagcggccgcccgctacgccggaaccctgaacaacgtagtctgcgaccttgtgcggcgtctgaggcgccagcggggacgtggcacggggccgcccgccctggttcgggacgtggcgggggaattttacaagttcggactggaaggcatcgccgcggttctgctcggctcgcgcttgggctgcctggaggctcaagtgccacccgacacggagaccttcatccgcgctgtgggctcggtgtttgtgtccacgctgttgaccatggcgatgccccactggctgcgccaccttgtgcctgggccctggggccgcctctgccgagactgggaccagatgtttgcatttgctcagaggcacgtggagcggcgagaggcagaggcagccatgaggaacggaggacagcccgagaaggacctggagtctggggcgcacctgacccacttcctgttccgggaagagttgcctgcccagtccatcctgggaaatgtgacagagttgctattggcgggagtggacacggtgtccaacacgctctcttgggctctgtatgagctctcccggcaccccgaagtccagacagcactccactcagagatcacagctgccctgagccctggctccagtgcctacccctcagccactgttctgtcccagctgcccctgctgaaggcggtggtcaaggaagtgctaagactgtaccctgtggtacctggaaattctcgtgtcccagacaaagacattcatgtgggtgactatattatccccaaaaatacgctggtcactctgtgtcactatgccacttcaagggaccctgcccagttcccagagccaaattcttttcgtccagctcgctggctgggggagggtcccaccccccacccatttgcatctcttccctttggctttggcaagcgcagctgtatggggagacgcctggcagagcttgaattgcaaatggctttggcccagatcctaacacattttgaggtgcagcctgagccaggtgcggccccagttagacccaagacccggactgtcctggtacctgaaaggagcatcaacctacagtttttggacagatagtcccatggaaagagactgtcatcatcaccctttcattcatcatagggataagattttttgtaggcacaagaccaaggtatacatcttcccctaatgcctatctgaccaaactggatagaaccaccatagtgaagtgtgaggcggccctgaccaatgtgtgaagtatgcacttggcctgactcaggaagccaggtgagaaaaccatggtctctctgcttgcttggcccttctgatcatgtatgcatcccccaaggatgaaatcagattttaactaataatgctggatggcctgaggaaagattcaactgcctctctttttgggctttcatagtgttcattgatgctgctggctaagcatttatcaaagcataagctcagtaactgtgcatctggtctgtacctggttggtccttcgtctttgcatgtaagctctttgagaggaagggtgaagccttatttgttttttatgtcccctgccagggcctgtctctgactaggtgtcaccatacacattcttagattgaatctgaaccatgtggcagaagggataagcagcttacttagtaggctctgtctacccccttccttctttgtcttgcccctaggaaggtgaatctgccctagcctggtttacggtttcttataactctcctttgctctctggccactattaagtgggtttgccccatcacttagttctcaggcagagacatctttgggcctgtccctgcccaggcctctggctttttatattgaaaatttttaaatattcacaaattttagaataaatcaaatattccattcttgat

SEQ ID NO: 421495 - DNA, 2321 bp, Homo sapiens
ctagggatgggaaatgagagaggaggagtttgcagtatcaaaggcatacactagttgggcacccgagaaagagcagaagctccctattcccaagcccagtcaacgcccttggcgtgggcacaggtcaagctgaaagtccccgcccaggtatccaagtgtccgctgtgtccgctcccccaggtgcagggcgccgcgcacttcgggccggtgtggctagccagctttgggacagtgcgcaccgtgtacgtggctgcccctgcactcgtcgaggagctgctgcgacaggagggaccccggcccgagcgctgcagcttctcgccctggacggagcaccgccgctgccgccagcgggcttgcggactgctcactgcggaaggcgaagaatggcaaaggctccgcagtctcctggccccgctcctcctccggcctcaagcggccgcccgctacgccggaaccctgaacaacgtagtctgcgaccttgtgcggcgtctgaggcgccagcggggacgtggcacggggccgcccgccctggttcgggacgtggcgggggaattttacaagttcggactggaaggcatcgccgcggttctgctcggctcgcgcttgggctgcctggaggctcaagtgccacccgacacggagaccttcatccgcgctgtgggctcggtgtttgtgtccacgctgttgaccatggcgatgccccactggctgcgccaccttgtgcctgggccctggggccgcctctgccgagactgggaccagatgtttgcatttgctcagaggcacgtggagcggcgagaggcagaggcagccatgaggaacggaggacagcccgagaaggacctggagtctggggcgcacctgacccacttcctgttccgggaagagttgcctgcccagtccatcctgggaaatgtgacagagttgctattggcgggagtggacacggtgtccaacacgctctcttgggctctgtatgagctctcccggcaccccgaagtccagacagcactccactcagagatcacagctgccctgagccctggctccagtgcctacccctcagccactgttctgtcccagctgcccctgctgaaggcggtggtcaaggaagtgctaagactgtaccctgtggtacctggaaattctcgtgtcccagacaaagacattcatgtgggtgactatattatccccaaaaatacgctggtcactctgtgtcactatgccacttcaagggaccctgcccagttcccagagccaaattcttttcgtccagctcgctggctgggggagggtcccaccccccacccatttgcatctcttccctttggctttggcaagcgcagctgtatggggagacgcctggcagagcttgaattgcaaatggctttggcccagatcctaacacattttgaggtgcagcctgagccaggtgcggccccagttagacccaagacccggactgtcctggtacctgaaaggagcatcaacctacagtttttggacagatagtcccatggaaagagactgtcatcatcaccctttcattcatcatagggataagattttttgtaggcacaagaccaaggtatacatcttcccctaatgcctatctgaccaaactggatagaaccaccatagtgaagtgtgaggcggccctgaccaatgtgtgaagtatgcacttggcctgactcaggaagccaggtgagaaaaccatggtctctctgcttgcttggcccttctgatcatgtatgcatcccccaaggatgaaatcagattttaactaataatgctggatggcctgaggaaagattcaactgcctctctttttgggctttcatagtgttcattgatgctgctggctaagcatttatcaaagcataagctcagtaactgtgcatctggtctgtacctggttggtccttcgtctttgcatgtaagctctttgagaggaagggtgaagccttatttgttttttatgtcccctgccagggcctgtctctgactaggtgtcaccatacacattcttagattgaatctgaaccatgtggcagaagggataagcagcttacttagtaggctctgtctacccccttccttctttgtcttgcccctaggaaggtgaatctgccctagcctggtttacggtttcttataactctcctttgctctctggccactattaagtgggtttgccccatcacttagttctcaggcagagacatctttgggcctgtccctgcccaggcctctggctttttatattgaaaatttttaaatattcacaaattttagaataaatcaaatattccattcttgat

SEQ ID NO: 421496 - DNA, 361 bp, Homo sapiens
ttctccctccgtgctgtgagccggttccagggcttagcctccgcagactccggctccatttttctgttgcaggggatccattatggccacgtagaccagcttggcttagcaccctgtagccccagactcttccataatctgcaccctctgctgggttctcacacccaacacctctcttgctttcacatgtttttcaggtgtccaacacgctctcttgggctctgtatgagctctcccggcaccccgaagtccagacagcactccactcagagatcacagctgccctgagccctggctccagtgcctacccctcagccactgttctgtcccagctgcccctgctgaaggcggtggtcaagga

SEQ ID NO: 421497 - DNA, 433 bp, Homo sapiens
ctcagtaactgtgcatctggtctgtacctggttggtccttcgtctttgcatgtaagctctttgagaggaagggtgaagccttatttgttttttatgtcccctgccagggcctgtctctgactaggtgtcaccatacacattcttagattgaatctgaaccatgtggcagaagggataagcagcttacttagtaggctctgtctacccccttccttctttgtcttgcccctaggaaggtgaatctgccctagcctggtttacggtttcttataactctcctttgctctctggccactattaagtgggtttgccccatcacttagttctcaggcagagacatctttgggcctgtccctgcccaggcctctggctttttatattgaaaatttttaaatattcacaaattttagaataaatcaaatattccattctt

SEQ ID NO: 421498 - DNA, 2164 bp, Homo sapiens
cctcgaccgagatgatcagagaggtgcagggcgccgcgcacttcgggccggtgtggctagccagctttgggacagtgcgcaccgtgtacgtggctgcccctgcactcgtcgaggagctgctgcgacaggagggaccccggcccgagcgctgcagcttctcgccctggacggagcaccgccgctgccgccagcgggcttgcggactgctcactgcggaaggcgaagaatggcaaaggctccgcagtctcctggccccgctcctcctccggcctcaagcggccgcccgctacgccggaaccctgaacaacgtagtctgcgaccttgtgcggcgtctgaggcgccagcggggacgtggcacggggccgcccgccctggttcgggacgtggcgggggaattttacaagttcggactggaaggcatcgccgcggttctgctcggctcgcgcttgggctgcctggaggctcaagtgccacccgacacggagaccttcatccgcgctgtgggctcggtgtttgtgtccacgctgttgaccatggcgatgccccactggctgcgccaccttgtgcctgggccctggggccgcctctgccgagactgggaccagatgtttgcatttgctcagaggcacgtggagcggcgagaggcagaggcagccatgaggaacggaggacagcccgagaaggacctggagtctggggcgcacctgacccacttcctgttccgggaagagttgcctgcccagtccatcctgggaaatgtgacagagttgctattggcgggagtggacacggtgtccaacacgctctcttgggctctgtatgagctctcccggcaccccgaagtccagacagcactccactcagagatcacagctgccctgagccctggctccagtgcctacccctcagccactgttctgtcccagctgcccctgctgaaggcggtggtcaaggaagtgctaagactgtaccctgtggtacctggaaattctcgtgtcccagacaaagacattcatgtgggtgactatattatccccaaaaatacgctggtcactctgtgtcactatgccacttcaagggaccctgcccagttcccagagccaaattcttttcgtccagctcgctggctgggggagggtcccaccccccacccatttgcatctcttccctttggctttggcaagcgcagctgtatggggagacgcctggcagagcttgaattgcaaatggctttggcccagatcctaacacattttgaggtgcagcctgagccaggtgcggccccagttagacccaagacccggactgtcctggtacctgaaaggagcatcaacctacagtttttggacagatagtcccatggaaagagactgtcatcatcaccctttcattcatcatagggataagattttttgtaggcacaagaccaaggtatacatcttcccctaatgcctatctgaccaaactggatagaaccaccatagtgaagtgtgaggcggccctgaccaatgtgtgaagtatgcacttggcctgactcaggaagccaggtgagaaaaccatggtctctctgcttgcttggcccttctgatcatgtatgcatcccccaaggatgaaatcagattttaactaataatgctggatggcctgaggaaagattcaactgcctctctttttgggctttcatagtgttcattgatgctgctggctaagcatttatcaaagcataagctcagtaactgtgcatctggtctgtacctggttggtccttcgtctttgcatgtaagctctttgagaggaagggtgaagccttatttgttttttatgtcccctgccagggcctgtctctgactaggtgtcaccatacacattcttagattgaatctgaaccatgtggcagaagggataagcagcttacttagtaggctctgtctacccccttccttctttgtcttgcccctaggaaggtgaatctgccctagcctggtttacggtttcttataactctcctttgctctctggccactattaagtgggtttgccccatcacttagttctcaggcagagacatctttgggcctgtccctgcccaggcctctggctttttatattgaaaatttttaaatattcacaaattttagaataaatcaaatattccattcttgat

SEQ ID NO: 421499 - DNA, 455 bp, Homo sapiens
gcgcggcctggggctgtgccgccgttgactgcctcatagataccctacgaaccccaaatgccagctgcatgagaaaagggactcaccttctggttccctgcctggaagaggaagagctggcattgcacaggagacggctggacatgtctgaggcactgccctgcccgggcaaggagacccccaccccaggctgcaggctgggggccctgtattgggcctgtgtccacaatgatcccacccagctccaagccatactggatggtggggtctccccagaggaggccacccaggtggacaagcaatgggagggccacgtgcctctagtgagtctcctgctcaactactatgtgggcctggacctggaacgccgggaccagcgggggctcacggcgttaatgaaggctgccatgcggaaccgctgtgagtgcgtggccaccctcctcatggcaggtgtg

SEQ ID NO: 421500 - DNA, 916 bp, Homo sapiens
  misc_feature (34)..(34): n is a, c, g, or t
  misc_feature (41)..(41): n is a, c, g, or t
ggaggggagggggtggggaagagagcaaactagnctaggtncgaggcctgggtgtttgagaagaccggtcggcctgggcaacctgcgctgaagatgccgggaaaactccgtagtgacgctggtttggaatcagacaccgcaatgaaaaaaggggagacactgcgaaagcaaaccgaggagaaagagaaaaaagagaagccaaaatctgataagactgaagagatagcagaagaggaagaaactgttttccccaaagctaaacaagttaaaaagaaagcagagccttctgaagttgacatgaattctcctaaatccaaaaaggcaaaaaagaaagaggagccatctcaaaatgacatttctcctaaaaccaaaagtttgagaaagaaaaaggagcccattgaaaagaaagtggtttcttctaaaaccaaaaaagtgacaaaaaatgaggagccttctgaggaagaaatagatgctcctaagcccaagaagatgaagaaagaaaaggaaatgaatggagaaactagagagaaaagccccaaactgaagaatggatttcctcatcctgaaccggactgtaaccccagtgaagctgccagtgaagaaagtaacagtgagatagagcaggaaatacctgtggaacaaaaagaaggcgctttctctaattttcccatatctgaagaaactattaaacttctcaaaggccgaggagtgaccttcctatttcctatacaagcaaagacattccatcatgtttacagcgggaaggacttaattgcacaggcacggacaggaactgggaagacattctcctttgccatccctttgattgagaaacttcatggggaactgcaagacaggaagagaggccgtgcccctcaggtatggttttgcgcccccaaaggttggggaccgttgc

SEQ ID NO: 421501 - DNA, 603 bp, Homo sapiens
cgcagctgagtcattaagtgcctccttgttcctcatggcttcccatcaagccatgggtattaggtgacagtgtaatttattagattctggttttgcccaaatactgggcatgctttaataataactgaaccatttcattatttggataggcatgggtaccttatcaagcagattaaaaggatatggtacccgtcctttagaaaagaacagctaaaaccttgttgtggattatggatttagcctaaagaaaaataatctggcataaattaagagtaagagagaagattaatagaaatttcacttcacataacttaaaacatggctatttcaataaaggactaaagtttctcctggatcccagaattcaacctgtatttataaatgtataatgtatttagctactttttggtttaaatgaacttgttgggttagcttggtaaatgttataatttttactattttctacaaagaaaatattttctaatttaagttggagctatctgtgcagcagtttctctacagttgtgcataaatgtttttactataaaatgagctaatgtataaaatactgctgtataccataataaagatagtaatacttga

SEQ ID NO: 421502 - DNA, 4768 bp, Homo sapiens
agtgacgagagccgggtggacccagggtggggaactacctcttcctctccacgcggttgagaagaccggtcggcctgggcaacctgcgctgaagatgccgggaaaactccgtagtgacgctggtttggaatcagacaccgcaatgaaaaaaggggagacactgcgaaagcaaaccgaggagaaagagaaaaaagagaagccaaaatctgataagactgaagagatagcagaagaggaagaaactgttttccccaaagctaaacaagttaaaaagaaagcagagccttctgaagttgacatgaattctcctaaatccaaaaaggcaaaaaagaaagaggagccatctcaaaatgacatttctcctaaaaccaaaagtttgagaaagaaaaaggagcccattgaaaagaaagtggtttcttctaaaaccaaaaaagtgacaaaaaatgaggagccttctgaggaagaaatagatgctcctaagcccaagaagatgaagaaagaaaaggaaatgaatggagaaactagagagaaaagccccaaactgaagaatggatttcctcatcctgaaccggactgtaaccccagtgaagctgccagtgaagaaagtaacagtgagatagagcaggaaatacctgtggaacaaaaagaaggcgctttctctaattttcccatatctgaagaaactattaaacttctcaaaggccgaggagtgaccttcctatttcctatacaagcaaagacattccatcatgtttacagcgggaaggacttaattgcacaggcacggacaggaactgggaagacattctcctttgccatccctttgattgagaaacttcatggggaactgcaagacaggaagagaggccgtgcccctcaggtactggttcttgcacctacaagagagttggcaaatcaagtaagcaaagacttcagtgacatcacaaaaaagctgtcagtggcttgtttttatggtggaactccctatggaggtcaatttgaacgcatgaggaatgggattgatatcctggttggaacaccaggtcgtatcaaagaccacatacagaatggcaaactagatctcaccaaacttaagcatgttgtcctggatgaagtggaccagatgttggatatgggatttgctgatcaagtggaagagattttaagtgtggcatacaagaaagattctgaagacaatccccaaacattgcttttttctgcaacttgccctcattgggtatttaatgttgccaagaaatacatgaaatctacatatgaacaggtggacctgattggtaaaaagactcagaaaacggcaataactgtggagcatctggctattaagtgccactggactcagagggcagcagttattggggatgtcatccgagtatatagtggtcatcaaggacgcactatcatcttttgtgaaaccaagaaagaagcccaggagctgtcccagaattcagctataaagcaggatgctcagtccttgcatggagacattccacagaagcaaagggaaatcaccctgaaaggttttagaaatggtagttttggagttttggtggcaaccaatgttgctgcacgtgggttagacatccctgaggttgatttggttatacaaagctctccaccaaaggatgtagagtcctacattcatcgatccgggcggacaggcagagctggaaggacgggggtgtgcatctgcttttatcagcacaaggaagaatatcagttagtacaagtggagcaaaaagcgggaattaagttcaaacgaataggtgttccttctgcaacagaaataataaaagcttccagcaaagatgccatcaggcttttggattccgtgcctcccactgccattagtcacttcaaacaatcagctgagaagctgatagaggagaagggagctgtggaagctctggcagcagcactggcccatatttcaggtgccacgtccgtagaccagcgctccttgatcaactcaaatgtgggttttgtgaccatgatcttgcagtgctcaattgaaatgccaaatattagttatgcttggaaagaacttaaagagcagctgggcgaggagattgattccaaagtgaagggaatggtttttctcaaaggaaagctgggtgtttgctttgatgtacctaccgcatcagtaacagaaatacaggagaaatggcatgattcacgacgctggcagctctctgtggccacagagcaaccagaactggaaggaccacgggaaggatatggaggcttcaggggacagcgggaaggcagtcgaggcttcaggggacagcgggacggaaacagaagattcagaggacagcgggaaggcagtagaggcccgagaggacagcgatcaggaggtggcaacaaaagtaacagatcccaaaacaaaggccagaagcggagtttcagtaaagcatttggtcaataattagaaatagaagatttatatagcaaaaagagaatgatgtttggcaatatagaactgaacattatttttcatgcaaagttaaaagcacattgtgcctccttttgaccacttgccaagtccctgtctctttcagacacagacaagcttcatttaaattatttcatctgatcattatcatttataactttattgttacttcatcagtttttccttttgaaaggtgtatgaattcattacatttttattctaatgtattatctgtagattagaagataaaatcaagcatgtatctgcctatactttgtgagttcacctgtctttatactcaaaagtgtcccttaatagtgtccttccctgaaataaatacctaagggagtgtaacagtctctggaggaccactttgagcctttggaagttaaggtttcctcagccacctgccgaacagtttctcatgtggtcctattatttgtctactgagacttaatactgagcaatgttttgaaacaagatttcaaactaatctgggttgtaatacagtttataccagtgtatgctctagacttggaagatgtagtatgtttgatgtggattacctatacttatgttcgttttgatacatttttagcttctcattataaggtgattcatgctttagtgaattcttcatagatagtatatataaaagtacattttaatagaaagccagggttttaaggaatttcacatgtataaggtggctccatagctttatttgtaagtaggctggataaatggtgcttaaatggtaatgtactccacttcttcctattggaagattaacattatttaccaagaaggacttaagggagtaaggggcgcagattagcattgctcaagagtatgtaaaaaaaaaaaaaaaaaaaaagaaccaaaccactggaaataatcaaatgcaaaaaggtaacaaattcataactggaaagcaaagagaagaacaagtatgatttggatgataaagcattgttttaatggtgaaaacttcacagatcactaatgtttctagaggttaacttcaagtgggcaagctggggtttttaggtagtcagtggcctagttcctaaagccacagtataggatctgttaaactgaatgtctgttgaaagtttgttttagctgcttggaggcttccttttaagacaaactgtatgtgattaagttgttttgagggaactgaagaacctgatgtagcccctggccagataactgcctgatttctcagatattatttctctgggaaacattctacatagcacaggagcttaagagtggcattatcttctcgccttaatttccagagattatttctgtactgagaatcctggaactactatgctaggaaatttaaagctgcatggtctgtcttgttttcatttaattattgtgaatacctagaatctttcttggtcctgatttctcttgcttaatccagtctttatctctaactgccccttatttgatcaccatgtactaggagctctgatagccagctcagctcctaatccttgaggcaacattctttttctatttgaacttcagttctgtccttgaatcccgactagatatttcttgccctctggtctcagaattctcttggcttttattccttgatccacttgccagttttatcactttacccttgttcctcatggcttcccatcaagccatgggtattaggtgacagtgtaatttattagattctggttttgcccaaatactgggcatgctttaataataactgaaccatttcattatttggataggcatgggtaccttatcaagcagattaaaaggatatggtacccgtcctttagaaaagaacagctaaaaccttgttgtggattatggatttagcctaaagaaaaataatctggcataaattaagagtaagagagaagattaatagaaatttcacttcacataacttaaaacatggctatttcaataaaggactaaagtttctcctggatcccagaattcaacctgtatttataaatgtataatgtatttagctactttttggtttaaatgaacttgttgggttagcttggtaaatgttataatttttactattttctacaaagaaaatattttctaatttaagttggagctatctgtgcagcagtttctctacagttgtgcataaatgtttttactataaaatgagctaatgtataaaatactgctgtataccataataaagatagtaatacttgaaaaaaaaaaaaaacagacaaaaagaaccagaagaaacaaactaaacaaacaaagaacaaaaccaaaagg

SEQ ID NO: 421503 - DNA, 5047 bp, Homo sapiens
agtgacgagagccgggtggacccagggtggggaactacctcttcctctccacgcggttgagaagaccggtcggcctgggcaacctgcgctgaagatgccgggaaaactccgtagtgacgctggtttggaatcagacaccgcaatgaaaaaaggggagacactgcgaaagcaaaccgaggagaaagagaaaaaagagaagccaaaatctgataagactgaagagatagcagaagaggaagaaactgttttccccaaagctaaacaagttaaaaagaaagcagagccttctgaagttgacatgaattctcctaaatccaaaaaggcaaaaaagaaagaggagccatctcaaaatgacatttctcctaaaaccaaaagtttgagaaagaaaaaggagcccattgaaaagaaagtggtttcttctaaaaccaaaaaagtgacaaaaaatgaggagccttctgaggaagaaatagatgctcctaagcccaagaagatgaagaaagaaaaggaaatgaatggagaaactagagagaaaagccccaaactgaagaatggatttcctcatcctgaaccggactgtaaccccagtgaagctgccagtgaagaaagtaacagtgagatagagcaggaaatacctgtggaacaaaaagaaggcgctttctctaattttcccatatctgaagaaactattaaacttctcaaaggccgaggagtgaccttcctatttcctatacaagcaaagacattccatcatgtttacagcgggaaggacttaattgcacaggcacggacaggaactgggaagacattctcctttgccatccctttgattgagaaacttcatggggaactgcaagacaggaagagaggccgtgcccctcaggtactggttcttgcacctacaagagagttggcaaatcaagtaagcaaagacttcagtgacatcacaaaaaagctgtcagtggcttgtttttatggtggaactccctatggaggtcaatttgaacgcatgaggaatgggattgatatcctggttggaacaccaggtcgtatcaaagaccacatacagaatggcaaactagatctcaccaaacttaagcatgttgtcctggatgaagtggaccagatgttggatatgggatttgctgatcaagtggaagagattttaagtgtggcatacaagaaagattctgaagacaatccccaaacattgcttttttctgcaacttgccctcattgggtatttaatgttgccaagaaatacatgaaatctacatatgaacaggtggacctgattggtaaaaagactcagaaaacggcaataactgtggagcatctggctattaagtgccactggactcagagggcagcagttattggggatgtcatccgagtatatagtggtcatcaaggacgcactatcatcttttgtgaaaccaagaaagaagcccaggagctgtcccagaattcagctataaagcaggatgctcagtccttgcatggagacattccacagaagcaaagggaaatcaccctgaaaggttttagaaatggtagttttggagttttggtggcaaccaatgttgctgcacgtgggttagacatccctgaggttgatttggttatacaaagctctccaccaaaggatgtagagtcctacattcatcgatccgggcggacaggcagagctggaaggacgggggtgtgcatctgcttttatcagcacaaggaagaatatcagttagtacaagtggagcaaaaagcgggaattaagttcaaacgaataggtgttccttctgcaacagaaataataaaagcttccagcaaagatgccatcaggcttttggattccgtgcctcccactgccattagtcacttcaaacaatcagctgagaagctgatagaggagaagggagctgtggaagctctggcagcagcactggcccatatttcaggtgccacgtccgtagaccagcgctccttgatcaactcaaatgtgggttttgtgaccatgatcttgcagtgctcaattgaaatgccaaatattagttatgcttggaaagaacttaaagagcagctgggcgaggagattgattccaaagtgaagggaatggtttttctcaaaggaaagctgggtgtttgctttgatgtacctaccgcatcagtaacagaaatacaggagaaatggcatgattcacgacgctggcagctctctgtggccacagagcaaccagaactggaaggaccacgggaaggatatggaggcttcaggggacagcgggaaggcagtcgaggcttcaggggacagcgggacggaaacagaagattcagaggacagcgggaaggcagtagaggcccgagaggacagcgatcaggaggtggcaacaaaagtaacagatcccaaaacaaaggccagaagcggagtttcagtaaagcatttggtcaataattagaaatagaagatttatatagcaaaaagagaatgatgtttggcaatatagaactgaacattatttttcatgcaaagttaaaagcacattgtgcctccttttgaccacttgccaagtccctgtctctttcagacacagacaagcttcatttaaattatttcatctgatcattatcatttataactttattgttacttcatcagtttttccttttgaaaggtgtatgaattcattacatttttattctaatgtattatctgtagattagaagataaaatcaagcatgtatctgcctatactttgtgagttcacctgtctttatactcaaaagtgtcccttaatagtgtccttccctgaaataaatacctaagggagtgtaacagtctctggaggaccactttgagcctttggaagttaaggtttcctcagccacctgccgaacagtttctcatgtggtcctattatttgtctactgagacttaatactgagcaatgttttgaaacaagatttcaaactaatctgggttgtaatacagtttataccagtgtatgctctagacttggaagatgtagtatgtttgatgtggattacctatacttatgttcgttttgatacatttttagcttctcattataaggtgattcatgctttagtgaattcttcatagatagtatatataaaagtacattttaatagaaagccagggttttaaggaatttcacatgtataaggtggctccatagctttatttgtaagtaggctggataaatggtgcttaaatggtaatgtactccacttcttcctattggaagattaacattatttaccaagaaggacttaagggagtaaggggcgcagattagcattgctcaagagtatgtaaaaaaaaaaaaaaaaaaaaagaaccaaaccactggaaataatcaaatgcaaaaaggtaacaaattcataactggaaagcaaagagaagaacaagtatgatttggatgataaagcattgttttaatggtgaaaacttcacagatcactaatgtttctagaggttaacttcaagtgggcaagctggggtttttaggtagtcagtggcctagttcctaaagccacagtataggatctgttaaactgaatgtctgttgaaagtttgttttagctgcttggaggcttccttttaagacaaactgtatgtgattaagttgttttgagggaactgaagaacctgatgtagcccctggccagataactgcctgatttctcagatattatttctctgggaaacattctacatagcacaggagcttaagagtggcattatcttctcgccttaatttccagagattatttctgtactgagaatcctggaactactatgctaggaaatttaaagctgcatggtctgtcttgttttcatttaattattgtgaatacctagaatctttcttggtcctgatttctcttgcttaatccagtctttatctctaactgccccttatttgatcaccatgtactaggagctctgatagccagctcagctcctaatccttgaggcaacattctttttctatttgaacttcagttctgtccttgaatcccgactagatatttcttgccctctggtctcagaattctcttggcttttattccttgatccacttgccagttttatcactttacccttgttcctcatggcttcccatcaagccatgggtattaggtgacagtgtaatttattagattctggttttgcccaaatactgggcatgctttaataataactgaaccatttcattatttggataggcatgggtaccttatcaagcagattaaaaggatatggtacccgtcctttagaaaagaacagctaaaaccttgttgtggattatggatttagcctaaagaaaaataatctggcataaattaagagtaagagagaagattaatagaaatttcacttcacataacttaaaacatggctatttcaataaaggactaaagtttctcctggatcccagaattcaacctgtatttataaatgtataatgtatttagctactttttggtttaaatgaacttgttgggttagcttggtaaatgttataatttttactattttctacaaagaaaatattttctaatttaagttggagctatctgtgcagcagtttctctacagttgtgcataaatgtttttactataaaatgagctaatgtataaaatactgctgtataccataataaagatagtaatacttgaaaaaaaacaccccccccccccaaacacaagggggggggcaaaaaaccccccggggggccactcccccccgttttttgttaaaaagtgggccccatcagagaaacatataaaagacaagcaagcgggcgcttaacaccgctcgtcgtcgaaacagtcctcgtgtgtgcatcttggaaaaccccttcgtgtgcgggccaggtggcacccctccgaattgaggcccggaacaaactcgggttttgtcaaccgctttgctgcgattctgctattagtagccgtgatattggtcctcagcgagcatgatcactcgcgacagcactacaacgtggcatcacctacgcacaatag

SEQ ID NO: 421504 - DNA, 4644 bp, Homo sapiens
agtgacgagagccgggtggacccagggtggggaactacctcttcctctccacgcggttgagaagaccggtcggcctgggcaacctgcgctgaagatgccgggaaaactccgtagtgacgctggtttggaatcagacaccgcaatgaaaaaaggggagacactgcgaaagcaaaccgaggagaaagagaaaaaagagaagccaaaatctgataagactgaagagatagcagaagaggaagaaactgttttccccaaagctaaacaagttaaaaagaaagcagagccttctgaagttgacatgaattctcctaaatccaaaaaggcaaaaaagaaagaggagccatctcaaaatgacatttctcctaaaaccaaaagtttgagaaagaaaaaggagcccattgaaaagaaagtggtttcttctaaaaccaaaaaagtgacaaaaaatgaggagccttctgaggaagaaatagatgctcctaagcccaagaagatgaagaaagaaaaggaaatgaatggagaaactagagagaaaagccccaaactgaagaatggatttcctcatcctgaaccggactgtaaccccagtgaagctgccagtgaagaaagtaacagtgagatagagcaggaaatacctgtggaacaaaaagaaggcgctttctctaattttcccatatctgaagaaactattaaacttctcaaaggccgaggagtgaccttcctatttcctatacaagcaaagacattccatcatgtttacagcgggaaggacttaattgcacaggcacggacaggaactgggaagacattctcctttgccatccctttgattgagaaacttcatggggaactgcaagacaggaagagaggccgtgcccctcaggtactggttcttgcacctacaagagagttggcaaatcaagtaagcaaagacttcagtgacatcacaaaaaagctgtcagtggcttgtttttatggtggaactccctatggaggtcaatttgaacgcatgaggaatgggattgatatcctggttggaacaccaggtcgtatcaaagaccacatacagaatggcaaactagatctcaccaaacttaagcatgttgtcctggatgaagtggaccagatgttggatatgggatttgctgatcaagtggaagagattttaagtgtggcatacaagaaagattctgaagacaatccccaaacattgcttttttctgcaacttgccctcattgggtatttaatgttgccaagaaatacatgaaatctacatatgaacaggtggacctgattggtaaaaagactcagaaaacggcaataactgtggagcatctggctattaagtgccactggactcagagggcagcagttattggggatgtcatccgagtatatagtggtcatcaaggacgcactatcatcttttgtgaaaccaagaaagaagcccaggagctgtcccagaattcagctataaagcaggatgctcagtccttgcatggagacattccacagaagcaaagggaaatcaccctgaaaggttttagaaatggtagttttggagttttggtggcaaccaatgttgctgcacgtgggttagacatccctgaggttgatttggttatacaaagctctccaccaaaggatgtagagtcctacattcatcgatccgggcggacaggcagagctggaaggacgggggtgtgcatctgcttttatcagcacaaggaagaatatcagttagtacaagtggagcaaaaagcgggaattaagttcaaacgaataggtgttccttctgcaacagaaataataaaagcttccagcaaagatgccatcaggcttttggattccgtgcctcccactgccattagtcacttcaaacaatcagctgagaagctgatagaggagaagggagctgtggaagctctggcagcagcactggcccatatttcaggtgccacgtccgtagaccagcgctccttgatcaactcaaatgtgggttttgtgaccatgatcttgcagtgctcaattgaaatgccaaatattagttatgcttggaaagaacttaaagagcagctgggcgaggagattgattccaaagtgaagggaatggtttttctcaaaggaaagctgggtgtttgctttgatgtacctaccgcatcagtaacagaaatacaggagaaatggcatgattcacgacgctggcagctctctgtggccacagagcaaccagaactggaaggaccacgggaaggatatggaggcttcaggggacagcgggaaggcagtcgaggcttcaggggacagcgggacggaaacagaagattcagaggacagcgggaaggcagtagaggcccgagaggacagcgatcaggaggtggcaacaaaagtaacagatcccaaaacaaaggccagaagcggagtttcagtaaagcatttggtcaataattagaaatagaagatttatatagcaaaaagagaatgatgtttggcaatatagaactgaacattatttttcatgcaaagttaaaagcacattgtgcctccttttgaccacttgccaagtccctgtctctttcagacacagacaagcttcatttaaattatttcatctgatcattatcatttataactttattgttacttcatcagtttttccttttgaaaggtgtatgaattcattacatttttattctaatgtattatctgtagattagaagataaaatcaagcatgtatctgcctatactttgtgagttcacctgtctttatactcaaaagtgtcccttaatagtgtccttccctgaaataaatacctaagggagtgtaacagtctctggaggaccactttgagcctttggaagttaaggtttcctcagccacctgccgaacagtttctcatgtggtcctattatttgtctactgagacttaatactgagcaatgttttgaaacaagatttcaaactaatctgggttgtaatacagtttataccagtgtatgctctagacttggaagatgtagtatgtttgatgtggattacctatacttatgttcgttttgatacatttttagcttctcattataaggtgattcatgctttagtgaattcttcatagatagtatatataaaagtacattttaatagaaagccagggttttaaggaatttcacatgtataaggtggctccatagctttatttgtaagtaggctggataaatggtgcttaaatggtaatgtactccacttcttcctattggaagattaacattatttaccaagaaggacttaagggagtaaggggcgcagattagcattgctcaagagtatgtaaaaaaaaaaaaaaaaaaaaagaaccaaaccactggaaataatcaaatgcaaaaaggtaacaaattcataactggaaagcaaagagaagaacaagtatgatttggatgataaagcattgttttaatggtgaaaacttcacagatcactaatgtttctagaggttaacttcaagtgggcaagctggggtttttaggtagtcagtggcctagttcctaaagccacagtataggatctgttaaactgaatgtctgttgaaagtttgttttagctgcttggaggcttccttttaagacaaactgtatgtgattaagttgttttgagggaactgaagaacctgatgtagcccctggccagataactgcctgatttctcagatattatttctctgggaaacattctacatagcacaggagcttaagagtggcattatcttctcgccttaatttccagagattatttctgtactgagaatcctggaactactatgctaggaaatttaaagctgcatggtctgtcttgttttcatttaattattgtgaatacctagaatctttcttggtcctgatttctcttgcttaatccagtctttatctctaactgccccttatttgatcaccatgtactaggagctctgatagccagctcagctcctaatccttgaggcaacattctttttctatttgaacttcagttctgtccttgaatcccgactagatatttcttgccctctggtctcagaattctcttggcttttattccttgatccacttgccagttttatcactttacccttgttcctcatggcttcccatcaagccatgggtattaggtgacagtgtaatttattagattctggttttgcccaaatactgggcatgctttaataataactgaaccatttcattatttggataggcatgggtaccttatcaagcagattaaaaggatatggtacccgtcctttagaaaagaacagctaaaaccttgttgtggattatggatttagcctaaagaaaaataatttaaaacatggctatttcaataaaggactaaagtttctcctggatcccagaattcaacctgtatttataaatgtataatgtatttagctactttttggtttaaatgaacttgttgggttagcttggtaaatgttataatttttactattttctacaaagaaaatattttctaatttaagttggagctatctgtgcagcagtttctctacagttgtgcataaatgtttttactataaaatgagctaatgtataaaatactgctgtataccataataaagatagtaatacttga

SEQ ID NO: 421505 - DNA, 3409 bp, Homo sapiens
agtgacgagagccgggtggacccagggtggggaactacctcttcctctccacgcggttgagaagaccggtcggcctgggcaacctgcgctgaagatgccgggaaaactccgtagtgacgctggtttggaatcagacaccgcaatgaaaaaaggggagacactgcgaaagcaaaccgaggagaaagagaaaaaagagaagccaaaatctgataagactgaagagatagcagaagaggaagaaactgttttccccaaagctaaacaagttaaaaagaaagcagagccttctgaagttgacatgaattctcctaaatccaaaaaggcaaaaaagaaagaggagccatctcaaaatgacatttctcctaaaaccaaaagtttgagaaagaaaaaggagcccattgaaaagaaagtggtttcttctaaaaccaaaaaagtgacaaaaaatgaggagccttctgaggaagaaatagatgctcctaagcccaagaagatgaagaaagaaaaggaaatgaatggagaaactagagagaaaagccccaaactgaagaatggatttcctcatcctgaaccggactgtaaccccagtgaagctgccagtgaagaaagtaacagtgagatagagcaggaaatacctgtggaacaaaaagaaggcgctttctctaattttcccatatctgaagaaactattaaacttctcaaaggccgaggagtgaccttcctatttcctatacaagcaaagacattccatcatgtttacagcgggaaggacttaattgcacaggcacggacaggaactgggaagacattctcctttgccatccctttgattgagaaacttcatggggaactgcaagacaggaagagaggccgtgcccctcaggtactggttcttgcacctacaagagagttggcaaatcaagtaagcaaagacttcagtgacatcacaaaaaagctgtcagtggcttgtttttatggtggaactccctatggaggtcaatttgaacgcatgaggaatgggattgatatcctggttggaacaccaggtcgtatcaaagaccacatacagaatggcaaactagatctcaccaaacttaagcatgttgtcctggatgaagtggaccagatgttggatatgggatttgctgatcaagtggaagagattttaagtgtggcatacaagaaagattctgaagacaatccccaaacattgcttttttctgcaacttgccctcattgggtatttaatgttgccaagaaatacatgaaatctacatatgaacaggtggacctgattggtaaaaagactcagaaaacggcaataactgtggagcatctggctattaagtgccactggactcagagggcagcagttattggggatgtcatccgagtatatagtggtcatcaaggacgcactatcatcttttgtgaaaccaagaaagaagcccaggagctgtcccagaattcagctataaagcaggatgctcagtccttgcatggagacattccacagaagcaaagggaaatcaccctgaaaggttttagaaatggtagttttggagttttggtggcaaccaatgttgctgcacgtgggttagacatccctgaggttgatttggttatacaaagctctccaccaaaggatgtagagtcctacattcatcgatccgggcggacaggcagagctggaaggacgggggtgtgcatctgcttttatcagcacaaggaagaatatcagttagtacaagtggagcaaaaagcgggaattaagttcaaacgaataggtgttccttctgcaacagaaataataaaagcttccagcaaagatgccatcaggcttttggattccgtgcctcccactgccattagtcacttcaaacaatcagctgagaagctgatagaggagaagggagctgtggaagctctggcagcagcactggcccatatttcaggtgccacgtccgtagaccagcgctccttgatcaactcaaatgtgggttttgtgaccatgatcttgcagtgctcaattgaaatgccaaatattagttatgcttggaaagaacttaaagagcagctgggcgaggagattgattccaaagtgaagggaatggtttttctcaaaggaaagctgggtgtttgctttgatgtacctaccgcatcagtaacagaaatacaggagaaatggcatgattcacgacgctggcagctctctgtggccacagagcaaccagaactggaaggaccacgggaaggatatggaggcttcaggggacagcgggaaggcagtcgaggcttcaggggacagcgggacggaaacagaagattcagaggacagcgggaaggcagtagaggcccgagaggacagcgatcaggaggtggcaacaaaagtaacagatcccaaaacaaaggccagaagcggagtttcagtaaagcatttggtcaataattagaaatagaagatttatatagcaaaaagagaatgatgtttggcaatatagaactgaacattatttttcatgcaaagttaaaagcacattgtgcctccttttgaccacttgccaagtccctgtctctttcagacacagacaagcttcatttaaattatttcatctgatcattatcatttataactttattgttacttcatcagtttttccttttgaaaggtgtatgaattcattacatttttattctaatgtattatctgtagattagaagataaaatcaagcatgtatctgcctatactttgtgagttcacctgtctttatactcaaaagtgtcccttaatagtgtccttccctgaaataaatacctaagggagtgtaacagtctctggaggaccactttgagcctttggaagttaaggtttcctcagccacctgccgaacagtttctcatgtggtcctattatttgtctactgagacttaatactgagcaatgttttgaaacaagatttcaaactaatctgggttgtaatacagtttataccagtgtatgctctagacttggaagatgtagtatgtttgatgtggattacctatacttatgttcgttttgatacatttttagcttctcattataaggtgattcatgctttagtgaattcttcatagatagtatatataaaagtacattttaatagaaagccagggttttaaggaatttcacatgtataaggtggctccatagctttatttgtaagtaggctggataaatggtgcttaaatggtaatgtactccacttcttcctattggaagattaacattatttaccaagaaggacttaagggagtaaggggcgcagattagcattgctcaagagtatgtaaaaaaaaaagggggcggaaaaatatcctgagggccaagttaaggtaacaagttctgtaaaggggcccaagggacgtaaa

SEQ ID NO: 421506 - DNA, 4674 bp, Homo sapiens
aagtctagtagaggctgggtgaaatcggccgatgagaagaccggtcggcctgggcaacctgcgctgaagatgccgggaaaactccgtagtgacgctggtttggaatcagacaccgcaatgaaaaaaggggagacactgcgaaagcaaaccgaggagaaagagaaaaaagagaagccaaaatctgataagactgaagagatagcagaagaggaagaaactgttttccccaaagctaaacaagttaaaaagaaagcagagccttctgaagttgacatgaattctcctaaatccaaaaaggcaaaaaagaaagaggagccatctcaaaatgacatttctcctaaaaccaaaagtttgagaaagaaaaaggagcccattgaaaagaaagtggtttcttctaaaaccaaaaaagtgacaaaaaatgaggagccttctgaggaagaaatagatgctcctaagcccaagaagatgaagaaagaaaaggaaatgaatggagaaactagagagaaaagccccaaactgaagaatggatttcctcatcctgaaccggactgtaaccccagtgaagctgccagtgaagaaagtaacagtgagatagagcaggaaatacctgtggaacaaaaagaaggcgctttctctaattttcccatatctgaagaaactattaaacttctcaaaggccgaggagtgaccttcctatttcctatacaagcaaagacattccatcatgtttacagcgggaaggacttaattgcacaggcacggacaggaactgggaagacattctcctttgccatccctttgattgagaaacttcatggggaactgcaagacaggaagagaggccgtgcccctcaggtactggttcttgcacctacaagagagttggcaaatcaagtaagcaaagacttcagtgacatcacaaaaaagctgtcagtggcttgtttttatggtggaactccctatggaggtcaatttgaacgcatgaggaatgggattgatatcctggttggaacaccaggtcgtatcaaagaccacatacagaatggcaaactagatctcaccaaacttaagcatgttgtcctggatgaagtggaccagatgttggatatgggatttgctgatcaagtggaagagattttaagtgtggcatacaagaaagattctgaagacaatccccaaacattgcttttttctgcaacttgccctcattgggtatttaatgttgccaagaaatacatgaaatctacatatgaacaggtggacctgattggtaaaaagactcagaaaacggcaataactgtggagcatctggctattaagtgccactggactcagagggcagcagttattggggatgtcatccgagtatatagtggtcatcaaggacgcactatcatcttttgtgaaaccaagaaagaagcccaggagctgtcccagaattcagctataaagcaggatgctcagtccttgcatggagacattccacagaagcaaagggaaatcaccctgaaaggttttagaaatggtagttttggagttttggtggcaaccaatgttgctgcacgtgggttagacatccctgaggttgatttggttatacaaagctctccaccaaaggatgtagagtcctacattcatcgatccgggcggacaggcagagctggaaggacgggggtgtgcatctgcttttatcagcacaaggaagaatatcagttagtacaagtggagcaaaaagcgggaattaagttcaaacgaataggtgttccttctgcaacagaaataataaaagcttccagcaaagatgccatcaggcttttggattccgtgcctcccactgccattagtcacttcaaacaatcagctgagaagctgatagaggagaagggagctgtggaagctctggcagcagcactggcccatatttcaggtgccacgtccgtagaccagcgctccttgatcaactcaaatgtgggttttgtgaccatgatcttgcagtgctcaattgaaatgccaaatattagttatgcttggaaagaacttaaagagcagctgggcgaggagattgattccaaagtgaagggaatggtttttctcaaaggaaagctgggtgtttgctttgatgtacctaccgcatcagtaacagaaatacaggagaaatggcatgattcacgacgctggcagctctctgtggccacagagcaaccagaactggaaggaccacgggaaggatatggaggcttcaggggacagcgggaaggcagtcgaggcttcaggggacagcgggacggaaacagaagattcagaggacagcgggaaggcagtagaggcccgagaggacagcgatcaggaggtggcaacaaaagtaacagatcccaaaacaaaggccagaagcggagtttcagtaaagcatttggtcaataattagaaatagaagatttatatagcaaaaagagaatgatgtttggcaatatagaactgaacattatttttcatgcaaagttaaaagcacattgtgcctccttttgaccacttgccaagtccctgtctctttcagacacagacaagcttcatttaaattatttcatctgatcattatcatttataactttattgttacttcatcagtttttccttttgaaaggtgtatgaattcattacatttttattctaatgtattatctgtagattagaagataaaatcaagcatgtatctgcctatactttgtgagttcacctgtctttatactcaaaagtgtcccttaatagtgtccttccctgaaataaatacctaagggagtgtaacagtctctggaggaccactttgagcctttggaagttaaggtttcctcagccacctgccgaacagtttctcatgtggtcctattatttgtctactgagacttaatactgagcaatgttttgaaacaagatttcaaactaatctgggttgtaatacagtttataccagtgtatgctctagacttggaagatgtagtatgtttgatgtggattacctatacttatgttcgttttgatacatttttagcttctcattataaggtgattcatgctttagtgaattcttcatagatagtatatataaaagtacattttaatagaaagccagggttttaaggaatttcacatgtataaggtggctccatagctttatttgtaagtaggctggataaatggtgcttaaatggtaatgtactccacttcttcctattggaagattaacattatttaccaagaaggacttaagggagtaaggggcgcagattagcattgctcaagagtatgtaaaaaaaaaaaaaaaaaaaaagaaccaaaccactggaaataatcaaatgcaaaaaggtaacaaattcataactggaaagcaaagagaagaacaagtatgatttggatgataaagcattgttttaatggtgaaaacttcacagatcactaatgtttctagaggttaacttcaagtgggcaagctggggtttttaggtagtcagtggcctagttcctaaagccacagtataggatctgttaaactgaatgtctgttgaaagtttgttttagctgcttggaggcttccttttaagacaaactgtatgtgattaagttgttttgagggaactgaagaacctgatgtagcccctggccagataactgcctgatttctcagatattatttctctgggaaacattctacatagcacaggagcttaagagtggcattatcttctcgccttaatttccagagattatttctgtactgagaatcctggaactactatgctaggaaatttaaagctgcatggtctgtcttgttttcatttaattattgtgaatacctagaatctttcttggtcctgatttctcttgcttaatccagtctttatctctaactgccccttatttgatcaccatgtactaggagctctgatagccagctcagctcctaatccttgaggcaacattctttttctatttgaacttcagttctgtccttgaatcccgactagatatttcttgccctctggtctcagaattctcttggcttttattccttgatccacttgccagttttatcactttacccttgttcctcatggcttcccatcaagccatgggtattaggtgacagtgtaatttattagattctggttttgcccaaatactgggcatgctttaataataactgaaccatttcattatttggataggcatgggtaccttatcaagcagattaaaaggatatggtacccgtcctttagaaaagaacagctaaaaccttgttgtggattatggatttagcctaaagaaaaataatctggcataaattaagagtaagagagaagattaatagaaatttcacttcacataacttaaaacatggctatttcaataaaggactaaagtttctcctggatcccagaattcaacctgtatttataaatgtataatgtatttagctactttttggtttaaatgaacttgttgggttagcttggtaaatgttataatttttactattttctacaaagaaaatattttctaatttaagttggagctatctgtgcagcagtttctctacagttgtgcataaatgtttttactataaaatgagctaatgtataaaatactgctgtataccataataaagatagtaatacttga

SEQ ID NO: 421507 - DNA, 4747 bp, Homo sapiens
gctgaatatgtgtgctgccctcagacaaagattattggatctgtgtcaaaagaagaggaagaggaagatgaagaggaagaggacgaggaacgatgaagaggaagactatgatgtttataaaacgtgaatttcctactgaagcagatcgggaaaactccgtagtgacgctggtttggaatcagacaccgcaatgaaaaaaggggagacactgcgaaagcaaaccgaggagaaagagaaaaaagagaagccaaaatctgataagactgaagagatagcagaagaggaagaaactgttttccccaaagctaaacaagttaaaaagaaagcagagccttctgaagttgacatgaattctcctaaatccaaaaaggcaaaaaagaaagaggagccatctcaaaatgacatttctcctaaaaccaaaagtttgagaaagaaaaaggagcccattgaaaagaaagtggtttcttctaaaaccaaaaaagtgacaaaaaatgaggagccttctgaggaagaaatagatgctcctaagcccaagaagatgaagaaagaaaaggaaatgaatggagaaactagagagaaaagccccaaactgaagaatggatttcctcatcctgaaccggactgtaaccccagtgaagctgccagtgaagaaagtaacagtgagatagagcaggaaatacctgtggaacaaaaagaaggcgctttctctaattttcccatatctgaagaaactattaaacttctcaaaggccgaggagtgaccttcctatttcctatacaagcaaagacattccatcatgtttacagcgggaaggacttaattgcacaggcacggacaggaactgggaagacattctcctttgccatccctttgattgagaaacttcatggggaactgcaagacaggaagagaggccgtgcccctcaggtactggttcttgcacctacaagagagttggcaaatcaagtaagcaaagacttcagtgacatcacaaaaaagctgtcagtggcttgtttttatggtggaactccctatggaggtcaatttgaacgcatgaggaatgggattgatatcctggttggaacaccaggtcgtatcaaagaccacatacagaatggcaaactagatctcaccaaacttaagcatgttgtcctggatgaagtggaccagatgttggatatgggatttgctgatcaagtggaagagattttaagtgtggcatacaagaaagattctgaagacaatccccaaacattgcttttttctgcaacttgccctcattgggtatttaatgttgccaagaaatacatgaaatctacatatgaacaggtggacctgattggtaaaaagactcagaaaacggcaataactgtggagcatctggctattaagtgccactggactcagagggcagcagttattggggatgtcatccgagtatatagtggtcatcaaggacgcactatcatcttttgtgaaaccaagaaagaagcccaggagctgtcccagaattcagctataaagcaggatgctcagtccttgcatggagacattccacagaagcaaagggaaatcaccctgaaaggttttagaaatggtagttttggagttttggtggcaaccaatgttgctgcacgtgggttagacatccctgaggttgatttggttatacaaagctctccaccaaaggatgtagagtcctacattcatcgatccgggcggacaggcagagctggaaggacgggggtgtgcatctgcttttatcagcacaaggaagaatatcagttagtacaagtggagcaaaaagcgggaattaagttcaaacgaataggtgttccttctgcaacagaaataataaaagcttccagcaaagatgccatcaggcttttggattccgtgcctcccactgccattagtcacttcaaacaatcagctgagaagctgatagaggagaagggagctgtggaagctctggcagcagcactggcccatatttcaggtgccacgtccgtagaccagcgctccttgatcaactcaaatgtgggttttgtgaccatgatcttgcagtgctcaattgaaatgccaaatattagttatgcttggaaagaacttaaagagcagctgggcgaggagattgattccaaagtgaagggaatggtttttctcaaaggaaagctgggtgtttgctttgatgtacctaccgcatcagtaacagaaatacaggagaaatggcatgattcacgacgctggcagctctctgtggccacagagcaaccagaactggaaggaccacgggaaggatatggaggcttcaggggacagcgggaaggcagtcgaggcttcaggggacagcgggacggaaacagaagattcagaggacagcgggaaggcagtagaggcccgagaggacagcgatcaggaggtggcaacaaaagtaacagatcccaaaacaaaggccagaagcggagtttcagtaaagcatttggtcaataattagaaatagaagatttatatagcaaaaagagaatgatgtttggcaatatagaactgaacattatttttcatgcaaagttaaaagcacattgtgcctccttttgaccacttgccaagtccctgtctctttcagacacagacaagcttcatttaaattatttcatctgatcattatcatttataactttattgttacttcatcagtttttccttttgaaaggtgtatgaattcattacatttttattctaatgtattatctgtagattagaagataaaatcaagcatgtatctgcctatactttgtgagttcacctgtctttatactcaaaagtgtcccttaatagtgtccttccctgaaataaatacctaagggagtgtaacagtctctggaggaccactttgagcctttggaagttaaggtttcctcagccacctgccgaacagtttctcatgtggtcctattatttgtctactgagacttaatactgagcaatgttttgaaacaagatttcaaactaatctgggttgtaatacagtttataccagtgtatgctctagacttggaagatgtagtatgtttgatgtggattacctatacttatgttcgttttgatacatttttagcttctcattataaggtgattcatgctttagtgaattcttcatagatagtatatataaaagtacattttaatagaaagccagggttttaaggaatttcacatgtataaggtggctccatagctttatttgtaagtaggctggataaatggtgcttaaatggtaatgtactccacttcttcctattggaagattaacattatttaccaagaaggacttaagggagtaaggggcgcagattagcattgctcaagagtatgtaaaaaaaaaaaaaaaaaaaaagaaccaaaccactggaaataatcaaatgcaaaaaggtaacaaattcataactggaaagcaaagagaagaacaagtatgatttggatgataaagcattgttttaatggtgaaaacttcacagatcactaatgtttctagaggttaacttcaagtgggcaagctggggtttttaggtagtcagtggcctagttcctaaagccacagtataggatctgttaaactgaatgtctgttgaaagtttgttttagctgcttggaggcttccttttaagacaaactgtatgtgattaagttgttttgagggaactgaagaacctgatgtagcccctggccagataactgcctgatttctcagatattatttctctgggaaacattctacatagcacaggagcttaagagtggcattatcttctcgccttaatttccagagattatttctgtactgagaatcctggaactactatgctaggaaatttaaagctgcatggtctgtcttgttttcatttaattattgtgaatacctagaatctttcttggtcctgatttctcttgcttaatccagtctttatctctaactgccccttatttgatcaccatgtactaggagctctgatagccagctcagctcctaatccttgaggcaacattctttttctatttgaacttcagttctgtccttgaatcccgactagatatttcttgccctctggtctcagaattctcttggcttttattccttgatccacttgccagttttatcactttacccttgttcctcatggcttcccatcaagccatgggtattaggtgacagtgtaatttattagattctggttttgcccaaatactgggcatgctttaataataactgaaccatttcattatttggataggcatgggtaccttatcaagcagattaaaaggatatggtacccgtcctttagaaaagaacagctaaaaccttgttgtggattatggatttagcctaaagaaaaataatctggcataaattaagagtaagagagaagattaatagaaatttcacttcacataacttaaaacatggctatttcaataaaggactaaagtttctcctggatcccagaattcaacctgtatttataaatgtataatgtatttagctactttttggtttaaatgaacttgttgggttagcttggtaaatgttataatttttactattttctacaaagaaaatattttctaatttaagttggagctatctgtgcagcagtttctctacagttgtgcataaatgtttttactataaaatgagctaatgtataaaatactgctgtataccataataaagatagtaatacttga

SEQ ID NO: 421508 - DNA, 4519 bp, Homo sapiens
cgcggccgcgcgacacggctgcagaagacgacagaatgaagagatagcagaagaggaagaaactgttttccccaaagctaaacaagttaaaaagaaagcagagccttctgaagttgacatgaattctcctaaatccaaaaaggcaaaaaagaaagaggagccatctcaaaatgacatttctcctaaaaccaaaagtttgagaaagaaaaaggagcccattgaaaagaaagtggtttcttctaaaaccaaaaaagtgacaaaaaatgaggagccttctgaggaagaaatagatgctcctaagcccaagaagatgaagaaagaaaaggaaatgaatggagaaactagagagaaaagccccaaactgaagaatggatttcctcatcctgaaccggactgtaaccccagtgaagctgccagtgaagaaagtaacagtgagatagagcaggaaatacctgtggaacaaaaagaaggcgctttctctaattttcccatatctgaagaaactattaaacttctcaaaggccgaggagtgaccttcctatttcctatacaagcaaagacattccatcatgtttacagcgggaaggacttaattgcacaggcacggacaggaactgggaagacattctcctttgccatccctttgattgagaaacttcatggggaactgcaagacaggaagagaggccgtgcccctcaggtactggttcttgcacctacaagagagttggcaaatcaagtaagcaaagacttcagtgacatcacaaaaaagctgtcagtggcttgtttttatggtggaactccctatggaggtcaatttgaacgcatgaggaatgggattgatatcctggttggaacaccaggtcgtatcaaagaccacatacagaatggcaaactagatctcaccaaacttaagcatgttgtcctggatgaagtggaccagatgttggatatgggatttgctgatcaagtggaagagattttaagtgtggcatacaagaaagattctgaagacaatccccaaacattgcttttttctgcaacttgccctcattgggtatttaatgttgccaagaaatacatgaaatctacatatgaacaggtggacctgattggtaaaaagactcagaaaacggcaataactgtggagcatctggctattaagtgccactggactcagagggcagcagttattggggatgtcatccgagtatatagtggtcatcaaggacgcactatcatcttttgtgaaaccaagaaagaagcccaggagctgtcccagaattcagctataaagcaggatgctcagtccttgcatggagacattccacagaagcaaagggaaatcaccctgaaaggttttagaaatggtagttttggagttttggtggcaaccaatgttgctgcacgtgggttagacatccctgaggttgatttggttatacaaagctctccaccaaaggatgtagagtcctacattcatcgatccgggcggacaggcagagctggaaggacgggggtgtgcatctgcttttatcagcacaaggaagaatatcagttagtacaagtggagcaaaaagcgggaattaagttcaaacgaataggtgttccttctgcaacagaaataataaaagcttccagcaaagatgccatcaggcttttggattccgtgcctcccactgccattagtcacttcaaacaatcagctgagaagctgatagaggagaagggagctgtggaagctctggcagcagcactggcccatatttcaggtgccacgtccgtagaccagcgctccttgatcaactcaaatgtgggttttgtgaccatgatcttgcagtgctcaattgaaatgccaaatattagttatgcttggaaagaacttaaagagcagctgggcgaggagattgattccaaagtgaagggaatggtttttctcaaaggaaagctgggtgtttgctttgatgtacctaccgcatcagtaacagaaatacaggagaaatggcatgattcacgacgctggcagctctctgtggccacagagcaaccagaactggaaggaccacgggaaggatatggaggcttcaggggacagcgggaaggcagtcgaggcttcaggggacagcgggacggaaacagaagattcagaggacagcgggaaggcagtagaggcccgagaggacagcgatcaggaggtggcaacaaaagtaacagatcccaaaacaaaggccagaagcggagtttcagtaaagcatttggtcaataattagaaatagaagatttatatagcaaaaagagaatgatgtttggcaatatagaactgaacattatttttcatgcaaagttaaaagcacattgtgcctccttttgaccacttgccaagtccctgtctctttcagacacagacaagcttcatttaaattatttcatctgatcattatcatttataactttattgttacttcatcagtttttccttttgaaaggtgtatgaattcattacatttttattctaatgtattatctgtagattagaagataaaatcaagcatgtatctgcctatactttgtgagttcacctgtctttatactcaaaagtgtcccttaatagtgtccttccctgaaataaatacctaagggagtgtaacagtctctggaggaccactttgagcctttggaagttaaggtttcctcagccacctgccgaacagtttctcatgtggtcctattatttgtctactgagacttaatactgagcaatgttttgaaacaagatttcaaactaatctgggttgtaatacagtttataccagtgtatgctctagacttggaagatgtagtatgtttgatgtggattacctatacttatgttcgttttgatacatttttagcttctcattataaggtgattcatgctttagtgaattcttcatagatagtatatataaaagtacattttaatagaaagccagggttttaaggaatttcacatgtataaggtggctccatagctttatttgtaagtaggctggataaatggtgcttaaatggtaatgtactccacttcttcctattggaagattaacattatttaccaagaaggacttaagggagtaaggggcgcagattagcattgctcaagagtatgtaaaaaaaaaaaaaaaaaaaaagaaccaaaccactggaaataatcaaatgcaaaaaggtaacaaattcataactggaaagcaaagagaagaacaagtatgatttggatgataaagcattgttttaatggtgaaaacttcacagatcactaatgtttctagaggttaacttcaagtgggcaagctggggtttttaggtagtcagtggcctagttcctaaagccacagtataggatctgttaaactgaatgtctgttgaaagtttgttttagctgcttggaggcttccttttaagacaaactgtatgtgattaagttgttttgagggaactgaagaacctgatgtagcccctggccagataactgcctgatttctcagatattatttctctgggaaacattctacatagcacaggagcttaagagtggcattatcttctcgccttaatttccagagattatttctgtactgagaatcctggaactactatgctaggaaatttaaagctgcatggtctgtcttgttttcatttaattattgtgaatacctagaatctttcttggtcctgatttctcttgcttaatccagtctttatctctaactgccccttatttgatcaccatgtactaggagctctgatagccagctcagctcctaatccttgaggcaacattctttttctatttgaacttcagttctgtccttgaatcccgactagatatttcttgccctctggtctcagaattctcttggcttttattccttgatccacttgccagttttatcactttacccttgttcctcatggcttcccatcaagccatgggtattaggtgacagtgtaatttattagattctggttttgcccaaatactgggcatgctttaataataactgaaccatttcattatttggataggcatgggtaccttatcaagcagattaaaaggatatggtacccgtcctttagaaaagaacagctaaaaccttgttgtggattatggatttagcctaaagaaaaataatctggcataaattaagagtaagagagaagattaatagaaatttcacttcacataacttaaaacatggctatttcaataaaggactaaagtttctcctggatcccagaattcaacctgtatttataaatgtataatgtatttagctactttttggtttaaatgaacttgttgggttagcttggtaaatgttataatttttactattttctacaaagaaaatattttctaatttaagttggagctatctgtgcagcagtttctctacagttgtgcataaatgtttttactataaaatgagctaatgtataaaatactgctgtataccataataaagatagtaatacttga

SEQ ID NO: 421509 - DNA, 4608 bp, Homo sapiens
agtgacgagagccgggtggacccagggtggggaactacctcttcctctccacgcggttgagaagaccggtcggcctgggcaacctgcgctgaagatgccgggaaaactccgtagtgacgctggtttggaatcagacaccgcaatgaaaaaaggggagacactgcgaaagcaaaccgaggagaaagagaaaaaagagaagccaaaatctgataagactgaagagatagcagaagaggaagaaactgttttccccaaagctaaacaagttaaaaagaaagcagagccttctgaagttgacatgaattctcctaaatccaaaaaggcaaaaaagaaagaggagccatctcaaaatgacatttctcctaaaaccaaaagtttgagaaagaaaaaggagcccattgaaaagaaagtggtttcttctaaaaccaaaaaagtgacaaaaaatgaggagccttctgaggaagaaatagatgctcctaagcccaagaagatgaagaaagaaaaggaaatgaatggagaaactagagagaaaagccccaaactgaagaatggatttcctcatcctgaaccggactgtaaccccagtgaagctgccagtgaagaaagtaacagtgagatagagcaggaaatacctgtggaacaaaaagaaggcgctttctctaattttcccatatctgaagaaactattaaacttctcaaaggccgaggagtgaccttcctatttcctatacaagcaaagacattccatcatgtttacagcgggaaggacttaattgcacaggcacggacaggaactgggaagacattctcctttgccatccctttgattgagaaacttcatggggaactgcaagacaggaagagaggccgtgcccctcaggtactggttcttgcacctacaagagagttggcaaatcaagtaagcaaagacttcagtgacatcacaaaaaagctgtcagtggcttgtttttatggtggaactccctatggaggtcaatttgaacgcatgaggaatgggattgatatcctggttggaacaccaggtcgtatcaaagaccacatacagaatggcaaactagatctcaccaaacttaagcatgttgtcctggatgaagtggaccagatgttggatatgggatttgctgatcaagtggaagagattttaagtgtggcatacaagaaagattctgaagacaatccccaaacattgcttttttctgcaacttgccctcattgggtatttaatgttgccaagaaatacatgaaatctacatatgaacaggtggacctgattggtaaaaagactcagaaaacggcaataactgtggagcatctggctattaagtgccactggactcagagggcagcagttattggggatgtcatccgagtatatagtggtcatcaaggacgcactatcatcttttgtgaaaccaagaaagaagcccaggagctgtcccagaattcagctataaagcaggatgctcagtccttgcatggagacattccacagaagcaaagggaaatcaccctgaaaggttttagaaatggtagttttggagttttggtggcaaccaatgttgctgcacgtgggttagacatccctgaggttgatttggttatacaaagctctccaccaaaggatgtagagtcctacattcatcgatccgggcggacaggcagagctggaaggacgggggtgtgcatctgcttttatcagcacaaggaagaatatcagttagtacaagtggagcaaaaagcgggaattaagttcaaacgaataggtgttccttctgcaacagaaataataaaagcttccagcaaagatgccatcaggcttttggattccgtgcctcccactgccattagtcacttcaaacaatcagctgagaagctgatagaggagaagggagctgtggaagctctggcagcagcactggcccatatttcaggtgccacgtccgtagaccagcgctccttgatcaactcaaatgtgggttttgtgaccatgatcttgcagtgctcaattgaaatgccaaatattagttatgcttggaaagaacttaaagagcagctgggcgaggagattgattccaaagtgaagggaatggtttttctcaaaggaaagctgggtgtttgctttgatgtacctaccgcatcagtaacagaaatacaggagaaatggcatgattcacgacgctggcagctctctgtggccacagagcaaccagaactggaaggaccacgggaaggatatggaggcttcaggggacacgatcaggaggtggcaacaaaagtaacagatcccaaaacaaaggccagaagcggagtttcagtaaagcatttggtcaataattagaaatagaagatttatatagcaaaaagagaatgatgtttggcaatatagaactgaacattatttttcatgcaaagttaaaagcacattgtgcctccttttgaccacttgccaagtccctgtctctttcagacacagacaagcttcatttaaattatttcatctgatcattatcatttataactttattgttacttcatcagtttttccttttgaaaggtgtatgaattcattacatttttattctaatgtattatctgtagattagaagataaaatcaagcatgtatctgcctatactttgtgagttcacctgtctttatactcaaaagtgtcccttaatagtgtccttccctgaaataaatacctaagggagtgtaacagtctctggaggaccactttgagcctttggaagttaaggtttcctcagccacctgccgaacagtttctcatgtggtcctattatttgtctactgagacttaatactgagcaatgttttgaaacaagatttcaaactaatctgggttgtaatacagtttataccagtgtatgctctagacttggaagatgtagtatgtttgatgtggattacctatacttatgttcgttttgatacatttttagcttctcattataaggtgattcatgctttagtgaattcttcatagatagtatatataaaagtacattttaatagaaagccagggttttaaggaatttcacatgtataaggtggctccatagctttatttgtaagtaggctggataaatggtgcttaaatggtaatgtactccacttcttcctattggaagattaacattatttaccaagaaggacttaagggagtaaggggcgcagattagcattgctcaagagtatgtaaaaaaaaaaaaaaaaaaaaagaaccaaaccactggaaataatcaaatgcaaaaaggtaacaaattcataactggaaagcaaagagaagaacaagtatgatttggatgataaagcattgttttaatggtgaaaacttcacagatcactaatgtttctagaggttaacttcaagtgggcaagctggggtttttaggtagtcagtggcctagttcctaaagccacagtataggatctgttaaactgaatgtctgttgaaagtttgttttagctgcttggaggcttccttttaagacaaactgtatgtgattaagttgttttgagggaactgaagaacctgatgtagcccctggccagataactgcctgatttctcagatattatttctctgggaaacattctacatagcacaggagcttaagagtggcattatcttctcgccttaatttccagagattatttctgtactgagaatcctggaactactatgctaggaaatttaaagctgcatggtctgtcttgttttcatttaattattgtgaatacctagaatctttcttggtcctgatttctcttgcttaatccagtctttatctctaactgccccttatttgatcaccatgtactaggagctctgatagccagctcagctcctaatccttgaggcaacattctttttctatttgaacttcagttctgtccttgaatcccgactagatatttcttgccctctggtctcagaattctcttggcttttattccttgatccacttgccagttttatcactttacccttgttcctcatggcttcccatcaagccatgggtattaggtgacagtgtaatttattagattctggttttgcccaaatactgggcatgctttaataataactgaaccatttcattatttggataggcatgggtaccttatcaagcagattaaaaggatatggtacccgtcctttagaaaagaacagctaaaaccttgttgtggattatggatttagcctaaagaaaaataatctggcataaattaagagtaagagagaagattaatagaaatttcacttcacataacttaaaacatggctatttcaataaaggactaaagtttctcctggatcccagaattcaacctgtatttataaatgtataatgtatttagctactttttggtttaaatgaacttgttgggttagcttggtaaatgttataatttttactattttctacaaagaaaatattttctaatttaagttggagctatctgtgcagcagtttctctacagttgtgcataaatgtttttactataaaatgagctaatgtataaaatactgctgtataccataataaagatagtaatacttga

SEQ ID NO: 421510 - DNA, 3964 bp, Homo sapiens
ctaggtacgaggctcggggtgaatcggccgagacttaattgcacaggcacggacaggaactgggaagacattctcctttgccatccctttgattgagaaacttcatggggaactgcaagacaggaagagaggccgtgcccctcaggtactggttcttgcacctacaagagagttggcaaatcaagtaagcaaagacttcagtgacatcacaaaaaagctgtcagtggcttgtttttatggtggaactccctatggaggtcaatttgaacgcatgaggaatgggattgatatcctggttggaacaccaggtcgtatcaaagaccacatacagaatggcaaactagatctcaccaaacttaagcatgttgtcctggatgaagtggaccagatgttggatatgggatttgctgatcaagtggaagagattttaagtgtggcatacaagaaagattctgaagacaatccccaaacattgcttttttctgcaacttgccctcattgggtatttaatgttgccaagaaatacatgaaatctacatatgaacaggtggacctgattggtaaaaagactcagaaaacggcaataactgtggagcatctggctattaagtgccactggactcagagggcagcagttattggggatgtcatccgagtatatagtggtcatcaaggacgcactatcatcttttgtgaaaccaagaaagaagcccaggagctgtcccagaattcagctataaagcaggatgctcagtccttgcatggagacattccacagaagcaaagggaaatcaccctgaaaggttttagaaatggtagttttggagttttggtggcaaccaatgttgctgcacgtgggttagacatccctgaggttgatttggttatacaaagctctccaccaaaggatgtagagtcctacattcatcgatccgggcggacaggcagagctggaaggacgggggtgtgcatctgcttttatcagcacaaggaagaatatcagttagtacaagtggagcaaaaagcgggaattaagttcaaacgaataggtgttccttctgcaacagaaataataaaagcttccagcaaagatgccatcaggcttttggattccgtgcctcccactgccattagtcacttcaaacaatcagctgagaagctgatagaggagaagggagctgtggaagctctggcagcagcactggcccatatttcaggtgccacgtccgtagaccagcgctccttgatcaactcaaatgtgggttttgtgaccatgatcttgcagtgctcaattgaaatgccaaatattagttatgcttggaaagaacttaaagagcagctgggcgaggagattgattccaaagtgaagggaatggtttttctcaaaggaaagctgggtgtttgctttgatgtacctaccgcatcagtaacagaaatacaggagaaatggcatgattcacgacgctggcagctctctgtggccacagagcaaccagaactggaaggaccacgggaaggatatggaggcttcaggggacagcgggaaggcagtcgaggcttcaggggacagcgggacggaaacagaagattcagaggacagcgggaaggcagtagaggcccgagaggacagcgatcaggaggtggcaacaaaagtaacagatcccaaaacaaaggccagaagcggagtttcagtaaagcatttggtcaataattagaaatagaagatttatatagcaaaaagagaatgatgtttggcaatatagaactgaacattatttttcatgcaaagttaaaagcacattgtgcctccttttgaccacttgccaagtccctgtctctttcagacacagacaagcttcatttaaattatttcatctgatcattatcatttataactttattgttacttcatcagtttttccttttgaaaggtgtatgaattcattacatttttattctaatgtattatctgtagattagaagataaaatcaagcatgtatctgcctatactttgtgagttcacctgtctttatactcaaaagtgtcccttaatagtgtccttccctgaaataaatacctaagggagtgtaacagtctctggaggaccactttgagcctttggaagttaaggtttcctcagccacctgccgaacagtttctcatgtggtcctattatttgtctactgagacttaatactgagcaatgttttgaaacaagatttcaaactaatctgggttgtaatacagtttataccagtgtatgctctagacttggaagatgtagtatgtttgatgtggattacctatacttatgttcgttttgatacatttttagcttctcattataaggtgattcatgctttagtgaattcttcatagatagtatatataaaagtacattttaatagaaagccagggttttaaggaatttcacatgtataaggtggctccatagctttatttgtaagtaggctggataaatggtgcttaaatggtaatgtactccacttcttcctattggaagattaacattatttaccaagaaggacttaagggagtaaggggcgcagattagcattgctcaagagtatgtaaaaaaaaaaaaaaaaaaaaagaaccaaaccactggaaataatcaaatgcaaaaaggtaacaaattcataactggaaagcaaagagaagaacaagtatgatttggatgataaagcattgttttaatggtgaaaacttcacagatcactaatgtttctagaggttaacttcaagtgggcaagctggggtttttaggtagtcagtggcctagttcctaaagccacagtataggatctgttaaactgaatgtctgttgaaagtttgttttagctgcttggaggcttccttttaagacaaactgtatgtgattaagttgttttgagggaactgaagaacctgatgtagcccctggccagataactgcctgatttctcagatattatttctctgggaaacattctacatagcacaggagcttaagagtggcattatcttctcgccttaatttccagagattatttctgtactgagaatcctggaactactatgctaggaaatttaaagctgcatggtctgtcttgttttcatttaattattgtgaatacctagaatctttcttggtcctgatttctcttgcttaatccagtctttatctctaactgccccttatttgatcaccatgtactaggagctctgatagccagctcagctcctaatccttgaggcaacattctttttctatttgaacttcagttctgtccttgaatcccgactagatatttcttgccctctggtctcagaattctcttggcttttattccttgatccacttgccagttttatcactttacccttgttcctcatggcttcccatcaagccatgggtattaggtgacagtgtaatttattagattctggttttgcccaaatactgggcatgctttaataataactgaaccatttcattatttggataggcatgggtaccttatcaagcagattaaaaggatatggtacccgtcctttagaaaagaacagctaaaaccttgttgtggattatggatttagcctaaagaaaaataatctggcataaattaagagtaagagagaagattaatagaaatttcacttcacataacttaaaacatggctatttcaataaaggactaaagtttctcctggatcccagaattcaacctgtatttataaatgtataatgtatttagctactttttggtttaaatgaacttgttgggttagcttggtaaatgttataatttttactattttctacaaagaaaatattttctaatttaagttggagctatctgtgcagcagtttctctacagttgtgcataaatgtttttactataaaatgagctaatgtataaaatactgctgtataccataataaagatagtaatacttga

SEQ ID NO: 421511 - DNA, 3426 bp, Homo sapiens
agtgacgagagccgggtggacccagggtggggaactacctcttcctctccacgcggttgagaagaccggtcggcctgggcaacctgcgctgaagatgccgggaaaactccgtagtgacgctggtttggaatcagacaccgcaatgaaaaaaggggagacactgcgaaagcaaaccgaggagaaagagaaaaaagagaagccaaaatctgataagactgaagagatagcagaagaggaagaaactgttttccccaaagctaaacaagttaaaaagaaagcagagccttctgaagttgacatgaattctcctaaatccaaaaaggcaaaaaagaaagaggagccatctcaaaatgacatttctcctaaaaccaaaagtttgagaaagaaaaaggagcccattgaaaagaaagtggtttcttctaaaaccaaaaaagtgacaaaaaatgaggagccttctgaggaagaaatagatgctcctaagcccaagaagatgaagaaagaaaaggaaatgaatggagaaactagagagaaaagccccaaactgaagaatggatttcctcatcctgaaccggactgtaaccccagtgaagctgccagtgaagaaagtaacagtgagatagagcaggaaatacctgtggaacaaaaagaaggcgctttctctaattttcccatatttcaggtgccacgtccgtagaccagcgctccttgatcaactcaaatgtgggttttgtgaccatgatcttgcagtgctcaattgaaatgccaaatattagttatgcttggaaagaacttaaagagcagctgggcgaggagattgattccaaagtgaagggaatggtttttctcaaaggaaagctgggtgtttgctttgatgtacctaccgcatcagtaacagaaatacaggagaaatggcatgattcacgacgctggcagctctctgtggccacagagcaaccagaactggaaggaccacgggaaggatatggaggcttcaggggacagcgggaaggcagtcgaggcttcaggggacagcgggacggaaacagaagattcagaggacagcgggaaggcagtagaggcccgagaggacagcgatcaggaggtggcaacaaaagtaacagatcccaaaacaaaggccagaagcggagtttcagtaaagcatttggtcaataattagaaatagaagatttatatagcaaaaagagaatgatgtttggcaatatagaactgaacattatttttcatgcaaagttaaaagcacattgtgcctccttttgaccacttgccaagtccctgtctctttcagacacagacaagcttcatttaaattatttcatctgatcattatcatttataactttattgttacttcatcagtttttccttttgaaaggtgtatgaattcattacatttttattctaatgtattatctgtagattagaagataaaatcaagcatgtatctgcctatactttgtgagttcacctgtctttatactcaaaagtgtcccttaatagtgtccttccctgaaataaatacctaagggagtgtaacagtctctggaggaccactttgagcctttggaagttaaggtttcctcagccacctgccgaacagtttctcatgtggtcctattatttgtctactgagacttaatactgagcaatgttttgaaacaagatttcaaactaatctgggttgtaatacagtttataccagtgtatgctctagacttggaagatgtagtatgtttgatgtggattacctatacttatgttcgttttgatacatttttagcttctcattataaggtgattcatgctttagtgaattcttcatagatagtatatataaaagtacattttaatagaaagccagggttttaaggaatttcacatgtataaggtggctccatagctttatttgtaagtaggctggataaatggtgcttaaatggtaatgtactccacttcttcctattggaagattaacattatttaccaagaaggacttaagggagtaaggggcgcagattagcattgctcaagagtatgtaaaaaaaaaaaaaaaaaaaaagaaccaaaccactggaaataatcaaatgcaaaaaggtaacaaattcataactggaaagcaaagagaagaacaagtatgatttggatgataaagcattgttttaatggtgaaaacttcacagatcactaatgtttctagaggttaacttcaagtgggcaagctggggtttttaggtagtcagtggcctagttcctaaagccacagtataggatctgttaaactgaatgtctgttgaaagtttgttttagctgcttggaggcttccttttaagacaaactgtatgtgattaagttgttttgagggaactgaagaacctgatgtagcccctggccagataactgcctgatttctcagatattatttctctgggaaacattctacatagcacaggagcttaagagtggcattatcttctcgccttaatttccagagattatttctgtactgagaatcctggaactactatgctaggaaatttaaagctgcatggtctgtcttgttttcatttaattattgtgaatacctagaatctttcttggtcctgatttctcttgcttaatccagtctttatctctaactgccccttatttgatcaccatgtactaggagctctgatagccagctcagctcctaatccttgaggcaacattctttttctatttgaacttcagttctgtccttgaatcccgactagatatttcttgccctctggtctcagaattctcttggcttttattccttgatccacttgccagttttatcactttacccttgttcctcatggcttcccatcaagccatgggtattaggtgacagtgtaatttattagattctggttttgcccaaatactgggcatgctttaataataactgaaccatttcattatttggataggcatgggtaccttatcaagcagattaaaaggatatggtacccgtcctttagaaaagaacagctaaaaccttgttgtggattatggatttagcctaaagaaaaataatctggcataaattaagagtaagagagaagattaatagaaatttcacttcacataacttaaaacatggctatttcaataaaggactaaagtttctcctggatcccagaattcaacctgtatttataaatgtataatgtatttagctactttttggtttaaatgaacttgttgggttagcttggtaaatgttataatttttactattttctacaaagaaaatattttctaatttaagttggagctatctgtgcagcagtttctctacagttgtgcataaatgtttttactataaaatgagctaatgtataaaatactgctgtataccataataaagatagtaatacttga

SEQ ID NO: 421512 - DNA, 3247 bp, Homo sapiens
gcggccgccaaacaaaggtaccagtcgccgccgcgggaggaggaggagccggagcctctgcctcagcagccgctggacccgccgcccttcttccccatctctcccccgggcctgctggttttgggggggagaaggagagaggggactctggacgtgccagggtcagatctcgcctccgaggaaggtgcagctgaacctggtgttttagaggataccttggtcccagagtcatcatgaaggcccttgatgagcctccctatttgacagtgggcactgatgtgagtgctaaatacaagtggagcaaaaagcgggaattaagttcaaacgaataggtgttccttctgcaacagaaataataaaagcttccagcaaagatgccatcaggcttttggattccgtgcctcccactgccattagtcacttcaaacaatcagctgagaagctgatagaggagaagggagctgtggaagctctggcagcagcactggcccatatttcaggtgccacgtccgtagaccagcgctccttgatcaactcaaatgtgggttttgtgaccatgatcttgcagtgctcaattgaaatgccaaatattagttatgcttggaaagaacttaaagagcagctgggcgaggagattgattccaaagtgaagggaatggtttttctcaaaggaaagctgggtgtttgctttgatgtacctaccgcatcagtaacagaaatacaggagaaatggcatgattcacgacgctggcagctctctgtggccacagagcaaccagaactggaaggaccacgggaaggatatggaggcttcaggggacagcgggaaggcagtcgaggcttcaggggacagcgggacggaaacagaagattcagaggacagcgggaaggcagtagaggcccgagaggacagcgatcaggaggtggcaacaaaagtaacagatcccaaaacaaaggccagaagcggagtttcagtaaagcatttggtcaataattagaaatagaagatttatatagcaaaaagagaatgatgtttggcaatatagaactgaacattatttttcatgcaaagttaaaagcacattgtgcctccttttgaccacttgccaagtccctgtctctttcagacacagacaagcttcatttaaattatttcatctgatcattatcatttataactttattgttacttcatcagtttttccttttgaaaggtgtatgaattcattacatttttattctaatgtattatctgtagattagaagataaaatcaagcatgtatctgcctatactttgtgagttcacctgtctttatactcaaaagtgtcccttaatagtgtccttccctgaaataaatacctaagggagtgtaacagtctctggaggaccactttgagcctttggaagttaaggtttcctcagccacctgccgaacagtttctcatgtggtcctattatttgtctactgagacttaatactgagcaatgttttgaaacaagatttcaaactaatctgggttgtaatacagtttataccagtgtatgctctagacttggaagatgtagtatgtttgatgtggattacctatacttatgttcgttttgatacatttttagcttctcattataaggtgattcatgctttagtgaattcttcatagatagtatatataaaagtacattttaatagaaagccagggttttaaggaatttcacatgtataaggtggctccatagctttatttgtaagtaggctggataaatggtgcttaaatggtaatgtactccacttcttcctattggaagattaacattatttaccaagaaggacttaagggagtaaggggcgcagattagcattgctcaagagtatgtaaaaaaaaaaaaaaaaaaaaagaaccaaaccactggaaataatcaaatgcaaaaaggtaacaaattcataactggaaagcaaagagaagaacaagtatgatttggatgataaagcattgttttaatggtgaaaacttcacagatcactaatgtttctagaggttaacttcaagtgggcaagctggggtttttaggtagtcagtggcctagttcctaaagccacagtataggatctgttaaactgaatgtctgttgaaagtttgttttagctgcttggaggcttccttttaagacaaactgtatgtgattaagttgttttgagggaactgaagaacctgatgtagcccctggccagataactgcctgatttctcagatattatttctctgggaaacattctacatagcacaggagcttaagagtggcattatcttctcgccttaatttccagagattatttctgtactgagaatcctggaactactatgctaggaaatttaaagctgcatggtctgtcttgttttcatttaattattgtgaatacctagaatctttcttggtcctgatttctcttgcttaatccagtctttatctctaactgccccttatttgatcaccatgtactaggagctctgatagccagctcagctcctaatccttgaggcaacattctttttctatttgaacttcagttctgtccttgaatcccgactagatatttcttgccctctggtctcagaattctcttggcttttattccttgatccacttgccagttttatcactttacccttgttcctcatggcttcccatcaagccatgggtattaggtgacagtgtaatttattagattctggttttgcccaaatactgggcatgctttaataataactgaaccatttcattatttggataggcatgggtaccttatcaagcagattaaaaggatatggtacccgtcctttagaaaagaacagctaaaaccttgttgtggattatggatttagcctaaagaaaaataatctggcataaattaagagtaagagagaagattaatagaaatttcacttcacataacttaaaacatggctatttcaataaaggactaaagtttctcctggatcccagaattcaacctgtatttataaatgtataatgtatttagctactttttggtttaaatgaacttgttgggttagcttggtaaatgttataatttttactattttctacaaagaaaatattttctaatttaagttggagctatctgtgcagcagtttctctacagttgtgcataaatgtttttactataaaatgagctaatgtataaaatactgctgtataccataataaagatagtaatacttga

SEQ ID NO: 421513 - DNA, 2072 bp, Homo sapiens
tagattagaagataaaatcaagcatgtatctgcctatactacagataatacattagaataaaaatgtaatgtattatctgtagattagaagataaaatcaagcatgtatctgcctatactttgtgagttcacctgtctttatactcaaaagtgtcccttaatagtgtccttccctgaaataaatacctaagggagtgtaacagtctctggaggaccactttgagcctttggaagttaaggtttcctcagccacctgccgaacagtttctcatgtggtcctattatttgtctactgagacttaatactgagcaatgttttgaaacaagatttcaaactaatctgggttgtaatacagtttataccagtgtatgctctagacttggaagatgtagtatgtttgatgtggattacctatacttatgttcgttttgatacatttttagcttctcattataaggtgattcatgctttagtgaattcttcatagatagtatatataaaagtacattttaatagaaagccagggttttaaggaatttcacatgtataaggtggctccatagctttatttgtaagtaggctggataaatggtgcttaaatggtaatgtactccacttcttcctattggaagattaacattatttaccaagaaggacttaagggagtaaggggcgcagattagcattgctcaagagtatgtaaaaaaaaaaaaaaaaaaaaagaaccaaaccactggaaataatcaaatgcaaaaaggtaacaaattcataactggaaagcaaagagaagaacaagtatgatttggatgataaagcattgttttaatggtgaaaacttcacagatcactaatgtttctagaggttaacttcaagtgggcaagctggggtttttaggtagtcagtggcctagttcctaaagccacagtataggatctgttaaactgaatgtctgttgaaagtttgttttagctgcttggaggcttccttttaagacaaactgtatgtgattaagttgttttgagggaactgaagaacctgatgtagcccctggccagataactgcctgatttctcagatattatttctctgggaaacattctacatagcacaggagcttaagagtggcattatcttctcgccttaatttccagagattatttctgtactgagaatcctggaactactatgctaggaaatttaaagctgcatggtctgtcttgttttcatttaattattgtgaatacctagaatctttcttggtcctgatttctcttgcttaatccagtctttatctctaactgccccttatttgatcaccatgtactaggagctctgatagccagctcagctcctaatccttgaggcaacattctttttctatttgaacttcagttctgtccttgaatcccgactagatatttcttgccctctggtctcagaattctcttggcttttattccttgatccacttgccagttttatcactttacccttgttcctcatggcttcccatcaagccatgggtattaggtgacagtgtaatttattagattctggttttgcccaaatactgggcatgctttaataataactgaaccatttcattatttggataggcatgggtaccttatcaagcagattaaaaggatatggtacccgtcctttagaaaagaacagctaaaaccttgttgtggattatggatttagcctaaagaaaaataatctggcataaattaagagtaagagagaagattaatagaaatttcacttcacataacttaaaacatggctatttcaataaaggactaaagtttctcctggatcccagaattcaacctgtatttataaatgtataatgtatttagctactttttggtttaaatgaacttgttgggttagcttggtaaatgttataatttttactattttctacaaagaaaatattttctaatttaagttggagctatctgtgcagcagtttctctacagttgtgcataaatgtttttactataaaatgagctaatgtataaaatactgctgtataccataataaagatagtaatacttga

SEQ ID NO: 421514 - DNA, 1913 bp, Homo sapiens
gcggccgctactactactaaattcgcggccgctcgatgtaacagtctctggaggaccactttgagcctttggaagttaaggtttcctcagccacctgccgaacagtttctcatgtggtcctattatttgtctactgagacttaatactgagcaatgttttgaaacaagatttcaaactaatctgggttgtaatacagtttataccagtgtatgctctagacttggaagatgtagtatgtttgatgtggattacctatacttatgttcgttttgatacatttttagcttctcattataaggtgattcatgctttagtgaattcttcatagatagtatatataaaagtacattttaatagaaagccagggttttaaggaatttcacatgtataaggtggctccatagctttatttgtaagtaggctggataaatggtgcttaaatggtaatgtactccacttcttcctattggaagattaacattatttaccaagaaggacttaagggagtaaggggcgcagattagcattgctcaagagtatgtaaaaaaaaaaaaaaaaaaaaagaaccaaaccactggaaataatcaaatgcaaaaaggtaacaaattcataactggaaagcaaagagaagaacaagtatgatttggatgataaagcattgttttaatggtgaaaacttcacagatcactaatgtttctagaggttaacttcaagtgggcaagctggggtttttaggtagtcagtggcctagttcctaaagccacagtataggatctgttaaactgaatgtctgttgaaagtttgttttagctgcttggaggcttccttttaagacaaactgtatgtgattaagttgttttgagggaactgaagaacctgatgtagcccctggccagataactgcctgatttctcagatattatttctctgggaaacattctacatagcacaggagcttaagagtggcattatcttctcgccttaatttccagagattatttctgtactgagaatcctggaactactatgctaggaaatttaaagctgcatggtctgtcttgttttcatttaattattgtgaatacctagaatctttcttggtcctgatttctcttgcttaatccagtctttatctctaactgccccttatttgatcaccatgtactaggagctctgatagccagctcagctcctaatccttgaggcaacattctttttctatttgaacttcagttctgtccttgaatcccgactagatatttcttgccctctggtctcagaattctcttggcttttattccttgatccacttgccagttttatcactttacccttgttcctcatggcttcccatcaagccatgggtattaggtgacagtgtaatttattagattctggttttgcccaaatactgggcatgctttaataataactgaaccatttcattatttggataggcatgggtaccttatcaagcagattaaaaggatatggtacccgtcctttagaaaagaacagctaaaaccttgttgtggattatggatttagcctaaagaaaaataatctggcataaattaagagtaagagagaagattaatagaaatttcacttcacataacttaaaacatggctatttcaataaaggactaaagtttctcctggatcccagaattcaacctgtatttataaatgtataatgtatttagctactttttggtttaaatgaacttgttgggttagcttggtaaatgttataatttttactattttctacaaagaaaatattttctaatttaagttggagctatctgtgcagcagtttctctacagttgtgcataaatgtttttactataaaatgagctaatgtataaaatactgctgtataccataataaagatagtaatacttga

SEQ ID NO: 421515 - DNA, 2240 bp, Homo sapiens
agtgacgagagccgggtggacccagggtggggaactacctcttcctctccacgcggttgagaagaccggtcggcctgggcaacctgcgctgaagatgccgggaaaactccgtagtgacgctggtttggaatcagacaccgcaatgaaaaaaggggagacactgcgaaagcaaaccgaggagaaagagaaaaaagagaagccaaaatctgataagactgaagagatagcagaagaggaagaaactgttttccccaaagctaaacaagttaaaaagaaagcagagccttctgaagttgacatgaattctcctaaatccaaaaaggcaaaaaagaaagaggagccatctcaaaatgacatttctcctaaaaccaaaagtttgagaaagaaaaaggagcccattgaaaagaaagtggtttcttctaaaaccaaaaaagtgacaaaaaatgaggagccttctgaggaagaaatagatgctcctaagcccaagaagatgaagaaagaaaaggaaatgaatggagaaactagagagaaaagccccaaactgaagaatggatttcctcatcctgaaccggactgtaaccccagtgaagctgccagtgaagaaagtaacagtgagatagagcaggaaatacctgtggaacaaaaagaaggcgctttctctaattttcccatatctgaagaaactattaaacttctcaaaggccgaggagtgaccttcctatttcctatacaagcaaagacattccatcatgtttacagcgggaaggacttaattgcacaggcacggacaggaactgggaagacattctcctttgccatccctttgattgagaaacttcatggggaactgcaagacaggaagagaggccgtgcccctcaggtactggttcttgcacctacaagagagttggcaaatcaagtaagcaaagacttcagtgacatcacaaaaaagctgtcagtggcttgtttttatggtggaactccctatggaggtcaatttgaacgcatgaggaatgggattgatatcctggttggaacaccaggtcgtatcaaagaccacatacagaatggcaaactagatctcaccaaacttaagcatgttgtcctggatgaagtggaccagatgttggatatgggatttgctgatcaagtggaagagattttaagtgtggcatacaagaaagattctgaagacaatccccaaacattgcttttttctgcaacttgccctcattgggtatttaatgttgccaagaaatacatgaaatctacatatgaacaggtggacctgattggtaaaaagactcagaaaacggcaataactgtggagcatctggctattaagtgccactggactcagagggcagcagttattggggatgtcatccgagtatatagtggtcatcaaggacgcactatcatcttttgtgaaaccaagaaagaagcccaggagctgtcccagaattcagctataaagcaggatgctcagtccttgcatggagacattccacagaagcaaagggaaatcaccctgaaaggttttagaaatggtagttttggagttttggtggcaaccaatgttgctgcacgtgggttagacatccctgaggttgatttggttatacaaagctctccaccaaaggatgtagagtcctacattcatcgatccgggcggacaggcagagctggaaggacgggggtgtgcatctgcttttatcagcacaaggaagaatatcagttagtacaagtggagcaaaaagcgggaattaagttcaaacgaataggtgttccttctgcaacagaaataataaaagcttccagcaaagatgccatcaggcttttggattccgtgcctcccactgccattagtcacttcaaacaatcagctgagaagctgatagaggagaagggagctgtggaagctctggcagcagcactggcccatatttcaggtgccacgtccgtagaccagcgctccttgatcaactcaaatgtgggttttgtgaccatgatcttgcagtgctcaattgaaatgccaaatattagttatgcttggaaagaacttaaagagcagctgggcgaggagattgattccaaagtgaagggaatggtttttctcaaaggaaagctgggtgtttgctttgatgtacctaccgcatcagtaacagaaatacaggagaaatggcatgattcacgacgctgcctacagcacatgccggtaccggctcatcacttggttg

SEQ ID NO: 421516 - DNA, 978 bp, Homo sapiens
cggacgcgctggctctacccacgcgctcggtggcattatcttctcgccttaatttccagagattatttctgtactgagaatcctggaactactatgctaggaaatttaaagctgcatggtctgtcttgttttcatttaattattgtgaatacctagaatctttcttggtcctgatttctcttgcttaatccagtctttatctctaactgccccttatttgatcaccatgtactaggagctctgatagccagctcagctcctaatccttgaggcaacattctttttctatttgaacttcagttctgtccttgaatcccgactagatatttcttgccctctggtctcagaattctcttggcttttattccttgatccacttgccagttttatcactttacccttgttcctcatggcttcccatcaagccatgggtattaggtgacagtgtaatttattagattctggttttgcccaaatactgggcatgctttaataataactgaaccatttcattatttggataggcatgggtaccttatcaagcagattaaaaggatatggtacccgtcctttagaaaagaacagctaaaaccttgttgtggattatggatttagcctaaagaaaaataatctggcataaattaagagtaagagagaagattaatagaaatttcacttcacataacttaaaacatggctatttcaataaaggactaaagtttctcctggatcccagaattcaacctgtatttataaatgtataatgtatttagctactttttggtttaaatgaacttgttgggttagcttggtaaatgttataatttttactattttctacaaagaaaatattttctaatttaagttggagctatctgtgcagcagtttctctacagttgtgcataaatgtttttactataaaatgagctaatgtataaaatactgctgtataccataataaagatagtaatacttga

SEQ ID NO: 421517 - DNA, 1054 bp, Homo sapiens
  misc_feature (1054)..(1054): n is a, c, g, or t
agtgacgagagccgggtggacccagggtggggaactacctcttcctctccacgcggttgagaagaccggtcggcctgggcaacctgcgctgaagatgccgggaaaactccgtagtgacgctggtttggaatcagacaccgcaatgaaaaaaggggagacactgcgaaagcaaaccgaggagaaagagaaaaaagagaagccaaaatctgataagactgaagagatagcagaagaggaagaaactgttttccccaaagctaaacaagttaaaaagaaagcagagccttctgaagttgacatgaattctcctaaatccaaaaaggcaaaaaagaaagaggagccatctcaaaatgacatttctcctaaaaccaaaagtttgagaaagaaaaaggagcccattgaaaagaaagtggtttcttctaaaaccaaaaaagtgacaaaaaatgaggagccttctgaggaagaaatagatgctcctaagcccaagaagatgaagaaagaaaaggaaatgaatggagaaactagagagaaaagccccaaactgaagaatggatttcctcatcctgaaccggactgtaaccccagtgaagctgccagtgaagaaagtaacagtgagatagagcaggaaatacctgtggaacaaaaagaaggcgctttctctaattttcccatatctgaagaaactattaaacttctcaaaggccgaggagtgaccttcctatttcctatacaagcaaagacattccatcatgtttacagcgggaaggacttaattgcacaggcacggacaggaactgggaagacattctcctttgccatccctttgattgagaaacttcatggggaactgcaagacaggaagagaggccgtgcccctcaggtaaatatctctaacacagtccttgggagttttagatctgcacagaagagagatactgcttgggcatcattacataccctgttttgtcttgttgttttttgttttttgtttttttttttagggctgcacctgcagcatatggcggttcccaggctatcggagctggcggtatcn

SEQ ID NO: 421518 - DNA, 314 bp, Homo sapiens
gctcagacctaaggttacactgataaaataggtttgatcactcttgtctcattctcaacttcaataagtaaagttggatacagttggaattgataactgaggatttggaaataatattgaggcttatccattcaagacacattttcccctttgtaatgttttcaacaggcatgtcaccaaaatatgaatgtcttttacaggcctaactgatgaagagaaaaagtacttgtattgttggaactggtgttcttacatccgtttatttattggcaggatgctcagtccttgcatggagacattccacagaagcaaag

SEQ ID NO: 421519 - DNA, 540 bp, Homo sapiens
ccgacttggcctcaggtggttgctggtgaacattgatggactgtggaagtattaggttaggtggaatactatgtaggcttgtttggattattcatactgactttttttttccccctcctcaaagattctgaagacaatccccaaacattgcttttttctgcaacttgccctcattgggtatttaatgttgccaagaaatacatgaaatctacatatgaacaggtggacctgattggtaaaaagactcagaaaacggcaataactgtggaggtaaattatttacttagttgccagaatataaaattgtatatatttttttcttgtctgttagtattaagactggcaaatgctctttttccagataaatactaaatccatgtgaaaagccaaggaaaaatatttctatttgagctgtatatgatatctgtgtttttatttttattttttgagatggagtctcgctctgtcaccaggctggagtgcagtggcgcaatctccgttcactgcaacctccacctcccaggttcaagtgattctcct

SEQ ID NO: 421520 - DNA, 4699 bp, Homo sapiens
agtgacgagagccgggtggacccagggtggggaactacctcttcctctccacgcggttgagaagaccggtcggcctgggcaacctgcgctgaagatgccgggaaaactccgtagtgacgctggtttggaatcagacaccgcaatgaaaaaaggggagacactgcgaaagcaaaccgaggagaaagagaaaaaagagaagccaaaatctgataagactgaagagatagcagaagaggaagaaactgttttccccaaagctaaacaagttaaaaagaaagcagagccttctgaagttgacatgaattctcctaaatccaaaaaggcaaaaaagaaagaggagccatctcaaaatgacatttctcctaaaaccaaaagtttgagaaagaaaaaggagcccattgaaaagaaagtggtttcttctaaaaccaaaaaagtgacaaaaaatgaggagccttctgaggaagaaatagatgctcctaagcccaagaagatgaagaaagaaaaggaaatgaatggagaaactagagagaaaagccccaaactgaagaatggatttcctcatcctgaaccggactgtaaccccagtgaagctgccagtgaagaaagtaacagtgagatagagcaggaaatacctgtggaacaaaaagaaggcgctttctctaattttcccatatctgaagaaactattaaacttctcaaaggccgaggagtgaccttcctatttcctatacaagcaaagacattccatcatgtttacagcgggaaggacttaattgcacaggcacggacaggaactgggaagacattctcctttgccatccctttgattgagaaacttcatggggaactgcaagacaggaagagaggccgtgcccctcaggtactggttcttgcacctacaagagagttggcaaatcaagtaagcaaagacttcagtgacatcacaaaaaagctgtcagtggcttgtttttatggtggaactccctatggaggtcaatttgaacgcatgaggaatgggattgatatcctggttggaacaccaggtcgtatcaaagaccacatacagaatggcaaactagatctcaccaaacttaagcatgttgtcctggatgaagtggaccagatgttggatatgggatttgctgatcaagtggaagagattttaagtgtggcatacaagaaagattctgaagacaatccccaaacattgcttttttctgcaacttgccctcattgggtatttaatgttgccaagaaatacatgaaatctacatatgaacaggtggacctgattggtaaaaagactcagaaaacggcaataactgtggagcatctggctattaagtgccactggactcagagggcagcagttattggggatgtcatccgagtatatagtggtcatcaaggacgcactatcatcttttgtgaaaccaagaaagaagcccaggagctgtcccagaattcagctataaagcaggatgctcagtccttgcatggagacattccacagaagcaaagggaaatcaccctgaaaggttttagaaatggtagttttggagttttggtggcaaccaatgttgctgcacgtgggttagacatccctgaggttgatttggttatacaaagctctccaccaaaggatgtagagtcctacattcatcgatccgggcggacaggcagagctggaaggacgggggtgtgcatctgcttttatcagcacaaggaagaatatcagttagtacaagtggagcaaaaagcgggaattaagttcaaacgaataggtgttccttctgcaacagaaataataaaagcttccagcaaagatgccatcaggcttttggattccgtgcctcccactgccattagtcacttcaaacaatcagctgagaagctgatagaggagaagggagctgtggaagctctggcagcagcactggcccatatttcaggtgccacgtccgtagaccagcgctccttgatcaactcaaatgtgggttttgtgaccatgatcttgcagtgctcaattgaaatgccaaatattagttatgcttggaaagaacttaaagagcagctgggcgaggagattgattccaaagtgaagggaatggtttttctcaaaggaaagctgggtgtttgctttgatgtacctaccgcatcagtaacagaaatacaggagaaatggcatgattcacgacgctggcagctctctgtggccacagagcaaccagaactggaaggaccacgggaaggatatggaggcttcaggggacagcgggaaggcagtcgaggcttcaggggacagcgggacggaaacagaagattcagaggacagcgggaaggcagtagaggcccgagaggacagcgatcaggaggtggcaacaaaagtaacagatcccaaaacaaaggccagaagcggagtttcagtaaagcatttggtcaataattagaaatagaagatttatatagcaaaaagagaatgatgtttggcaatatagaactgaacattatttttcatgcaaagttaaaagcacattgtgcctccttttgaccacttgccaagtccctgtctctttcagacacagacaagcttcatttaaattatttcatctgatcattatcatttataactttattgttacttcatcagtttttccttttgaaaggtgtatgaattcattacatttttattctaatgtattatctgtagattagaagataaaatcaagcatgtatctgcctatactttgtgagttcacctgtctttatactcaaaagtgtcccttaatagtgtccttccctgaaataaatacctaagggagtgtaacagtctctggaggaccactttgagcctttggaagttaaggtttcctcagccacctgccgaacagtttctcatgtggtcctattatttgtctactgagacttaatactgagcaatgttttgaaacaagatttcaaactaatctgggttgtaatacagtttataccagtgtatgctctagacttggaagatgtagtatgtttgatgtggattacctatacttatgttcgttttgatacatttttagcttctcattataaggtgattcatgctttagtgaattcttcatagatagtatatataaaagtacattttaatagaaagccagggttttaaggaatttcacatgtataaggtggctccatagctttatttgtaagtaggctggataaatggtgcttaaatggtaatgtactccacttcttcctattggaagattaacattatttaccaagaaggacttaagggagtaaggggcgcagattagcattgctcaagagtatgtaaaaaaaaaaaaaaaaaaaaagaaccaaaccactggaaataatcaaatgcaaaaaggtaacaaattcataactggaaagcaaagagaagaacaagtatgatttggatgataaagcattgttttaatggtgaaaacttcacagatcactaatgtttctagaggttaacttcaagtgggcaagctggggtttttaggtagtcagtggcctagttcctaaagccacagtataggatctgttaaactgaatgtctgttgaaagtttgttttagctgcttggaggcttccttttaagacaaactgtatgtgattaagttgttttgagggaactgaagaacctgatgtagcccctggccagataactgcctgatttctcagatattatttctctgggaaacattctacatagcacaggagcttaagagtggcattatcttctcgccttaatttccagagattatttctgtactgagaatcctggaactactatgctaggaaatttaaagctgcatggtctgtcttgttttcatttaattattgtgaatacctagaatctttcttggtcctgatttctcttgcttaatccagtctttatctctaactgccccttatttgatcaccatgtactaggagctctgatagccagctcagctcctaatccttgaggcaacattctttttctatttgaacttcagttctgtccttgaatcccgactagatatttcttgccctctggtctcagaattctcttggcttttattccttgatccacttgccagttttatcactttacccttgttcctcatggcttcccatcaagccatgggtattaggtgacagtgtaatttattagattctggttttgcccaaatactgggcatgctttaataataactgaaccatttcattatttggataggcatgggtaccttatcaagcagattaaaaggatatggtacccgtcctttagaaaagaacagctaaaaccttgttgtggattatggatttagcctaaagaaaaataatctggcataaattaagagtaagagagaagattaatagaaatttcacttcacataacttaaaacatggctatttcaataaaggactaaagtttctcctggatcccagaattcaacctgtatttataaatgtataatgtatttagctactttttggtttaaatgaacttgttgggttagcttggtaaatgttataatttttactattttctacaaagaaaatattttctaatttaagttggagctatctgtgcagcagtttctctacagttgtgcataaatgtttttactataaaatgagctaatgtataaaatactgctgtataccataataaagatagtaatacttga

SEQ ID NO: 421521 - DNA, 4544 bp, Homo sapiens
agtgacgagagccgggtggacccagggtggggaactacctcttcctctccacgcggttgagaagaccggtcggcctgggcaacctgcgctgaagatgccgggaaaactccgtagtgacgctggtttggaatcagacaccgcaatgaaaaaaggggagacactgcgaaagcaaaccgaggagaaagagaaaaaagagaagccaaaatctgataagactgaagagatagcagaagaggaagaaactgttttccccaaagctaaacaagttaaaaagaaagcagagccttctgaagttgacatgaattctcctaaatccaaaaaggcaaaaaagaaagaggagccatctcaaaatgacatttctcctaaaaccaaaagtttgagaaagaaaaaggagcccattgaaaagaaagtggtttcttctaaaaccaaaaaagtgacaaaaaatgaggagccttctgaggaagaaatagatgctcctaagcccaagaagatgaagaaagaaaaggaaatgaatggagaaactagagagaaaagccccaaactgaagaatggatttcctcatcctgaaccggactgtaaccccagtgaagctgccagtgaagaaagtaacagtgagatagagcaggaaatacctgtggaacaaaaagaaggcgctttctctaattttcccatatctgaagaaactattaaacttctcaaaggccgaggagtgaccttcctatttcctatacaagcaaagacattccatcatgtttacagcgggaaggacttaattgcacaggcacggacaggaactgggaagacattctcctttgccatccctttgattgagaaacttcatggggaactgcaagacaggaagagaggccgtgcccctcaggtactggttcttgcacctacaagagagttggcaaatcaagtaagcaaagacttcagtgacatcacaaaaaagctgtcagtggcttgtttttatggtggaactccctatggaggtcaatttgaacgcatgaggaatgggattgatatcctggttggaacaccaggtcgtatcaaagaccacatacagaatggcaaactagatctcaccaaacttaagcatgttgtcctggatgaagtggaccagatgttggatatgggatttgctgatcaagtggaagagattttaagtgtggcatacaagaaagattctgaagacaatccccaaacattgcttttttctgcaacttgccctcattgggtatttaatgttgccaagaaatacatgaaatctacatatgaacaggtggacctgattggtaaaaagactcagaaaacggcaataactgtggagcatctggctattaagtgccactggactcagagggcagcagttattggggatgtcatccgagtatatagtggtcatcaaggacgcactatcatcttttgtgaaaccaagaaagaagcccaggagctgtcccagaattcagctataaagcaggatgctcagtccttgcatggagacattccacagaagcaaagggaaatcaccctgaaaggttttagaaatggtagttttggagttttggtggcaaccaatgttgctgcacgtgggttagacatccctgaggttgatttggttatacaaagctctccaccaaaggatgtagagtcctacattcatcgatccgggcggacaggcagagctggaaggacgggggtgtgcatctgcttttatcagcacaaggaagaatatcagttagtacaagtggagcaaaaagcgggaattaagttcaaacgaataggtgttccttctgcaacagaaataataaaagcttccagcaaagatgccatcaggcttttggattccgtgcctcccactgccattagtcacttcaaacaatcagctgagaagctgatagaggagaagggagctgtggaagctctggcagcagcactggcccatatttcaggtgccacgtccgtagaccagcgctccttgatcaactcaaatgtgggttttgtgaccatgatcttgcagtgctcaattgaaatgccaaatattagttatgcttggaaagaacttaaagagcagctgggcgaggagattgattccaaagtgaagggaatggtttttctcaaaggaaagctgggtgtttgctttgatgtacctaccgcatcagtaacagaaatacaggagaaatggcatgattcacgacgctggcagctctctgtggccacagagcaaccagaactggaaggaccacgggaaggatatggaggcttcaggggacagcgggaaggcagtcgaggcttcaggggacagcgggacggaaacagaagattcagaggacagcgggaaggcagtagaggcccgagaggacagcgatcaggaggtggcaacaaaagtaacagatcccaaaacaaaggccagaagcggagtttcagtaaagcatttggtcaataattagaaatagaagatttatatagcaaaaagagaatgatgtttggcaatatagaactgaacattatttttcatgcaaagttaaaagcacattgtgcctccttttgaccacttgccaagtccctgtctctttcagacacagacaagcttcatttaaattatttcatctgatcattatcatttataactttattgttacttcatcagtttttccttttgaaaggtgtatgaattcattacatttttattctaatgtattatctgtagattagaagataaaatcaagcatgtatctgcctatactttgtgagttcacctgtctttatactcaaaagtgtcccttaatagtgtccttccctgaaataaatacctaagggagtgtaacagtctctggaggaccactttgagcctttggaagttaaggtttcctcagccacctgccgaacagtttctcatgtggtcctattatttgtctactgagacttaatactgagcaatgttttgaaacaagatttcaaactaatctgggttgtaatacagtttataccagtgtatgctctagacttggaagatgtagtatgtttgatgtggattacctatacttatgttcgttttgatacatttttagcttctcattataaggtgattcatgctttagtgaattcttcatagatagtatatataaaagtacattttaatagaaagccagggttttaaggaatttcacatgtataaggtggctccatagctttatttgtaagtaggctggataaatggtgcttaaatggtaatgtactccacttcttcctattggaagattaacattatttaccaagaaggacttaagggagtaaggggcgcagattagcattgctcaagagtatgtaaaaaaaaaaaaaaaaaaaaagaaccaaaccactggaaataatcaaatgcaaaaaggtaacaaattcataactggaaagcaaagagaagaacaagtatgatttggatgataaagcattgttttaatggtgaaaacttcacagatcactaatgtttctagaggttaacttcaagtgggcaagctggggtttttaggtagtcagtggcctagttcctaaagccacagtataggatctgttaaactgaatgtctgttgaaagtttgttttagctgcttggaggcttccttttaagacaaactgtatgtgattaagttgttttgagggaatactatgctaggaaatttaaagctgcatggtctgtcttgttttcatttaattattgtgaatacctagaatctttcttggtcctgatttctcttgcttaatccagtctttatctctaactgccccttatttgatcaccatgtactaggagctctgatagccagctcagctcctaatccttgaggcaacattctttttctatttgaacttcagttctgtccttgaatcccgactagatatttcttgccctctggtctcagaattctcttggcttttattccttgatccacttgccagttttatcactttacccttgttcctcatggcttcccatcaagccatgggtattaggtgacagtgtaatttattagattctggttttgcccaaatactgggcatgctttaataataactgaaccatttcattatttggataggcatgggtaccttatcaagcagattaaaaggatatggtacccgtcctttagaaaagaacagctaaaaccttgttgtggattatggatttagcctaaagaaaaataatctggcataaattaagagtaagagagaagattaatagaaatttcacttcacataacttaaaacatggctatttcaataaaggactaaagtttctcctggatcccagaattcaacctgtatttataaatgtataatgtatttagctactttttggtttaaatgaacttgttgggttagcttggtaaatgttataatttttactattttctacaaagaaaatattttctaatttaagttggagctatctgtgcagcagtttctctacagttgtgcataaatgtttttactataaaatgagctaatgtataaaatactgctgtataccataataaagatagtaatacttga

SEQ ID NO: 421522 - DNA, 4698 bp, Homo sapiens
  misc_feature (34)..(34): n is a, c, g, or t
  misc_feature (41)..(41): n is a, c, g, or t
ggaggggagggggtggggaagagagcaaactagnctaggtncgaggcctgggtgtttgagaagaccggtcggcctgggcaacctgcgctgaagatgccgggaaaactccgtagtgacgctggtttggaatcagacaccgcaatgaaaaaaggggagacactgcgaaagcaaaccgaggagaaagagaaaaaagagaagccaaaatctgataagactgaagagatagcagaagaggaagaaactgttttccccaaagctaaacaagttaaaaagaaagcagagccttctgaagttgacatgaattctcctaaatccaaaaaggcaaaaaagaaagaggagccatctcaaaatgacatttctcctaaaaccaaaagtttgagaaagaaaaaggagcccattgaaaagaaagtggtttcttctaaaaccaaaaaagtgacaaaaaatgaggagccttctgaggaagaaatagatgctcctaagcccaagaagatgaagaaagaaaaggaaatgaatggagaaactagagagaaaagccccaaactgaagaatggatttcctcatcctgaaccggactgtaaccccagtgaagctgccagtgaagaaagtaacagtgagatagagcaggaaatacctgtggaacaaaaagaaggcgctttctctaattttcccatatctgaagaaactattaaacttctcaaaggccgaggagtgaccttcctatttcctatacaagcaaagacattccatcatgtttacagcgggaaggacttaattgcacaggcacggacaggaactgggaagacattctcctttgccatccctttgattgagaaacttcatggggaactgcaagacaggaagagaggccgtgcccctcaggtactggttcttgcacctacaagagagttggcaaatcaagtaagcaaagacttcagtgacatcacaaaaaagctgtcagtggcttgtttttatggtggaactccctatggaggtcaatttgaacgcatgaggaatgggattgatatcctggttggaacaccaggtcgtatcaaagaccacatacagaatggcaaactagatctcaccaaacttaagcatgttgtcctggatgaagtggaccagatgttggatatgggatttgctgatcaagtggaagagattttaagtgtggcatacaagaaagattctgaagacaatccccaaacattgcttttttctgcaacttgccctcattgggtatttaatgttgccaagaaatacatgaaatctacatatgaacaggtggacctgattggtaaaaagactcagaaaacggcaataactgtggagcatctggctattaagtgccactggactcagagggcagcagttattggggatgtcatccgagtatatagtggtcatcaaggacgcactatcatcttttgtgaaaccaagaaagaagcccaggagctgtcccagaattcagctataaagcaggatgctcagtccttgcatggagacattccacagaagcaaagggaaatcaccctgaaaggttttagaaatggtagttttggagttttggtggcaaccaatgttgctgcacgtgggttagacatccctgaggttgatttggttatacaaagctctccaccaaaggatgtagagtcctacattcatcgatccgggcggacaggcagagctggaaggacgggggtgtgcatctgcttttatcagcacaaggaagaatatcagttagtacaagtggagcaaaaagcgggaattaagttcaaacgaataggtgttccttctgcaacagaaataataaaagcttccagcaaagatgccatcaggcttttggattccgtgcctcccactgccattagtcacttcaaacaatcagctgagaagctgatagaggagaagggagctgtggaagctctggcagcagcactggcccatatttcaggtgccacgtccgtagaccagcgctccttgatcaactcaaatgtgggttttgtgaccatgatcttgcagtgctcaattgaaatgccaaatattagttatgcttggaaagaacttaaagagcagctgggcgaggagattgattccaaagtgaagggaatggtttttctcaaaggaaagctgggtgtttgctttgatgtacctaccgcatcagtaacagaaatacaggagaaatggcatgattcacgacgctggcagctctctgtggccacagagcaaccagaactggaaggaccacgggaaggatatggaggcttcaggggacagcgggaaggcagtcgaggcttcaggggacagcgggacggaaacagaagattcagaggacagcgggaaggcagtagaggcccgagaggacagcgatcaggaggtggcaacaaaagtaacagatcccaaaacaaaggccagaagcggagtttcagtaaagcatttggtcaataattagaaatagaagatttatatagcaaaaagagaatgatgtttggcaatatagaactgaacattatttttcatgcaaagttaaaagcacattgtgcctccttttgaccacttgccaagtccctgtctctttcagacacagacaagcttcatttaaattatttcatctgatcattatcatttataactttattgttacttcatcagtttttccttttgaaaggtgtatgaattcattacatttttattctaatgtattatctgtagattagaagataaaatcaagcatgtatctgcctatactttgtgagttcacctgtctttatactcaaaagtgtcccttaatagtgtccttccctgaaataaatacctaagggagtgtaacagtctctggaggaccactttgagcctttggaagttaaggtttcctcagccacctgccgaacagtttctcatgtggtcctattatttgtctactgagacttaatactgagcaatgttttgaaacaagatttcaaactaatctgggttgtaatacagtttataccagtgtatgctctagacttggaagatgtagtatgtttgatgtggattacctatacttatgttcgttttgatacatttttagcttctcattataaggtgattcatgctttagtgaattcttcatagatagtatatataaaagtacattttaatagaaagccagggttttaaggaatttcacatgtataaggtggctccatagctttatttgtaagtaggctggataaatggtgcttaaatggtaatgtactccacttcttcctattggaagattaacattatttaccaagaaggacttaagggagtaaggggcgcagattagcattgctcaagagtatgtaaaaaaaaaaaaaaaaaaaaagaaccaaaccactggaaataatcaaatgcaaaaaggtaacaaattcataactggaaagcaaagagaagaacaagtatgatttggatgataaagcattgttttaatggtgaaaacttcacagatcactaatgtttctagaggttaacttcaagtgggcaagctggggtttttaggtagtcagtggcctagttcctaaagccacagtataggatctgttaaactgaatgtctgttgaaagtttgttttagctgcttggaggcttccttttaagacaaactgtatgtgattaagttgttttgagggaactgaagaacctgatgtagcccctggccagataactgcctgatttctcagatattatttctctgggaaacattctacatagcacaggagcttaagagtggcattatcttctcgccttaatttccagagattatttctgtactgagaatcctggaactactatgctaggaaatttaaagctgcatggtctgtcttgttttcatttaattattgtgaatacctagaatctttcttggtcctgatttctcttgcttaatccagtctttatctctaactgccccttatttgatcaccatgtactaggagctctgatagccagctcagctcctaatccttgaggcaacattctttttctatttgaacttcagttctgtccttgaatcccgactagatatttcttgccctctggtctcagaattctcttggcttttattccttgatccacttgccagttttatcactttacccttgttcctcatggcttcccatcaagccatgggtattaggtgacagtgtaatttattagattctggttttgcccaaatactgggcatgctttaataataactgaaccatttcattatttggataggcatgggtaccttatcaagcagattaaaaggatatggtacccgtcctttagaaaagaacagctaaaaccttgttgtggattatggatttagcctaaagaaaaataatctggcataaattaagagtaagagagaagattaatagaaatttcacttcacataacttaaaacatggctatttcaataaaggactaaagtttctcctggatcccagaattcaacctgtatttataaatgtataatgtatttagctactttttggtttaaatgaacttgttgggttagcttggtaaatgttataatttttactattttctacaaagaaaatattttctaatttaagttggagctatctgtgcagcagtttctctacagttgtgcataaatgtttttactataaaatgagctaatgtataaaatactgctgtataccataataaagatagtaatacttga

SEQ ID NO: 421523 - DNA, 4677 bp, Homo sapiens
acctatgctagtacgagctcgtgttatcggccgagtgagaagaccggtcggcctgggcaacctgcgctgaagatgccgggaaaactccgtagtgacgctggtttggaatcagacaccgcaatgaaaaaaggggagacactgcgaaagcaaaccgaggagaaagagaaaaaagagaagccaaaatctgataagactgaagagatagcagaagaggaagaaactgttttccccaaagctaaacaagttaaaaagaaagcagagccttctgaagttgacatgaattctcctaaatccaaaaaggcaaaaaagaaagaggagccatctcaaaatgacatttctcctaaaaccaaaagtttgagaaagaaaaaggagcccattgaaaagaaagtggtttcttctaaaaccaaaaaagtgacaaaaaatgaggagccttctgaggaagaaatagatgctcctaagcccaagaagatgaagaaagaaaaggaaatgaatggagaaactagagagaaaagccccaaactgaagaatggatttcctcatcctgaaccggactgtaaccccagtgaagctgccagtgaagaaagtaacagtgagatagagcaggaaatacctgtggaacaaaaagaaggcgctttctctaattttcccatatctgaagaaactattaaacttctcaaaggccgaggagtgaccttcctatttcctatacaagcaaagacattccatcatgtttacagcgggaaggacttaattgcacaggcacggacaggaactgggaagacattctcctttgccatccctttgattgagaaacttcatggggaactgcaagacaggaagagaggccgtgcccctcaggtactggttcttgcacctacaagagagttggcaaatcaagtaagcaaagacttcagtgacatcacaaaaaagctgtcagtggcttgtttttatggtggaactccctatggaggtcaatttgaacgcatgaggaatgggattgatatcctggttggaacaccaggtcgtatcaaagaccacatacagaatggcaaactagatctcaccaaacttaagcatgttgtcctggatgaagtggaccagatgttggatatgggatttgctgatcaagtggaagagattttaagtgtggcatacaagaaagattctgaagacaatccccaaacattgcttttttctgcaacttgccctcattgggtatttaatgttgccaagaaatacatgaaatctacatatgaacaggtggacctgattggtaaaaagactcagaaaacggcaataactgtggagcatctggctattaagtgccactggactcagagggcagcagttattggggatgtcatccgagtatatagtggtcatcaaggacgcactatcatcttttgtgaaaccaagaaagaagcccaggagctgtcccagaattcagctataaagcaggatgctcagtccttgcatggagacattccacagaagcaaagggaaatcaccctgaaaggttttagaaatggtagttttggagttttggtggcaaccaatgttgctgcacgtgggttagacatccctgaggttgatttggttatacaaagctctccaccaaaggatgtagagtcctacattcatcgatccgggcggacaggcagagctggaaggacgggggtgtgcatctgcttttatcagcacaaggaagaatatcagttagtacaagtggagcaaaaagcgggaattaagttcaaacgaataggtgttccttctgcaacagaaataataaaagcttccagcaaagatgccatcaggcttttggattccgtgcctcccactgccattagtcacttcaaacaatcagctgagaagctgatagaggagaagggagctgtggaagctctggcagcagcactggcccatatttcaggtgccacgtccgtagaccagcgctccttgatcaactcaaatgtgggttttgtgaccatgatcttgcagtgctcaattgaaatgccaaatattagttatgcttggaaagaacttaaagagcagctgggcgaggagattgattccaaagtgaagggaatggtttttctcaaaggaaagctgggtgtttgctttgatgtacctaccgcatcagtaacagaaatacaggagaaatggcatgattcacgacgctggcagctctctgtggccacagagcaaccagaactggaaggaccacgggaaggatatggaggcttcaggggacagcgggaaggcagtcgaggcttcaggggacagcgggacggaaacagaagattcagaggacagcgggaaggcagtagaggcccgagaggacagcgatcaggaggtggcaacaaaagtaacagatcccaaaacaaaggccagaagcggagtttcagtaaagcatttggtcaataattagaaatagaagatttatatagcaaaaagagaatgatgtttggcaatatagaactgaacattatttttcatgcaaagttaaaagcacattgtgcctccttttgaccacttgccaagtccctgtctctttcagacacagacaagcttcatttaaattatttcatctgatcattatcatttataactttattgttacttcatcagtttttccttttgaaaggtgtatgaattcattacatttttattctaatgtattatctgtagattagaagataaaatcaagcatgtatctgcctatactttgtgagttcacctgtctttatactcaaaagtgtcccttaatagtgtccttccctgaaataaatacctaagggagtgtaacagtctctggaggaccactttgagcctttggaagttaaggtttcctcagccacctgccgaacagtttctcatgtggtcctattatttgtctactgagacttaatactgagcaatgttttgaaacaagatttcaaactaatctgggttgtaatacagtttataccagtgtatgctctagacttggaagatgtagtatgtttgatgtggattacctatacttatgttcgttttgatacatttttagcttctcattataaggtgattcatgctttagtgaattcttcatagatagtatatataaaagtacattttaatagaaagccagggttttaaggaatttcacatgtataaggtggctccatagctttatttgtaagtaggctggataaatggtgcttaaatggtaatgtactccacttcttcctattggaagattaacattatttaccaagaaggacttaagggagtaaggggcgcagattagcattgctcaagagtatgtaaaaaaaaaaaaaaaaaaaaagaaccaaaccactggaaataatcaaatgcaaaaaggtaacaaattcataactggaaagcaaagagaagaacaagtatgatttggatgataaagcattgttttaatggtgaaaacttcacagatcactaatgtttctagaggttaacttcaagtgggcaagctggggtttttaggtagtcagtggcctagttcctaaagccacagtataggatctgttaaactgaatgtctgttgaaagtttgttttagctgcttggaggcttccttttaagacaaactgtatgtgattaagttgttttgagggaactgaagaacctgatgtagcccctggccagataactgcctgatttctcagatattatttctctgggaaacattctacatagcacaggagcttaagagtggcattatcttctcgccttaatttccagagattatttctgtactgagaatcctggaactactatgctaggaaatttaaagctgcatggtctgtcttgttttcatttaattattgtgaatacctagaatctttcttggtcctgatttctcttgcttaatccagtctttatctctaactgccccttatttgatcaccatgtactaggagctctgatagccagctcagctcctaatccttgaggcaacattctttttctatttgaacttcagttctgtccttgaatcccgactagatatttcttgccctctggtctcagaattctcttggcttttattccttgatccacttgccagttttatcactttacccttgttcctcatggcttcccatcaagccatgggtattaggtgacagtgtaatttattagattctggttttgcccaaatactgggcatgctttaataataactgaaccatttcattatttggataggcatgggtaccttatcaagcagattaaaaggatatggtacccgtcctttagaaaagaacagctaaaaccttgttgtggattatggatttagcctaaagaaaaataatctggcataaattaagagtaagagagaagattaatagaaatttcacttcacataacttaaaacatggctatttcaataaaggactaaagtttctcctggatcccagaattcaacctgtatttataaatgtataatgtatttagctactttttggtttaaatgaacttgttgggttagcttggtaaatgttataatttttactattttctacaaagaaaatattttctaatttaagttggagctatctgtgcagcagtttctctacagttgtgcataaatgtttttactataaaatgagctaatgtataaaatactgctgtataccataataaagatagtaatacttga

SEQ ID NO: 421524 - DNA, 4207 bp, Homo sapiens
cccgggtgtgaatcggccgaggggagaaactagagagaaaagccccaaactgaagaatggatttcctcatcctgaaccggactgtaaccccagtgaagctgccagtgaagaaagtaacagtgagatagagcaggaaatacctgtggaacaaaaagaaggcgctttctctaattttcccatatctgaagaaactattaaacttctcaaaggccgaggagtgaccttcctatttcctatacaagcaaagacattccatcatgtttacagcgggaaggacttaattgcacaggcacggacaggaactgggaagacattctcctttgccatccctttgattgagaaacttcatggggaactgcaagacaggaagagaggccgtgcccctcaggtactggttcttgcacctacaagagagttggcaaatcaagtaagcaaagacttcagtgacatcacaaaaaagctgtcagtggcttgtttttatggtggaactccctatggaggtcaatttgaacgcatgaggaatgggattgatatcctggttggaacaccaggtcgtatcaaagaccacatacagaatggcaaactagatctcaccaaacttaagcatgttgtcctggatgaagtggaccagatgttggatatgggatttgctgatcaagtggaagagattttaagtgtggcatacaagaaagattctgaagacaatccccaaacattgcttttttctgcaacttgccctcattgggtatttaatgttgccaagaaatacatgaaatctacatatgaacaggtggacctgattggtaaaaagactcagaaaacggcaataactgtggagcatctggctattaagtgccactggactcagagggcagcagttattggggatgtcatccgagtatatagtggtcatcaaggacgcactatcatcttttgtgaaaccaagaaagaagcccaggagctgtcccagaattcagctataaagcaggatgctcagtccttgcatggagacattccacagaagcaaagggaaatcaccctgaaaggttttagaaatggtagttttggagttttggtggcaaccaatgttgctgcacgtgggttagacatccctgaggttgatttggttatacaaagctctccaccaaaggatgtagagtcctacattcatcgatccgggcggacaggcagagctggaaggacgggggtgtgcatctgcttttatcagcacaaggaagaatatcagttagtacaagtggagcaaaaagcgggaattaagttcaaacgaataggtgttccttctgcaacagaaataataaaagcttccagcaaagatgccatcaggcttttggattccgtgcctcccactgccattagtcacttcaaacaatcagctgagaagctgatagaggagaagggagctgtggaagctctggcagcagcactggcccatatttcaggtgccacgtccgtagaccagcgctccttgatcaactcaaatgtgggttttgtgaccatgatcttgcagtgctcaattgaaatgccaaatattagttatgcttggaaagaacttaaagagcagctgggcgaggagattgattccaaagtgaagggaatggtttttctcaaaggaaagctgggtgtttgctttgatgtacctaccgcatcagtaacagaaatacaggagaaatggcatgattcacgacgctggcagctctctgtggccacagagcaaccagaactggaaggaccacgggaaggatatggaggcttcaggggacagcgggaaggcagtcgaggcttcaggggacagcgggacggaaacagaagattcagaggacagcgggaaggcagtagaggcccgagaggacagcgatcaggaggtggcaacaaaagtaacagatcccaaaacaaaggccagaagcggagtttcagtaaagcatttggtcaataattagaaatagaagatttatatagcaaaaagagaatgatgtttggcaatatagaactgaacattatttttcatgcaaagttaaaagcacattgtgcctccttttgaccacttgccaagtccctgtctctttcagacacagacaagcttcatttaaattatttcatctgatcattatcatttataactttattgttacttcatcagtttttccttttgaaaggtgtatgaattcattacatttttattctaatgtattatctgtagattagaagataaaatcaagcatgtatctgcctatactttgtgagttcacctgtctttatactcaaaagtgtcccttaatagtgtccttccctgaaataaatacctaagggagtgtaacagtctctggaggaccactttgagcctttggaagttaaggtttcctcagccacctgccgaacagtttctcatgtggtcctattatttgtctactgagacttaatactgagcaatgttttgaaacaagatttcaaactaatctgggttgtaatacagtttataccagtgtatgctctagacttggaagatgtagtatgtttgatgtggattacctatacttatgttcgttttgatacatttttagcttctcattataaggtgattcatgctttagtgaattcttcatagatagtatatataaaagtacattttaatagaaagccagggttttaaggaatttcacatgtataaggtggctccatagctttatttgtaagtaggctggataaatggtgcttaaatggtaatgtactccacttcttcctattggaagattaacattatttaccaagaaggacttaagggagtaaggggcgcagattagcattgctcaagagtatgtaaaaaaaaaaaaaaaaaaaaagaaccaaaccactggaaataatcaaatgcaaaaaggtaacaaattcataactggaaagcaaagagaagaacaagtatgatttggatgataaagcattgttttaatggtgaaaacttcacagatcactaatgtttctagaggttaacttcaagtgggcaagctggggtttttaggtagtcagtggcctagttcctaaagccacagtataggatctgttaaactgaatgtctgttgaaagtttgttttagctgcttggaggcttccttttaagacaaactgtatgtgattaagttgttttgagggaactgaagaacctgatgtagcccctggccagataactgcctgatttctcagatattatttctctgggaaacattctacatagcacaggagcttaagagtggcattatcttctcgccttaatttccagagattatttctgtactgagaatcctggaactactatgctaggaaatttaaagctgcatggtctgtcttgttttcatttaattattgtgaatacctagaatctttcttggtcctgatttctcttgcttaatccagtctttatctctaactgccccttatttgatcaccatgtactaggagctctgatagccagctcagctcctaatccttgaggcaacattctttttctatttgaacttcagttctgtccttgaatcccgactagatatttcttgccctctggtctcagaattctcttggcttttattccttgatccacttgccagttttatcactttacccttgttcctcatggcttcccatcaagccatgggtattaggtgacagtgtaatttattagattctggttttgcccaaatactgggcatgctttaataataactgaaccatttcattatttggataggcatgggtaccttatcaagcagattaaaaggatatggtacccgtcctttagaaaagaacagctaaaaccttgttgtggattatggatttagcctaaagaaaaataatctggcataaattaagagtaagagagaagattaatagaaatttcacttcacataacttaaaacatggctatttcaataaaggactaaagtttctcctggatcccagaattcaacctgtatttataaatgtataatgtatttagctactttttggtttaaatgaacttgttgggttagcttggtaaatgttataatttttactattttctacaaagaaaatattttctaatttaagttggagctatctgtgcagcagtttctctacagttgtgcataaatgtttttactataaaatgagctaatgtataaaatactgctgtataccataataaagatagtaatacttga

SEQ ID NO: 421525 - DNA, 4623 bp, Homo sapiens
agtgacgagagccgggtggacccagggtggggaactacctcttcctctccacgcggttgagaagaccggtcggcctgggcaacctgcgctgaagatgccgggaaaactccgtagtgacgctggtttggaatcagacaccgcaatgaaaaaaggggagacactgcgaaagcaaaccgaggagaaagagaaaaaagagaagccaaaatctgataagactgaagagatagcagaagaggaagaaactgttttccccaaagctaaacaagttaaaaagaaagcagagccttctgaagttgacatgaattctcctaaatccaaaaaggcaaaaaagaaagaggagccatctcaaaatgacatttctcctaaaaccaaaagtttgagaaagaaaaaggagcccattgaaaagaaagtggtttcttctaaaaccaaaaaagtgacaaaaaatgaggagccttctgaggaagaaatagatgctcctaagcccaagaagatgaagaaagaaaaggaaatgaatggagaaactagagagaaaagccccaaactgaagaatggatttcctcatcctgaaccggactgtaaccccagtgaagctgccagtgaagaaagtaacagtgagatagagcaggccgaggagtgaccttcctatttcctatacaagcaaagacattccatcatgtttacagcgggaaggacttaattgcacaggcacggacaggaactgggaagacattctcctttgccatccctttgattgagaaacttcatggggaactgcaagacaggaagagaggccgtgcccctcaggtactggttcttgcacctacaagagagttggcaaatcaagtaagcaaagacttcagtgacatcacaaaaaagctgtcagtggcttgtttttatggtggaactccctatggaggtcaatttgaacgcatgaggaatgggattgatatcctggttggaacaccaggtcgtatcaaagaccacatacagaatggcaaactagatctcaccaaacttaagcatgttgtcctggatgaagtggaccagatgttggatatgggatttgctgatcaagtggaagagattttaagtgtggcatacaagaaagattctgaagacaatccccaaacattgcttttttctgcaacttgccctcattgggtatttaatgttgccaagaaatacatgaaatctacatatgaacaggtggacctgattggtaaaaagactcagaaaacggcaataactgtggagcatctggctattaagtgccactggactcagagggcagcagttattggggatgtcatccgagtatatagtggtcatcaaggacgcactatcatcttttgtgaaaccaagaaagaagcccaggagctgtcccagaattcagctataaagcaggatgctcagtccttgcatggagacattccacagaagcaaagggaaatcaccctgaaaggttttagaaatggtagttttggagttttggtggcaaccaatgttgctgcacgtgggttagacatccctgaggttgatttggttatacaaagctctccaccaaaggatgtagagtcctacattcatcgatccgggcggacaggcagagctggaaggacgggggtgtgcatctgcttttatcagcacaaggaagaatatcagttagtacaagtggagcaaaaagcgggaattaagttcaaacgaataggtgttccttctgcaacagaaataataaaagcttccagcaaagatgccatcaggcttttggattccgtgcctcccactgccattagtcacttcaaacaatcagctgagaagctgatagaggagaagggagctgtggaagctctggcagcagcactggcccatatttcaggtgccacgtccgtagaccagcgctccttgatcaactcaaatgtgggttttgtgaccatgatcttgcagtgctcaattgaaatgccaaatattagttatgcttggaaagaacttaaagagcagctgggcgaggagattgattccaaagtgaagggaatggtttttctcaaaggaaagctgggtgtttgctttgatgtacctaccgcatcagtaacagaaatacaggagaaatggcatgattcacgacgctggcagctctctgtggccacagagcaaccagaactggaaggaccacgggaaggatatggaggcttcaggggacagcgggaaggcagtcgaggcttcaggggacagcgggacggaaacagaagattcagaggacagcgggaaggcagtagaggcccgagaggacagcgatcaggaggtggcaacaaaagtaacagatcccaaaacaaaggccagaagcggagtttcagtaaagcatttggtcaataattagaaatagaagatttatatagcaaaaagagaatgatgtttggcaatatagaactgaacattatttttcatgcaaagttaaaagcacattgtgcctccttttgaccacttgccaagtccctgtctctttcagacacagacaagcttcatttaaattatttcatctgatcattatcatttataactttattgttacttcatcagtttttccttttgaaaggtgtatgaattcattacatttttattctaatgtattatctgtagattagaagataaaatcaagcatgtatctgcctatactttgtgagttcacctgtctttatactcaaaagtgtcccttaatagtgtccttccctgaaataaatacctaagggagtgtaacagtctctggaggaccactttgagcctttggaagttaaggtttcctcagccacctgccgaacagtttctcatgtggtcctattatttgtctactgagacttaatactgagcaatgttttgaaacaagatttcaaactaatctgggttgtaatacagtttataccagtgtatgctctagacttggaagatgtagtatgtttgatgtggattacctatacttatgttcgttttgatacatttttagcttctcattataaggtgattcatgctttagtgaattcttcatagatagtatatataaaagtacattttaatagaaagccagggttttaaggaatttcacatgtataaggtggctccatagctttatttgtaagtaggctggataaatggtgcttaaatggtaatgtactccacttcttcctattggaagattaacattatttaccaagaaggacttaagggagtaaggggcgcagattagcattgctcaagagtatgtaaaaaaaaaaaaaaaaaaaaagaaccaaaccactggaaataatcaaatgcaaaaaggtaacaaattcataactggaaagcaaagagaagaacaagtatgatttggatgataaagcattgttttaatggtgaaaacttcacagatcactaatgtttctagaggttaacttcaagtgggcaagctggggtttttaggtagtcagtggcctagttcctaaagccacagtataggatctgttaaactgaatgtctgttgaaagtttgttttagctgcttggaggcttccttttaagacaaactgtatgtgattaagttgttttgagggaactgaagaacctgatgtagcccctggccagataactgcctgatttctcagatattatttctctgggaaacattctacatagcacaggagcttaagagtggcattatcttctcgccttaatttccagagattatttctgtactgagaatcctggaactactatgctaggaaatttaaagctgcatggtctgtcttgttttcatttaattattgtgaatacctagaatctttcttggtcctgatttctcttgcttaatccagtctttatctctaactgccccttatttgatcaccatgtactaggagctctgatagccagctcagctcctaatccttgaggcaacattctttttctatttgaacttcagttctgtccttgaatcccgactagatatttcttgccctctggtctcagaattctcttggcttttattccttgatccacttgccagttttatcactttacccttgttcctcatggcttcccatcaagccatgggtattaggtgacagtgtaatttattagattctggttttgcccaaatactgggcatgctttaataataactgaaccatttcattatttggataggcatgggtaccttatcaagcagattaaaaggatatggtacccgtcctttagaaaagaacagctaaaaccttgttgtggattatggatttagcctaaagaaaaataatctggcataaattaagagtaagagagaagattaatagaaatttcacttcacataacttaaaacatggctatttcaataaaggactaaagtttctcctggatcccagaattcaacctgtatttataaatgtataatgtatttagctactttttggtttaaatgaacttgttgggttagcttggtaaatgttataatttttactattttctacaaagaaaatattttctaatttaagttggagctatctgtgcagcagtttctctacagttgtgcataaatgtttttactataaaatgagctaatgtataaaatactgctgtataccataataaagatagtaatacttga

SEQ ID NO: 421526 - DNA, 3604 bp, Homo sapiens
taggtcgaggccccgtgtaaatcggcagatgttggatatgggatttgctgatcaagtggaagagattttaagtgtggcatacaagaaagattctgaagacaatccccaaacattgcttttttctgcaacttgccctcattgggtatttaatgttgccaagaaatacatgaaatctacatatgaacaggtggacctgattggtaaaaagactcagaaaacggcaataactgtggagcatctggctattaagtgccactggactcagagggcagcagttattggggatgtcatccgagtatatagtggtcatcaaggacgcactatcatcttttgtgaaaccaagaaagaagcccaggagctgtcccagaattcagctataaagcaggatgctcagtccttgcatggagacattccacagaagcaaagggaaatcaccctgaaaggttttagaaatggtagttttggagttttggtggcaaccaatgttgctgcacgtgggttagacatccctgaggttgatttggttatacaaagctctccaccaaaggatgtagagtcctacattcatcgatccgggcggacaggcagagctggaaggacgggggtgtgcatctgcttttatcagcacaaggaagaatatcagttagtacaagtggagcaaaaagcgggaattaagttcaaacgaataggtgttccttctgcaacagaaataataaaagcttccagcaaagatgccatcaggcttttggattccgtgcctcccactgccattagtcacttcaaacaatcagctgagaagctgatagaggagaagggagctgtggaagctctggcagcagcactggcccatatttcaggtgccacgtccgtagaccagcgctccttgatcaactcaaatgtgggttttgtgaccatgatcttgcagtgctcaattgaaatgccaaatattagttatgcttggaaagaacttaaagagcagctgggcgaggagattgattccaaagtgaagggaatggtttttctcaaaggaaagctgggtgtttgctttgatgtacctaccgcatcagtaacagaaatacaggagaaatggcatgattcacgacgctggcagctctctgtggccacagagcaaccagaactggaaggaccacgggaaggatatggaggcttcaggggacagcgggaaggcagtcgaggcttcaggggacagcgggacggaaacagaagattcagaggacagcgggaaggcagtagaggcccgagaggacagcgatcaggaggtggcaacaaaagtaacagatcccaaaacaaaggccagaagcggagtttcagtaaagcatttggtcaataattagaaatagaagatttatatagcaaaaagagaatgatgtttggcaatatagaactgaacattatttttcatgcaaagttaaaagcacattgtgcctccttttgaccacttgccaagtccctgtctctttcagacacagacaagcttcatttaaattatttcatctgatcattatcatttataactttattgttacttcatcagtttttccttttgaaaggtgtatgaattcattacatttttattctaatgtattatctgtagattagaagataaaatcaagcatgtatctgcctatactttgtgagttcacctgtctttatactcaaaagtgtcccttaatagtgtccttccctgaaataaatacctaagggagtgtaacagtctctggaggaccactttgagcctttggaagttaaggtttcctcagccacctgccgaacagtttctcatgtggtcctattatttgtctactgagacttaatactgagcaatgttttgaaacaagatttcaaactaatctgggttgtaatacagtttataccagtgtatgctctagacttggaagatgtagtatgtttgatgtggattacctatacttatgttcgttttgatacatttttagcttctcattataaggtgattcatgctttagtgaattcttcatagatagtatatataaaagtacattttaatagaaagccagggttttaaggaatttcacatgtataaggtggctccatagctttatttgtaagtaggctggataaatggtgcttaaatggtaatgtactccacttcttcctattggaagattaacattatttaccaagaaggacttaagggagtaaggggcgcagattagcattgctcaagagtatgtaaaaaaaaaaaaaaaaaaaaagaaccaaaccactggaaataatcaaatgcaaaaaggtaacaaattcataactggaaagcaaagagaagaacaagtatgatttggatgataaagcattgttttaatggtgaaaacttcacagatcactaatgtttctagaggttaacttcaagtgggcaagctggggtttttaggtagtcagtggcctagttcctaaagccacagtataggatctgttaaactgaatgtctgttgaaagtttgttttagctgcttggaggcttccttttaagacaaactgtatgtgattaagttgttttgagggaactgaagaacctgatgtagcccctggccagataactgcctgatttctcagatattatttctctgggaaacattctacatagcacaggagcttaagagtggcattatcttctcgccttaatttccagagattatttctgtactgagaatcctggaactactatgctaggaaatttaaagctgcatggtctgtcttgttttcatttaattattgtgaatacctagaatctttcttggtcctgatttctcttgcttaatccagtctttatctctaactgccccttatttgatcaccatgtactaggagctctgatagccagctcagctcctaatccttgaggcaacattctttttctatttgaacttcagttctgtccttgaatcccgactagatatttcttgccctctggtctcagaattctcttggcttttattccttgatccacttgccagttttatcactttacccttgttcctcatggcttcccatcaagccatgggtattaggtgacagtgtaatttattagattctggttttgcccaaatactgggcatgctttaataataactgaaccatttcattatttggataggcatgggtaccttatcaagcagattaaaaggatatggtacccgtcctttagaaaagaacagctaaaaccttgttgtggattatggatttagcctaaagaaaaataatctggcataaattaagagtaagagagaagattaatagaaatttcacttcacataacttaaaacatggctatttcaataaaggactaaagtttctcctggatcccagaattcaacctgtatttataaatgtataatgtatttagctactttttggtttaaatgaacttgttgggttagcttggtaaatgttataatttttactattttctacaaagaaaatattttctaatttaagttggagctatctgtgcagcagtttctctacagttgtgcataaatgtttttactataaaatgagctaatgtataaaatactgctgtataccataataaagatagtaatacttga

SEQ ID NO: 421527 - DNA, 2556 bp, Homo sapiens
agtgacgagagccgggtggacccagggtggggaactacctcttcctctccacgcggttgagaagaccggtcggcctgggcaacctgcgctgaagatgccgggaaaactccgtagtgacgctggtttggaatcagacaccgcaatgaaaaaaggggagacactgcgaaagcaaaccgaggagaaagagaaaaaagagaagccaaaatctgataagactgaagagatagcagaagaggaagaaactgttttccccaaagctaaacaagttaaaaagaaagcagagccttctgaagttgacatgaattctcctaaatccaaaaaggcaaaaaagaaagaggagccatctcaaaatgacatttctcctaaaaccaaaagtttgagaaagaaaaaggagcccattgaaaagaaagtggtttcttctaaaaccaaaaaagtgacaaaaaatgaggagccttctgaggaagaaatagatgctcctaagcccaagaagatgaagaaagaaaaggaaatgaatggagaaactagagagaaaagccccaaactgaagaatggatttcctcatcctgaaccggactgtaaccccagtgaagctgccagtgaagaaagtaacagtgagatagagcaggaaatacctgtggaacaaaaagaaggcgctttctctaattttcccatatctgaagaaactattaaacttctcaaaggccgaggagtgaccttcctatttcctatacaagcaaagacattccatcatgtttacagcgggaaggacttaattgcacaggcacggacaggaactgggaagacattctcctttgccatccctttgattgagaaacttcatggggaactgcaagacaggaagagaggccgtgcccctcaggtactggttcttgcacctacaagagagttggcaaatcaagtaagcaaagacttcagtgacatcacaaaaaagctgtcagtggcttgtttttatggtggaactccctatggaggtcaatttgaacgcatgaggaatgggattgatatcctggttggaacaccaggtcgtatcaaagaccacatacagaatggcaaactagatctcaccaaacttaagcatgttgtcctggatgaagtggaccagatgttggatatgggatttgctgatcaagtggaagagattttaagtgtggcatacaagaaagattctgaagacaatccccaaacattgcttttttctgcaacttgccctcattgggtatttaatgttgccaagaaatacatgaaatctacatatgaacaggtggacctgattggtaaaaagactcagaaaacggcaataactgtggagcatctggctattaagtgccactggactcagagggcagcagttattggggatgtcatccgagtatatagtggtcatcaaggacgcactatcatcttttgtgaaaccaagaaagaagcccaggagctgtcccagaattcagctataaagcaggatgctcagtccttgcatggagacattccacagaagcaaagggaaatcaccctgaaaggttttagaaatggtagttttggagttttggtggcaaccaatgttgctgcacgtgggttagacatccctgaggttgatttggttatacaaagctctccaccaaaggatgtagagtcctacattcatcgatccgggcggacaggcagagctggaaggacgggggtgtgcatctgcttttatcagcacaaggaagaatatcagttagtacaagtggagcaaaaagcgggaattaagttcaaacgaataggtgttccttctgcaacagaaataataaaagcttccagcaaagatgccatcaggcttttggattccgtgcctcccactgccattagtcacttcaaacaatcagctgagaagctgatagaggagaagggagctgtggaagctctggcagcagcactggcccatatttcaggtgccacgtccgtagaccagcgctccttgatcaactcaaatgtgggttttgtgaccatgatcttgcagtgctcaattgaaatgccaaatattagttatgcttggaaagaacttaaagagcagctgggcgaggagattgattccaaagtgaagggaatggtttttctcaaaggaaagctgggtgtttgctttgatgtacctaccgcatcagtaacagaaatacaggagaaatggcatgattcacgacgctggcagctctctgtggccacagagcaaccagaactggaaggaccacgggaaggatatggaggcttcaggggacagcgggaaggcagtcgaggcttcaggggacagcgggacggaaacagaagattcagaggacagcgggaaggcagtagaggcccgagaggacagcgatcaggaggtggcaacaaaagtaacagatcccaaaacaaaggccacatacagattggcaaactaggatctcaccaaacttaagcatgttgtcctggatgaggtggcccagatgttggatatgggtttcgctgatcaagtagagagatttcacgtgtcgcatacacgcacgttctgagacactcccaacc

SEQ ID NO: 421528 - DNA, 1465 bp, Homo sapiens
agtgacgagagccgggtggacccagggtggggaactacctcttcctctccacgcggttgagaagaccggtcggcctgggcaacctgcgctgaagatgccgggaaaactccgtagtgacgctggtttggaatcagacaccgcaatgaaaaaaggggagacactgcgaaagcaaaccgaggagaaagagaaaaaagagaagccaaaatctgataagactgaagagatagcagaagaggaagaaactgttttccccaaagctaaacaagttaaaaagaaagcagagccttctgaagttgacatgaattctcctaaatccaaaaaggcaaaaaagaaagaggagccatctcaaaatgacatttctcctaaaaccaaaagtttgagaaagaaaaaggagcccattgaaaagaaagtggtttcttctaaaaccaaaaaagtgacaaaaaatgaggagccttctgaggaagaaatagatgctcctaagcccaagaagatgaagaaagaaaaggaaatgaatggagaaactagagagaaaagccccaaactgaagaatggatttcctcatcctgaaccggactgtaaccccagtgaagctgccagtgaagaaagtaacagtgagatagagcaggaaatacctgtggaacaaaaagaaggcgctttctctaattttcccatatctgaagaaactattaaacttctcaaaggccgaggagtgaccttcctatttcctatacaagcaaagacattccatcatgtttacagcgggaaggacttaattgcacaggcacggacaggaactgggaagacattctcctttgccatccctttgattgagaaacttcatggggaactgcaagacaggaagagaggccgtgcccctcaggtactggttcttgcacctacaagagagttggcaaatcaagtaagcaaagacttcagtgacatcacaaaaaagctgtcagtggcttgtttttatggtggaactccctatggaggtcaatttgaacgcatgaggaatgggattgatatcctggttggaacaccaggtcgtatcaaagaccacatacagaatggcaaactagatctcaccaaacttaagcatgttgtcctggatgaagtggaccagatgttggatatgggatttgctgatcaagtggaagagattttaagtgtggcatacaagaaagtggtctttgatacgacctggtgttccaaccaggatatcaatcccattcctcatgcgttcaaattgacctccatagggagttccaccataaaaacaagccacctgacagcttttttgtgatgtcacctgaagtctttgcttacttgatttgccaactctcttgtaggttgcaagaaccagtacctgaggggcacggcctctcttcctgtcttgcagttccccatgaagtttctcaatcaaagggatggcaaaggagaatgtcttcccagttcctgtccgtgc

SEQ ID NO: 421529 - DNA, 744 bp, Homo sapiens
ccaaatcacagcaatctggctcggttcttctgaggtctgatctctaatgttgcattcaataattctcatcaaaattgtaattactgaacatgtttaatccacaaaagacttaataacacagagagatgggtcttcagatatagctatagcttgtatgagcttgaatcctcttattatatatatgtttcttgagagattagcagcttgctctgtttcacagagctagataatggggctggccattagttctgctgcccaatatttaaaaccatagaacatccttcccttctcatggtgtcctttcaggcctgagatgtggtggttctgagattgagctttgcaattggcctcttcatcacagttgactgtttggtctcctcagagattaatgaatgttgagggactttgagaatgcagatagatttaattaggacaaaggatttttaaaggtacaggcattttgggcaaagctttagcaaggaggggaaagcagtttagctctcctgtctcaaaagattacattgccagtacgtgtctgttgatgaccagcagctataaatcaggtatgtaatttcttttgttctttcctcaggtccagttgagtcacaagagaagcctgtcttgatatatcatctcagaaactttcctgaatatgtgataatatatggaaaatgatttatagatccagctgtgcttaagagccagtaatgtcttaataaacatgtggcagcttttgtttgaaaa

SEQ ID NO: 421530 - DNA, 1657 bp, Homo sapiens
agatggttgtagatatgcagcattatttctgaggcctctgttctgttccattggtctatatctctgttttggtaccagtaccctgctgttttggttactgtagccttgtagtatagtttgaagtcaggtagcatgatgcctccagctttgttcttttggcttaggattgacttggctatgcgggctcttttttggttccatatgaactttaaagtagttttttccaattctgtgaagaaagtcattggtagcttgatggggatggcattgaatctataaataaccttgggcagtactttgggtaattttctaccataaaatgtcactagcaggaaacttcacctggggaatatatatattttttggaaagcactattttgagaatgtcaaattgagaaaaagccactttaataatatttccactttcttcgtgccttatgtttagattagcttttgctgatttaataattcagtttactccactagatttaattgatttctttttaaaaggtgtttctttccctgtagctgtaagctgtaaataagggtgttaaccacaaagataaccaaaacttatatgcgctgtccaggttcttttctgtacccaacatacttggctataaaacaggaacaaacaaaacctaattgcatcattgctagaagatataggtgacaaggtggatctttagggagaactaaagagctttcagtagaaaacttgtgatgtaaatcacagccctcttgccttgctccttgtgttggtagtgaatgctacatagaaccctgtgtttatgtttgtatgctttagggaattcctgctttcaaaacggactaaaatctggagtgaagaaaaggaggaatgtaaattggttttgaggaaatagttgtgaaaggagaatataccagacaataatgtggtttacagttctacttactttgaaaggaaaacaggttataccaggataatttcatcagtctcatttcagatcagatttggagtggttctgtttcagtttgtattttataaaaggatgcagattcttattgcacttagaattttcttccaaatcctttggtatttttataagtgaaatttttttttctctaagacccaaaggccattagattttccaccagagcattgctctttagaatgacactgtttctagctataccagtgactggaattgactgatgacatttttattgtttatgtctgatccaggtatttcatagaccccccatgtgaaactttggagtaagcctactcatgttacctaaaatctgaggcgttcagatcctccagaatgtcagattgaggagtctgaacctaactgcctggtgtgaatgattgtgattacatatttttcccactaaaatcttcctaagtgcccttctgtgatctaattgaaaacactgtgggtaattacaaagttgttcagatgacttattttttacttttccaggttgcaccattactcagacttctaaagagactatttgaagtccagttgagtcacaagagaagcctgtcttgatatatcatctcagaaactttcctgaatatgtgataatatatggaaaatgatttatagatccagctgtgcttaagagccagtaatgtcttaataaacatgtggcagcttttgtttgaaaa

SEQ ID NO: 421531 - DNA, 1640 bp, Homo sapiens
ggcctgggcgcatgcgcagcgaggttccacgtgagcgcctgcgtttctcctcaaacctaacgatgccgccggagcggaggagctggtcttcggcgacgtcgagaacgacgaggacgcgttgctgcggcgtctgcgaggcccgagggttcaagaacatgaagactcgggtgactcagaagtggagaatgaagcaaaaggtaattttccacctcaaaagaagccagtttgggtggatgaagaagatgaagatgaggaaatggttgacatgatgaacaatcggtttcggaaggatatgatgaaaaatgctagtgaaagtaaactttcgaaagacaaccttaaaaagagacttaaagaagaattccaacatgccatgggaggagtacctgcctgggcagagactactaagcggaaaacatcttcagatgatgaaagtgaagaggatgaagatgatttgttgcaaaggactgggaatttcatatccacatcaacttctcttccaagaggaatcttgaagatgaagaactgccagcatgcgaatgctgaacgtcctactgttgctcggatctcatctgtgcagttccatcccggtgcacagattgtgatggttgctggattagataatgctgtatcactatttcaggttgatgggaaaacaaatcctaaaattcagagcatctatttggaaaggtttccaatctttaaggcttgttttagtgctaatggggaagaagttttagccacgagtacccacagcaaggttctttatgtctatgacatgctggctggaaagttaattcctgtgcatcaagtgagaggtttgaaagagaagatagtgaggagctttgaagtctccccagatgggtccttcttgctcataaatggcattgctggatatttgcatttgctagcaatgaagaccaaagaactgattggaagcatgaaaattaatggaagggttgcagcatccacattctcttcagatagtaagaaagtatacgcctcttcgggggatggagaagtttatgtttgggatgtgaactcaaggaagtgccttaacagatttgttgatgaaggcagtttatatggattaagcattgccacatctaggaatggacagtatgttgcttgtggttctaattgtggagtggtaaatatatacaatcaagattcttgtctccaagaaacaaacccaaagccaataaaagctataatgaacttggttacaggtgttacttctctgaccttcaatcctactacagaaatcttggcaattgcttcagaaaaaatgaaagaagcagtcagattggttcatcttccttcctgtacagtattttcaaacttcccagtcattaaaaataagaatatttctcatgttcataccatggatttttctccgagaagtggatactttgccttggggaatgaaaagggcaaggccctgatgtataggttgcaccattactcagacttctaaagagactatttgaagtccagttgagtcacaagagaagcctgtcttgatatatcatctcagaaactttcctgaatatgtgataatatatggaaaatgatttatagatccagctgtgcttaagagccagtaatgtcttaataaacatgtggcagcttttgtttgaaaa

SEQ ID NO: 421532 - DNA, 626 bp, Homo sapiens
ggcctgggcgcatgcgcagcgaggttccacgtgagcgcctgcgtttctcctcaaacctaacgatgccgccggagcggaggagacgaatgaaactggaccggagaaccggagcgaagccgaagcggaagcccggaatgaggccggactggaaagccggagcggggccaggcgggcctccccaaaagcctgccccttcatcccagcggaaaccgccggcccggccgagcgcggcggccgctgcgattgcagtcgcggcggcggaggaagagagacggctccggcagcggaaccgcctgaggctggaggaggacaaaccggccgtggagcggtgcttgggagggaagcttggggttccttcgggcgacggtcgaagaaacgaacgaaggaaacgcggttgcctgcgggcgttcttgtcgaaggggccccgaagcgggttcaagggaaaccaaatgcaaaggaaacttctagggcaggttggaaacctttcccagcggaaacaaggttttggggggaaaccgggcaaaacattttggagacacagggcccgaaatatgtaagacaaaggggcggcgttcaaaaactttcttattttccccgcgagacgccctttccaaggaaagcatagg

SEQ ID NO: 421533 - DNA, 880 bp, Homo sapiens
  misc_feature (50)..(50): n is a, c, g, or t
  misc_feature (66)..(66): n is a, c, g, or t
  misc_feature (72)..(72): n is a, c, g, or t
  misc_feature (77)..(77): n is a, c, g, or t
tatcctacataacattcagaaaaccaacttaaaaaacacaacaaaaaganggctggagtgtcgacntgccanatagnctgatattttcaaacttcccagtcattaaaaataagaatatttctcatgttcataccatggatttttctccgagaagtggatactttgccttggggaatgaaaagggcaaggccctgatgtataggttgcaccattactcagacttctaaagagactatttgaagtccagttgagtcacaagagaagcctgtcttgatatatcatctcagaaactttcctgaatatgtgataatatatggaaaatgatttatagatccagctgtgcttaagagccagtaatgtcttaataaacatgtggcagcttttgtttgaaaaaaaaaaaacaaaacaataaaaaaacacaaagaaagaaaatatcgcttattaaactacaactaaaaaaaaaatctacggtcatacaactggaacaccgatcccggctctctgtcatacttctcgaagacccttttaattcggagtaattaatagtcgactaaatcactatcctccctctatacgaacactccctccacgcccgaatccatcatgttccacgtaccaccccctactaacggcgtaaaaacaaactgtcaaacaccgaatcctgccatctcactaaataagcactgaccactacgcgcccaaaccctccggcacgatcgcaggcgcgacacctcttctacatattacctatactcacgaccacatatcacataaacatttcttgtgtaattcccccggctgattagtctcctccaactacaaaaccaacgagtatatcccttcctgcgcagtcaccccagcatgaatcgcttacttgccc

SEQ ID NO: 421534 - DNA, 1340 bp, Homo sapiens
ggtgactctacaggatcccggctatcacattatccttaaaaagagacttaaagaagaattccaacatgccatgggaggagtacctgcctgggcagagactactaagcggaaaacatcttcagatgatgaaagtgaagaggatgaagatgatttgttgcaaaggactgggaatttcatatccacatcaacttctcttccaagaggaatcttgaagatgaagaactgccagcatgcgaatgctgaacgtcctactgttgctcggatctcatctgtgcagttccatcccggtgcacagattgtgatggttgctggattagataatgctgtatcactatttcaggttgatgggaaaacaaatcctaaaattcagagcatctatttggaaaggtttccaatctttaaggcttgttttagtgctaatggggaagaagttttagccacgagtacccacagcaaggttctttatgtctatgacatgctggctggaaagttaattcctgtgcatcaagtgagaggtttgaaagagaagatagtgaggagctttgaagtctccccagatgggtccttcttgctcataaatggcattgctggatatttgcatttgctagcaatgaagaccaaagaactgattggaagcatgaaaattaatggaagggttgcagcatccacattctcttcagatagtaagaaagtatacgcctcttcgggggatggagaagtttatgtttgggatgtgaactcaaggaagtgccttaacagatttgttgatgaaggcagtttatatggattaagcattgccacatctaggaatggacagtatgttgcttgtggttctaattgtggagtggtaaatatatacaatcaagattcttgtctccaagaaacaaacccaaagccaataaaagctataatgaacttggttacaggtgttacttctctgaccttcaatcctactacagaaatcttggcaattgcttcagaaaaaatgaaagaagcagtcagattggttcatcttccttcctgtacagtattttcaaacttcccagtcattaaaaataagaatatttctcatgttcataccatggatttttctccgagaagtggatactttgccttggggaatgaaaagggcaaggccctgatgtataggttgcaccattactcagacttctaaagagactatttgaagtccagttgagtcacaagagaagcctgtcttgatatatcatctcagaaactttcctgaatatgtgataatatatggaaaatgatttatagatccagctgtgcttaagagccagtaatgtcttaataaacatgtggcagcttttgtttgaaaa

SEQ ID NO: 421535 - DNA, 1980 bp, Homo sapiens
  misc_feature (1928)..(1928): n is a, c, g, or t
ggcctgggcgcatgcgcagcgaggttccacgtgagcgcctgcgtttctcctcaaacctaacgatgccgccggagcggaggagacgaatgaaactggaccggagaaccggagcgaagccgaagcggaagcccggaatgaggccggactggaaagccggagcggggccaggcgggcctccccaaaagcctgccccttcatcccagcggaaaccgccggcccggccgagcgcggcggccgctgcgattgcagtcgcggcggcggaggaagagagacggctccggcagcggaaccgcctgaggctggaggaggacaaaccggccgtggagcggtgcttggaggagctggtcttcggcgacgtcgagaacgacgaggacgcgttgctgcggcgtctgcgaggcccgagggttcaagaacatgaagactcgggtgactcagaagtggagaatgaagcaaaaggtaattttccacctcaaaagaagccagtttgggtggatgaagaagatgaagatgaggaaatggttgacatgatgaacaatcggtttcggaaggatatgatgaaaaatgctagtgaaagtaaactttcgaaagacaaccttaaaaagagacttaaagaagaattccaacatgccatgggaggagtacctgcctgggcagagactactaagcggaaaacatcttcagatgatgaaagtgaagaggatgaagatgatttgttgcaaaggactgggaatttcatatccacatcaacttctcttccaagaggaatcttgaagatgaagaactgccagcatgcgaatgctgaacgtcctactgttgctcggatctcatctgtgcagttccatcccggtgcacagattgtgatggttgctggattagataatgctgtatcactatttcaggttgatgggaaaacaaatcctaaaattcagagcatctatttggaaaggtttccaatctttaaggcttgttttagtgctaatggggaagaagttttagccacgagtacccacagcaaggttctttatgtctatgacatgctggctggaaagttaattcctgtgcatcaagtgagaggtttgaaagagaagatagtgaggagctttgaagtctccccagatgggtccttcttgctcataaatggcattgctggatatttgcatttgctagcaatgaagaccaaagaactgattggaagcatgaaaattaatggaagggttgcagcatccacattctcttcagatagtaagaaagtatacgcctcttcgggggatggagaagtttatgtttgggatgtgaactcaaggaagtgccttaacagatttgttgatgaaggcagtttatatggattaagcattgccacatctaggaatggacagtatgttgcttgtggttctaattgtggagtggtaaatatatacaatcaagattcttgtctccaagaaacaaacccaaagccaataaaagctataatgaacttggttacaggtgttacttctctgaccttcaatcctactacagaaatcttggcaattgcttcagaaaaaatgaaagaagcagtcagattggttcatcttccttcctgtacagtattttcaaacttcccagtcattaaaaataagaatatttctcatgttcataccatggatttttctccgagaagtggatactttgccttggggaatgaaaagggcaaggccctgatgtataggtgtttggtggccatacccgactctaagagctattgagtcagtgagtccagagagcggcgtgaatcacccaaactcccgattggtacccgccagattcaccgcgggctaaaccgaggtacaaccggcgtggtgacaaaaacatgcaacacaaacagcgggagcaccaggataacggccaggaaagccctacccggaggcgagatgaggcacaatcacagngaagaggaccacgagaacggacacaacagcacacgaaccggaggagcgaccg

SEQ ID NO: 421536 - DNA, 1363 bp, Homo sapiens
ggcctgggcgcatgcgcagcgaggttccacgtgagcgcctgcgtttctcctcaaacctaacgatgccgccggagcggaggagacgaatgaaactggaccggagaaccggagcgaagccgaagcggaagcccggaatgaggccggactggaaagccggagcggggccaggcgggcctccccaaaagcctgccccttcatcccagcggaaaccgccggcccggccgagcgcggcggccgctgcgattgcagtcgcggcggcggaggaagagagacggctccggcagcggaaccgcctgaggctggaggaggacaaaccggccgtggagcggtgcttggaggagctggtcttcggcgacgtcgagaacgacgaggacgcgttgctgcggcgtctgcgaggcccgagggttcaagaacatgaagactcgggtgactcagaagtggagaatgaagcaaaaggtaattttccacctcaaaagaagccagtttgggtggatgaagaagatgaagatgaggaaatatgaagaactgccagcatgcgaatgctgaacgtcctactgttgctcggatctcatctgtgcagttccatcccggtgcacagattgtgatggttgtggatatttgcatttgctagcaatgaagaccaaagaactgattggaagcatgaaaattaatggaagggttgcagcatccacattctcttcagatagtaagaaagtatacgcctcttcgggggatggagaagtttatgtttgggatgtgaactcaaggaagtgccttaacagatttgttgatgaaggcagtttatatggattaagcattgccacatctaggaatggacagtatgttgcttgtggttctaattgtggagtggtaaatatatacaatcaagattcttgtctccaagaaacaaacccaaagccaataaaagctataatgaacttggttacaggtgttacttctctgaccttcaatcctactacagaaatcttggcaattgcttcagaaaaaatgaaagaagcagtcagattggttcatcttccttcctgtacagtattttcaaacttcccagtcattaaaaataagaatatttctcatgttcataccatggatttttctccgagaagtggatactttgccttggggaatgaaaagggcaaggccctgatgtataggttgcaccattactcagacttctaaagagactatttgaagtccagttgagtcacaagagaagcctgtcttgatatatcatctcagaaactttcctgaatatgtgataatatatggaaaatgatttatagatccagctgtgcttaagagccagtaatgtcttaataaacatgtggcagcttttgtttgaaaa

SEQ ID NO: 421537 - DNA, 1800 bp, Homo sapiens
ggcctgggcgcatgcgcagcgaggttccacgtgagcgcctgcgtttctcctcaaacctaacgatgccgccggagcggaggagacgaatgaaactggaccggagaaccggagcgaagccgaagcggaagcccggaatgaggccggactggaaagccggagcggggccaggcgggcctccccaaaagcctgccccttcatcccagcggaaaccgccggcccggccgagcgcggcggccgctgcgattgcagtcgcggcggcggaggaagagagacggctccggcagcggaaccgcctgaggctggaggaggacaaaccggccgtggagcggtgcttggaggagctggtcttcggcgacgtcgagaacgacgaggacgcgttgctgcggcgtctgcgaggcccgagggttcaagaacatgaagactcgggtgactcagaagtggagaatgaagcaaaaggtaattttccacctcaaaagaagccagtttgggtggatgaagaagatgaagatgaggaaatggttgacatgatgaacaatcggtttcggaaggatatgatgaaaaatgctagtgaaagtaaactttcgaaagacaaccttaaaaagagacttaaagaagaattccaacatgccatgggaggagtacctgcctgggcagagactactaagcggaaaacatcttcagatgatgaaagtgaagaggatgaagatgatttgttgcaaaggactgggaatttcatatccacatcaacttctcttccaagaggaatcttgaagatgaagaactgccagcatgcgaatgctgaacgtcctactgttgctcggatctcatctgtgcagttccatcccggtgcacagattgtgatggttgctggattagataatgctgtatcactatttcaggttgatgggaaaacaaatcctaaaattcagagcatctatttggaaaggtttccaatctttaaggcttgttttagtgctaatggggaagaagttttagccacgagtacccacagcaaggttctttatgtctatgacatgctggctggaaagttaattcctgtgcatcaagtgagaggtttgaaagagaagatagtgaggagctttgaagtctccccagatgggtccttcttgctcataaatggcattgctggatatttgcatttgctagcaatgaagaccaaagaactgattggaagcatgaaaattaatggaagggttgcagcatccacattctcttcagatagtaagaaagtatacgcctcttcgggggatggagaagtttatgtttgggatgtgaactcaaggaagtgccttaacagatttgttgatgaaggcagtttatatggattaagcattgccacatctaggaatggacagtatgttgcttgtggttctaattgtggagtggtaaatatatacaatcaagattcttgtctccaagaaacaaacccaaagccaataaaagctataatgaacttggttacaggtgttacttctctgaccttcaatcctactacagaaatcttggcaattgcttcagaaaaaatgaaagaagcagtcagattggcctgttgtcttaacagaacggaggcaattctcgggttttgaaagttgcaccattactcagacttctaaagagactatttgaagtccagttgagtcacaagagaagcctgtcttgatatatcatctcagaaactttcctgaatatgtgataatatatggaaaatgatttatagatccagctgtgcttaagagccagtaatgtcttaataaacatgtggcagcttttgtttgaaaa

SEQ ID NO: 421538 - DNA, 915 bp, Homo sapiens
ggcctgggcgcatgcgcagcgaggttccacgtgagcgcctgcgtttctcctcaaacctaacgatgccgccggagcggaggagacgaatgaaactggaccggagaaccggagcgaagccgaagcggaagcccggaatgaggccggactggaaagccggagcggggccaggcgggcctccccaaaagcctgccccttcatcccagcggaaaccgccggcccggccgagcgcggcggccgctgcgattgcagtcgcggcggcggaggaagagagacggctccggcagcggaaccgcctgaggctggaggaggacaaaccggccgtggagcggtgcttggaggagctggtcttcggcgacgtcgagaacgacgaggacgcgttgctgcggcgtctgcgaggcccgagggttcaagaacatgaagactcgggtgactcagaagtggagaatgaagcaaaaggtaattttccacctcaaaagaagccagtttgggtggatgaagaagatgaagatgaggaaatggttgacatgatgaacaatcggtttcggaaggatatgatgaaaaatgctagtgaaagtaaactttcgaaagacaaccttaaaaagagacttaaagaagaattccaacatgccatgggaggagtacctgcctgggcagagactactaagcggaaaacatcttcagatgatgaaagtgaagaggatgaagatgatttgttgcaaaggactgggaatttcatatccacatcaacttctcttccaagaggaatcttgaagaggtattatgttcctattgcttgagctcaggagtttgaagctacggtgagctgtgatggaaccactgtactttagcccgggtgaaagcgagaccctgtctctaaaataataaataaataaataaataaataaataaataaat

SEQ ID NO: 421539 - DNA, 732 bp, Homo sapiens
ggcctgggcgcatgcgcagcgaggttccacgtgagcgcctgcgtttctcctcaaacctaacgatgccgccggagcggaggagacgaatgaaactggaccggagaaccggagcgaagccgaagcggaagcccggaatgaggccggactggaaagccggagcggggccaggcgggcctccccaaaagcctgccccttcatcccagcggaaaccgccggcccggccgagcgcggcggccgctgcgattgcagtcgcggcggcggaggaagagagacggctccggcagcggaaccgcctgaggctggaggaggacaaaccggccgtggagcggtgcttggaggagctggtcttcggcgacgtcgagaacgacgaggacgcgttgctgcggcgtctgcgaggcccgagggtgagggaggccgcggcgcgcgggctgggcgcactcgggcggggcgcgcggtgggcggtgaagctccggggggcggagcctgggcgacctgcggcggcggggagcgctcaggtgggagggagcccgagaacgcgggcgcggagggtcgcagctgcgggtccctcgcctccctgctccagactgaaagtgcctggagggcggggaccgcgtctttctccgcccctggaggcgccgctgctcgggtatctgctttgcgaactgtggtcgtgagcatctttcgctgctgctcgactccgctagcctcttcccaaactgagggtggtctttt

SEQ ID NO: 421540 - DNA, 705 bp, Homo sapiens
cataaatatatttttcaaatatttttgcttagattccaacatgccatgggaggagtacctgcctgggcagagactactaagcggaaaacatcttcagatggtgagcgttgatatttctgtttaaattagtacataagtccctgttcctgttcgttattatttgagctttcttatgaggctcattaaaacctggcatttcttgcctggctcggtagctcacgcctgtcatcccagtgctttgggagcccgaggcgggtggatcgcttgagtccaggagtttaagaccagaccgggtgacatggcgaaaccccatctctacaaaaaatacaaaaattagccaggcctggtggtatgttcctgtagtcccgactacttggggggctgaggtgggaggattgcttgagctagggaagactagggtgcaataacctgtgataagtgataagtgccaccgtactccagcctgggtgacagagtgagactctgtctcaaaaaaaaaaaaaaaaaaaaaaaaaaaaaaaaccaaaaaaatctgttttttgactgtaggttttaaatttaacttgtaccatggctattttctgcttcttcgatcttttgagtttagctattataaatatggatggcttagctaaaatctggtttgtgtgcttggagttacatgttttagacttggaattaacctttgaaatcctgagagtccgg

SEQ ID NO: 421541 - DNA, 435 bp, Homo sapiens
gacaagaatcagtggagaaagaggtgactgtgaaggaatcaggatgcaagaagagtcagtaaagtttagccttcaagaagtcaacagaagggggagaatttgaattctgttttcaacctgtttggttggaggttctataggacatctgtggctatagtggtgatagctggtctctttgtaacatgattcctgtaaataccagtttgtggggttaaatctatattcacttaggttgtgaaagcccttttacttggtttttaatctattttaatccttttctctttgtagttctaattgtggagtggtaaatatatacaatcaagattcttgtctccaagaaacaaacccaaagccaataaaagctataatgaacttggttacaggtgttacttctctgaccttcaatcctactacagaaatcttggcaattgcttc

SEQ ID NO: 421542 - DNA, 1899 bp, Homo sapiens
ggcctgggcgcatgcgcagcgaggttccacgtgagcgcctgcgtttctcctcaaacctaacgatgccgccggagcggaggagacgaatgaaactggaccggagaaccggagcgaagccgaagcggaagcccggaatgaggccggactggaaagccggagcggggccaggcgggcctccccaaaagcctgccccttcatcccagcggaaaccgccggcccggccgagcgcggcggccgctgcgattgcagtcgcggcggcggaggaagagagacggctccggcagcggaaccgcctgaggctggaggaggacaaaccggccgtggagcggtgcttggaggagctggtcttcggcgacgtcgagaacgacgaggacgcgttgctgcggcgtctgcgaggcccgagggttcaagaacatgaagactcgggtgactcagaagtggagaatgaagcaaaaggtaattttccacctcaaaagaagccagtttgggtggatgaagaagatgaagatgaggaaatggttgacatgatgaacaatcggtttcggaaggatatgatgaaaaatgctagtgaaagtaaactttcgaaagacaaccttaaaaagagacttaaagaagaattccaacatgccatgggaggagtacctgcctgggcagagactactaagcggaaaacatcttcagatgatgaaagtgaagaggatgaagatgatttgttgcaaaggactgggaatttcatatccacatcaacttctcttccaagaggaatcttgaagatgaagaactgccagcatgcgaatgctgaacgtcctactgttgctcggatctcatctgtgcagttccatcccggtgcacagattgtgatggttgctggattagataatgctgtatcactatttcaggttgatgggaaaacaaatcctaaaattcagagcatctatttggaaaggtttccaatctttaaggcttgttttagtgctaatggggaagaagttttagccacgagtacccacagcaaggttctttatgtctatgacatgctggctggaaagttaattcctgtgcatcaagtgagaggtttgaaagagaagatagtgaggagctttgaagtctccccagatgggtccttcttgctcataaatggcattgctggatatttgcatttgctagcaatgaagaccaaagaactgattggaagcatgaaaattaatggaagggttgcagcatccacattctcttcagatagtaagaaagtatacgcctcttcgggggatggagaagtttatgtttgggatgtgaactcaaggaagtgccttaacagatttgttgatgaaggcagtttatatggattaagcattgccacatctaggaatggacagtatgttgcttgtggttctaattgtggagtggtaaatatatacaatcaagattcttgtctccaagaaacaaacccaaagccaataaaagctataatgaacttggttacaggtgttacttctctgaccttcaatcctactacagaaatcttggcaattgcttcagaaaaaatgaaagaagcagtcagattggttcatcttccttcctgtacagtattttcaaacttcccagtcattaaaaataagaatatttctcatgttcataccatggatttttctccgagaagtggatactttgccttggggaatgaaaagggcaaggccctgatgtataggttgcaccattactcagacttctaaagagactatttgaagtccagttgagtcacaagagaagcctgtcttgatatatcatctcagaaactttcctgaatatgtgataatatatggaaaatgatttatagatccagctgtgcttaagagccagtaatgtcttaataaacatgtggcagcttttgtttgaaaa

SEQ ID NO: 421543 - DNA, 388 bp, Homo sapiens
  misc_feature (49)..(49): n is a, c, g, or t
cccgcgcctccccacaaatcccgtacgcggccaaaaagggagggccgcnctggagttcatcttccttcctgtacagtattttcaaacttcccagtcattaaaaataagaatatttctcatgttcataccatggatttttctccgagaagtggatactttgccttggggaatgaaaagggcaaggccctgatgtataggttgcaccattactcagacttctaaagagactatttgaagtccagttgagtcacaagagaagcctgtcttgatatatcatctcagaaactttcctgaatatgtgataatatatggaaaatgatttatagatccagctgtgcttaagagccagtaatgtcttaataaacatgtggcagcttttgtttgaaaa

SEQ ID NO: 421544 - DNA, 1760 bp, Homo sapiens
acccatctggcgaggcagtctcaaaaacgtgcaaaaatgaggaaaacatttatgaggaaatgtgtgcgtgtgtttaatgcaggactttaaaaagaaaaacaactgttatgcgactgttaacttgctctgcattttatgtgccacaggtatgaaaggtgacattgcaaaatactccgctcttctcgcagtgtagaaggggtgaccccgggggttgggggagtacctgcctgggcagagactactaagcggaaaacatcttcagatggttcaagaacatgaagactcgggtgactcagaagtggagaatgaagcaaaaggtaattttccacctcaaaagaagccagtttgggtggatgaagaagatgaagatgaggaaatggttgacatgatgaacaatcggtttcggaaggatatgatgaaaaatgctagtgaaagtaaactttcgaaagacaaccttaaaaagagacttaaagaagaattccaacatgccatgggaggagtacctgcctgggcagagactactaagcggaaaacatcttcagatgatgaaagtgaagaggatgaagatgatttgttgcaaaggactgggaatttcatatccacatcaacttctcttccaagaggaatcttgaagatgaagaactgccagcatgcgaatgctgaacgtcctactgttgctcggatctcatctgtgcagttccatcccggtgcacagattgtgatggttgctggattagataatgctgtatcactatttcaggttgatgggaaaacaaatcctaaaattcagagcatctatttggaaaggtttccaatctttaaggcttgttttagtgctaatggggaagaagttttagccacgagtacccacagcaaggttctttatgtctatgacatgctggctggaaagttaattcctgtgcatcaagtgagaggtttgaaagagaagatagtgaggagctttgaagtctccccagatgggtccttcttgctcataaatggcattgctggatatttgcatttgctagcaatgaagaccaaagaactgattggaagcatgaaaattaatggaagggttgcagcatccacattctcttcagatagtaagaaagtatacgcctcttcgggggatggagaagtttatgtttgggatgtgaactcaaggaagtgccttaacagatttgttgatgaaggcagtttatatggattaagcattgccacatctaggaatggacagtatgttgcttgtggttctaattgtggagtggtaaatatatacaatcaagattcttgtctccaagaaacaaacccaaagccaataaaagctataatgaacttggttacaggtgttacttctctgaccttcaatcctactacagaaatcttggcaattgcttcagaaaaaatgaaagaagcagtcagattggttcatcttccttcctgtacagtattttcaaacttcccagtcattaaaaataagaatatttctcatgttcataccatggatttttctccgagaagtggatactttgccttggggaatgaaaagggcaaggccctgatgtataggttgcaccattactcagacttctaaagagactatttgaagtccagttgagtcacaagagaagcctgtcttgatatatcatctcagaaactttcctgaatatgtgataatatatggaaaatgatttatagatccagctgtgcttaagagccagtaatgtcttaataaacatgtggcagcttttgtttgaaaa

SEQ ID NO: 421545 - DNA, 1963 bp, Homo sapiens
  misc_feature (1937)..(1937): n is a, c, g, or t
ggcctgggcgcatgcgcagcgaggttccacgtgagcgcctgcgtttctcctcaaacctaacgatgccgccggagcggaggagacgaatgaaactggaccggagaaccggagcgaagccgaagcggaagcccggaatgaggccggactggaaagccggagcggggccaggcgggcctccccaaaagcctgccccttcatcccagcggaaaccgccggcccggccgagcgcggcggccgctgcgattgcagtcgcggcggcggaggaagagagacggctccggcagcggaaccgcctgaggctggaggaggacaaaccggccgtggagcggtgcttggaggagctggtcttcggcgacgtcgagaacgacgaggacgcgttgctgcggcgtctgcgaggcccgagggttcaagaacatgaagactcgggtgactcagaagtggagaatgaagcaaaaggtaattttccacctcaaaagaagccagtttgggtggatgaagaagatgaagatgaggaaatggttgacatgatgaacaatcggtttcggaaggatatgatgaaaaatgctagtgaaagtaaactttcgaaagacaaccttaaaaagagacttaaagaagaattccaacatgccatgggaggagtacctgcctgggcagagactactaagcggaaaacatcttcagatgatgaaagtgaagaggatgaagatgatttgttgcaaaggactgggaatttcatatccacatcaacttctcttccaagaggaatcttgaagatgaagaactgccagcatgcgaatgctgaacgtcctactgttgctcggatctcatctgtgcagttccatcccggtgcacagattgtgatggttgctggattagataatgctgtatcactatttcaggttgatgggaaaacaaatcctaaaattcagagcatctatttggaaaggtttccaatctttaaggcttgttttagtgctaatggggaagaagttttagccacgagtacccacagcaaggttctttatgtctatgacatgctggctggaaagttaattcctgtgcatcaagtgagaggtttgaaagagaagatagtgaggagctttgaagtctccccagatgggtccttcttgctcataaatggcattgctggatatttgcatttgctagcaatgaagaccaaagaactgattggaagcatgaaaattaatggaagggttgcagcatccacattctcttcagatagtaagaaagtatacgcctcttcgggggatggagaagtttatgtttgggatgtgaactcaaggaagtgccttaacagatttgttgatgaaggcagtttatatggattaagcattgccacatctaggaatggacagtatgttgcttgtggttctaattgtggagtggtaaatatatacaatcaagattcttgtctccaagaaacaaacccaaagccaataaaagctataatgaacttggttacaggtgttacttctctgaccttcaatcctactacagaaatcttggcaattgcttcagaaaaaatgaaagaagcagtcagattggttcatcttccttcctgtacagtattttcaaacttcccagtcattaaaaataagaatatttctcatgttcataccatggatttttctccgagaagtggatactttgccttggggaatgaaaagggcaaggccctgatgtataggttgcaccattactcagacttctaaagagactatttgaagtccagttgagtcacaagagaagcctgtcttgatatatcatctcagaaactttcctgaatatgtgataatatatggaaaatgatttatagatccagctgtgcttaagagccagtaatgtcttaataaacatgtggcagcttttgtttgaaaaaaaaaaaaaaagggcctcgttgcctacagcggcggagntctgcgggacccttcctttaagggag

SEQ ID NO: 421546 - DNA, 1756 bp, Homo sapiens
ggcctgggcgcatgcgcagcgaggttccacgtgagcgcctgcgtttctcctcaaacctaacgatgccgccggagcggaggagacgaatgaaactggaccggagaaccggagcgaagccgaagcggaagcccggaatgaggccggactggaaagccggagcggggccaggcgggcctccccaaaagcctgccccttcatcccagcggaaaccgccggcccggccgagcgcggcggccgctgcgattgcagtcgcggcggcggaggaagagagacggctccggcagcggaaccgcctgaggctggaggaggacaaaccggccgtggagcggtgcttggaggagctggtcttcggcgacgtcgagaacgacgaggacgcgttgctgcggcgtctgcgaggcccgagggttcaagaacatgaagactcgggtgactcagaagtggagaatgaagcaaaaggtaattttccacctcaaaagaagccagtttgggtggatgaagaagatgaagatgaggaaatggttgacatgatgaacaatcggtttcggaaggatatgatgaaaaatgctagtgaaagtaaactttcgaaagacaaccttaaaaagagacttaaagaagaattccaacatgccatgggaggagtacctgcctgggcagagactactaagcggaaaacatcttcagatgatgaaagtgaagaggatgaagatgatttgttgcaaaggactgggaatttcatatccacatcaacttctcttccaagaggaatcttgaagatgaagaactgccagcatgcgaatgctgaacgtcctactgttgctcggatctcatctgtgcagttccatcccggtgcacagattgtgatggttgctggattagataatgctgtatcactatttcaggttgatgggaaaacaaatcctaaaattcagagcatctatttggaaaggtttccaatctttaaggcttgttttagtgctaatggggaagaagttttagccacgagtacccacagcaaggttctttatgtctatgacatgctggctggaaagttaattcctgtgcatcaagtgagaggtttgaaagagaagatagtgaggagctttgaagtctccccagatgggtccttcttgctcataaatggcattgctggatatttgcatttgctagcaatgaagaccaaagaactgattggaagcatgaaaattaatggaagggttgcagcatccacattctcttcagatagtaagaaagtatacgcctcttcgggggatggagaagtttatgtttgggatgtgaactcaaggaagtgccttaacagatttgttgatgaaggcagtttatatggattaagcattgccacatctaggaatggacagtatgttgcttgtggttctaattgtggagtggtaaatatatacaatcaagattcttgtctccaagaaacaaacccaaagccaataaaagctataatgaacttggttacaggtgttacttctctgaccttcaatcctactacagaaatcttggcaattgcttcagaaaaaatgaaagaagcagtcagattggttgcaccattactcagacttctaaagagactatttgaagtccagttgagtcacaagagaagcctgtcttgatatatcatctcagaaactttcctgaatatgtgataatatatggaaaatgatttatagatccagctgtgcttaagagccagtaatgtcttaataaacatgtggcagcttttgtttgaaaa

SEQ ID NO: 421547 - DNA, 1565 bp, Homo sapiens
ggcctgggcgcatgcgcagcgaggttccacgtgagcgcctgcgtttctcctcaaacctaacgatgccgccggagcggaggagacgaatgaaactggaccggagaaccggagcgaagccgaagcggaagcccggaatgaggccggactggaaagccggagcggggccaggcgggcctccccaaaagcctgccccttcatcccagcggaaaccgccggcccggccgagcgcggcggccgctgcgattgcagtcgcggcggcggaggaagagagacggctccggcagcggaaccgcctgaggctggaggaggacaaaccggccgtggagcggtgcttggaggagctggtcttcggcgacgtcgagaacgacgaggacgcgttgctgcggcgtctgcgaggcccgagggttcaagaacatgaagactcgggtgactcagaagtggagaatgaagcaaaaggtaattttccacctcaaaagaagccagtttgggtggatgaagaagatgaagatgaggaaatggttgacatgatgaacaatcggtttcggaaggatatgatgaaaaatgctagtgaaagtaaactttcgaaagacaaccttaaaaagagacttaaagaagaattccaacatgccatgggaggagtacctgcctgggcagagactactaagcggaaaacatcttcagatgatgaaagtgaagaggatgaagatgatttgttgcaaaggactgggaatttcatatccacatcaacttctcttccaagaggaatcttgaagatgaagaactgccagcatgcgaatgctgaacgtcctactgttgctcggatctcatctgtgcagttccatcccggtgcacagattgtgatggttgctggattagataatgctgtatcactatttcaggttgatgggaaaacaaatcctaaaattcagagcatctatttggaaaggtttccaatctttaaggcttgttttagtgctaatggggaagaagttttagccacgagtacccacagcaaggttctttatgtctatgacatgctggctggaaagttaattcctgtgcatcaagtgagaggtttgaaaggagaagatagtgaaggaggtttggaggtttcccaaaagtgggtcctccatggcccaataaaacggaaaatggcgggaacagttgcgcaccaatacggcaaacacgactgaaagacacgaagaaacacggaattgggaacgctgacacaatacgggcaagaggcgtgagacacacacaatgcctctacgcaaagtgtagcaaaagaatatacgccatacggggaaagacgaaagagcacgacagggaggagtacaccaggagaagggcacatacattgtgtgaaaagagaaaatagggaacgagtagccatagaggagcaacagggtgggcgacaggggggacaaacacaagcgacgtgcgcacacagccgggacaagagcaagcgagagaagtcgcagaccacatagcgagctaaggaaaagtgctagagcaaaaatgccggcggcgaccgcgccccaacttatgatactccgtcgcacaac

SEQ ID NO: 421548 - DNA, 817 bp, Homo sapiens
ggcctgggcgcatgcgcagcgaggttccacgtgagcgcctgcgtttctcctcaaacctaacgatgccgccggagcggaggagacgaatgaaactggaccggagaaccggagcgaagccgaagcggaagcccggaatgaggccggactggaaagccggagcggggccaggcgggcctccccaaaagcctgccccttcatcccagcggaaaccgccggcccggccgagcgcggcggccgctgcgattgcagtcgcggcggcggaggaagagagacggctccggcagcggaaccgcctgaggctggaggaggacaaaccggccgtggagcggtgcttggaggagctggtcttcggcgacgtcgagaacgacgaggacgcgttgctgcggcgtctgcgaggcccgagggttcaagaacatgaagactcgggtgactcagaagtggagaatgaagcaaaaggtaattttccacctcaaaagaagccagtttgggtggatgaagaagatgaagatgaggaaatggttgacatgatgaacaatcggtttcggaaggatatgatgaaaaaaaaaaaaaaaaaaaaaaaaaaaaaaaaaaaccaaaaaaatctgttttttgactgtaggttttaaatttaacttgtaccatggctattttctgcttcttcgatcttttgagtttagctattataaatatggatggcttagctaaaatctggtttgtgtgcttggagttacatgttttagacttggaattaacctttgaaatcctgagagtccggagtatatcctctcacatcatgtgggagctccttccttagcat

SEQ ID NO: 421549 - DNA, 1348 bp, Homo sapiens
ggatggcggtgcgcatgcgcgagcgcctagctgcgcgcagccacccacgcgaccccagtctgaggtgcggggtcctggggcccggcgcgggtggccgccgcggcccctcgggctgcgtggggagggggcttccgcccctgttgtcattgctcctgcagccttttcgctgggactgcgcgacaccgccccccgaccgggtgcccgctgtgtgccaggccgggtgctgggcacggtcccgcgagtgccctataaggactgccaggcaataatgaaggttcttttactgaaggatgcgaaggaagatgactgtggccaggatccgtatatcagggaattaggattatatggacttgaagccactttgatccctgttttatcgtttgagtttttgtctcttcccagtttctctgagaagctttctcatcctgaagattacgggggactcatttttaccagccccagagcagtggaagcagcagagttatgtttggagcaaaacaataaaactgaagtctgggaaaggtctctgaaagaaaaatggaatgccaagtcagtgtatgtggttggaaatgctactgcttctctagtgagtaaaattggcctggatacagaaggagaaacctgtggaaatgcagaaaagcttgcagaatatatttgttccagggagtcctcagcactgcctcttctatttccctgtggaaacctcaaaagagaaatcctgccaaaagcgctcaaggacaaagggattgccatggaaagcataactgtgtatcagacagttgcacacccaggaatccaagggaacctgaacagctactattcccagcagggggttccagccagcatcacattttttagtccctctggcctcacatacagtctcaagcacattcaggagttatctggtgacaatatcgatcaaattaagtttgcagccatcggccccactacggctcgcgcgctggccgcccagggccttcctgtaagctgcactgcagagagccccacgccacaagccctggccactggcatcaggaaggctctccagccccatggctgctgctgagtcagccacctagcgctggccccatgcagcctccctgggctgggctggctctggatggagccaggcatcggcaagggctctcgggagctgctgccgtcagactcctgcctcaagcctgagtggaagcacctgaggaccggggatcgggacctgacctggggctggcctcaggcccacgtgcacgtgactgccctctgtggaagccagcttaaaccctagccctgtgagagcttcctgtgcccagcaggaaggaagtcaaataaaccacactgactacctgtg

SEQ ID NO: 421550 - DNA, 1213 bp, Homo sapiens
ttccacaagcatttgattgccttcttcttgtgtaccgtccccatcggaaattgcttaggaagagtctttgagatctaattaagatctgtttccttgctctgtcgcagtgccctataaggactgccaggcaataatgaaggttcttttactgaaggatgcgaaggaagatgactgtggccaggatccgtatatcagggaattaggattatatggacttgaagccactttgatccctgttttatcgtttgagtttttgtctcttcccagtttctctgagaagctttctcatcctgaagattacgggggactcatttttaccagccccagagcagtggaagcagcagagttatgtttggagcaaaacaataaaactgaagtctgggaaaggtctctgaaagaaaaatggaatgccaagtcagtgtatgtggttggaaatgctactgcttctctagtgagtaaaattggcctggatacagaaggagaaacctgtggaaatgcagaaaagcttgcagaatatatttgttccagggagtcctcagcactgcctcttctatttccctgtggaaacctcaaaagagaaatcctgccaaaagcgctcaaggacaaagggattgccatggaaagcataactgtgtatcagacagttgcacacccaggaatccaagggaacctgaacagctactattcccagcagggggttccagccagcatcacattttttagtccctctggcctcacatacagtctcaagcacattcaggagttatctggtgacaatatcgatcaaattaagtttgcagccatcggccccactacggctcgcgcgctggccgcccagggccttcctgtaagctgcactgcagagagccccacgccacaagccctggccactggcatcaggaaggctctccagccccatggctgctgctgagtcagccacctagcgctggccccatgcagcctccctgggctgggctggctctggatggagccaggcatcggcaagggctctcgggagctgctgccgtcagactcctgcctcaagcctgagtggaagcacctgaggaccggggatcgggacctgacctggggctggcctcaggcccacgtgcacgtgactgccctctgtggaagccagcttaaaccctagccctgtgagagcttcctgtgcccagcaggaaggaagtcaaataaaccacactgactacctgtg

SEQ ID NO: 421551 - DNA, 409 bp, Homo sapiens
agttcggcacagaggttaaaccctagccctgtgagagcttcctgtaagctgcactgcagagagccccacgccacaagccctggccactggcatcaggaaggctctccagccccatggctgctgctgagtcagccacctagcgctggccccatgcagcctccctgggctgggctggctctggatggagccaggcatcggcaagggctctcgggagctgctgccgtcagactcctgcctcaagcctgagtggaagcacctgaggaccggggatcgggacctgacctggggctggcctcaggcccacgtgcacgtgactgccctctgtggaagccagcttaaaccctagccctgtgagagcttcctgtgcccagcaggaaggaagtcaaataaaccacactgactacctgtg

SEQ ID NO: 421552 - DNA, 1401 bp, Homo sapiens
ggatggcggtgcgcatgcgcgagcgcctagctgcgcgcagccacccacgcgaccccagtctgaggtgcggggtcctggggcccggcgcgggtggccgccgcggcccctcgggctgcgtggggagggggcttccgcccctgttgtcattgctcctgcagccttttcgctgggactgcgcgacaccgccccccgaccgggtgcccgctgtgtgccaggccgggtgctgggcacggtcccgcgagtgccctataaggactgccaggcaataatgaaggttcttttactgaaggatgcgaaggaagatgactgtggccaggatccgtatatcagggaattaggattatatggacttgaagccactttgatccctgttttatcgtttgagtttttgtctcttcccagtttctctgagaagctttctcatcctgaagattacgggggactcatttttaccagccccagagcagtggaagcagcagagttatgtttggagcaaaacaataaaactgaagtctgggaaaggtctctgaaagaaaaatggaatgccaagtcagtgtatgtggttggaaatgctactgcttctctagtgagtaaaattggcctggatacagaaggagaaacctgtggaaatgcagaaaagcttgcagaatatatttgttccagggagtcctcagcactgcctcttctatttccctgtggaaacctcaaaagagaaatcctgccaaaagcgctcaaggacaaagggattgccatggaaagcataactgtgtatcagacagttgcacacccaggaatccaagggaacctgaacagctactattcccagcagggggttccagccagcatcacattttttagtccctctggcctcacatacagtctcaagcacattcaggagttatctggtgacaatatcgatcaaattaagtttgcagccatcggccccactacggctcgcgcgctggccgcccagggccttcctgtaagctgcactgcagagagccccacgccacaagccctggccactggcatcaggaaggctctccagccccatggctgctgctgagtcagccacctagcgctggccccatgcagcctccctgggctgggctggctctggatggagccaggcatcggcaagggctctcgggagctgctgccgtcagactcctgcctcaagcctgagtggaagcacctgaggaccggggatcgggacctgacctggggctggcctcaggcccacgtgcacgtgactgccctctgtggaagccagcttaaaccctagccctgtgagagcttcctgtgcccagcaggaaggaagtcaaataaaccacactgactacctgtgaaaaaccacacaaaaaacgcgcctccctcgcctcacccgggcccctcctgcgt

SEQ ID NO: 421553 - DNA, 1594 bp, Homo sapiens
ggatggcggtgcgcatgcgcgagcgcctagctgcgcgcagccacccacgcgaccccagtctgaggtgcggggtcctggggcccggcgcgggtggccgccgcggcccctcgggctgcgtggggagggggcttccgcccctgttgtcattgctcctgcagccttttcgctgggactgcgcgacaccgccccccgaccgggtgcccgctgtgtgccaggccgggtgctgggcacggtcccgcgagtgccctataaggactgccaggcaataatgaaggttcttttactgaaggatgcgaaggaagatgactgtggccaggatccgtatatcagggaattaggattatatggacttgaagccactttgatccctgttttatcgtttgagtttttgtctcttcccagtttctctgagaagctttctcatcctgaagattacgggggactcatttttaccagccccagagcagtggaagcagcagagttatgtttggagcaaaacaataaaactgaagtctgggaaaggtctctgaaagaaaaatggaatgccaagtcagtgtatgtggttggaaatgctactgcttctctagtgagtaaaattggcctggatacagaaggagaaacctgtggaaatgcagaaaagcttgcagaatatatttgttccagggagtcctcagcactgcctcttctatttccctgtggaaacctcaaaagagaaatcctgccaaaagcgctcaaggacaaagggattgccatggaaagcataactgtgtatcagacagttgcacacccaggaatccaagggaacctgaacagctactattcccagcagggggttccagccagcatcacattttttagtccctctggcctcacatacagtctcaagcacattcaggagttatctggtgacaatatcgatcaaattaagatgaggagatggaggccagagaggatgggccacgggccaaggtcattgtcctgtggagctgggatttaaatcccaaccctgtgcccacagagccctgaccttgatggctctactttcttggggattcagtcactgcccctgccacaccatcctccccttgatcagacccagggcccccaacacccgaagaagaactgtctgcagctagagcctctgaggaaggactgcactgacacagccgtgatgtttgcagccatcggccccactacggctcgcgcgctggccgcccagggccttcctgtaagctgcactgcagagagccccacgccacaagccctggccactggcatcaggaaggctctccagccccatggctgctgctgagtcagccacctagcgctggccccatgcagcctccctgggctgggctggctctggatggagccaggcatcggcaagggctctcgggagctgctgccgtcagactcctgcctcaagcctgagtggaagcacctgaggaccggggatcgggacctgacctggggctggcctcaggcccacgtgcacgtgactgccctctgtggaagccagcttaaaccctagccctgtgagagcttcctgtgcccagcaggaaggaagtcaaataaaccacactgactacctgtg

SEQ ID NO: 421554 - DNA, 1367 bp, Homo sapiens
ggatggcggtgcgcatgcgcgagcgcctagctgcgcgcagccacccacgcgaccccagtctgaggtgcggggtcctggggcccggcgcgggtggccgccgcggcccctcgggctgcgtggggagggggcttccgcccctgttgtcattgctcctgcagccttttcgctgggactgcgcgacaccgccccccgaccgggtgcccgctgtgtgccaggccgggtgctgggcacggtcccgcgagtgccctataaggactgccaggcaataatgaaggttcttttactgaaggatgcgaaggaagatgactgtggccaggatccgtatatcagggaattaggattatatggacttgaagccactttgatccctgttttatcgtttgagtttttgtctcttcccagtttctctgagaagctttctcatcctgaagattacgggggactcatttttaccagccccagagcagtggaagcagcagagttatgtttggagcaaaacaataaaactgaagtctgggaaaggtctctgaaagaaaaatggaatgccaagtcagtgtatgtggttggaaatgctactgcttctctagtgagtaaaattggcctggatacagaaggagaaacctgtggaaatgcagaaaagcttgcagaatatatttgttccagggagtcctcagcactgcctcttctatttccctgtggaaacctcaaaagagaaatcctgccaaaagcgctcaaggacaaagggattgccatggaaagcataactgtgtatcagacagttgcacacccaggaatccaagggaacctgaacagctactattcccagcagggggttccagccagcatcacattttttagtccctctggcctcacatacagtctcaagcacattcaggagttatctggtgacaatatcgatcaaattaagtttgcagccatcggccccactacggctcgcgcgctggccgcccagggccttcctgtaagctgcactgcagagagccccacgccacaagccctggccactggcatcaggaaggctctccagccccatggctgctgctgagtcagccacctagcgctggccccatgcagcctccctgggctgggctggctctggatggagccaggcatcggcaagggctctcgggagctgctgccgtcagactcctgcctcaagcctgagtggaagcacctgaggaccggggatcgggacctgacctggggctggcctcaggcccacgtgcacgtgactgccctctgtggaagccagcttaaaccctagccctgtgagagcttcctgtgcccagcaggaaggaagtcaaataaaccacactgactacctgtgtactgagtgtatggttgct

SEQ ID NO: 421555 - DNA, 1438 bp, Homo sapiens
ggatggcggtgcgcatgcgcgagcgcctagctgcgcgcagccacccacgcgaccccagtctgaggtgcggggtcctggggcccggcgcgggtggccgccgcggcccctcgggctgcgtggggagggggcttccgcccctgttgtcattgctcctgcagccttttcgctgggactgcgcgacaccgccccccgaccgggtgcccgctgtgtgccaggccgggtgctgggcacggtcccgcgagtgccctataaggactgccaggcaataatgaaggttcttttactgaaggatgcgaaggaagatgactgtggccaggatccgtatatcagggaattaggattatatggacttgaagccactttgatccctgttttatcgtttgagtttttgtctcttcccagtttctctgagaagctttctcatcctgaagattacgggggactcatttttaccagccccagagcagtggaagcagcagagttatgtttggagcaaaacaataaaactgaagtctgggaaaggtctctgaaagaaaaatggaatgccaagtcagtgtatgtggttggaaatgctactgcttctctagtgagtaaaattggcctggatacagaaggagaaacctgtggaaatgcagaaaagcttgcagaatatatttgttccagggagtcctcagcactgcctcttctatttccctgtggaaacctcaaaagagaaatcctgccaaaagcgctcaaggacaaagggattgccatggaaagcataactgtgtatcagacagttgcacacccaggaatccaagggaacctgaacagctactattcccagcagggggttccagccagcatcacattttttagtccctctggcctcacatacagtctcaagcacattcaggagttatctggtgacaatatcgatcaaattaagtttgcagccatcggccccactacggctcgcgcgctggccgcccagggccttcctgtaagctgcactgcagagagccccacgccacaagccctggccactggcatcaggaaggctctccagccccatggctgctgctgagtcagccacctagcgctggccccatgcagcctccctgggctgggctggctctggatggagccaggcatcggcaagggctctcgggagctgctgccgtcagactcctgcctcaagcctgagtggaagcacctgaggaccggggatcgggacctgacctggggctggcctcaggcccacgtgcacgtgactgccctctgtggaagccagcttaaaccctagccctgtgagagcttcctgtgcccagcaggaaggaagtcaaataaaccacactgactacctgtgaaaaaaacacagagagacaaacaaaaaaacgaaaaaacaaacaagaccaaacggacaaacaaacacaaggaacaggcgaccaaacaacaa

SEQ ID NO: 421556 - DNA, 1429 bp, Homo sapiens
ggatggcggtgcgcatgcgcgagcgcctagctgcgcgcagccacccacgcgaccccagtctgaggtgcggggtcctggggcccggcgcgggtggccgccgcggcccctcgggctgcgtggggagggggcttccgcccctgttgtcattgctcctgcagccttttcgctgggactgcgcgacaccgccccccgaccgggtgcccgctgtgtgccaggccgggtgctgggcacggtcccgcgagtgccctataaggactgccaggcaataatgaaggttcttttactgaaggatgcgaaggaagatgactgtggccaggatccgtatatcagggaattaggattatatggacttgaagccactttgatccctgttttatcgtttgagtttttgtctcttcccagtttctctgagaagctttctcatcctgaagattacgggggactcatttttaccagccccagagcagtggaagcagcagagttatgtttggagcaaaacaataaaactgaagtctgggaaaggtctctgaaagaaaaatggaatgccaagtcagtgtatgtggttggaaatgctactgcttctctagtgagtaaaattggcctggatacagaaggagaaacctgtggaaatgcagaaaagcttgcagaatatatttgttccagggagtcctcagcactgcctcttctatttccctgtggaaacctcaaaagagaaatcctgccaaaagcgctcaaggacaaagggattgccatggaaagcataactgtgtatcagacagttgcacacccaggaatccaagggaacctgaacagctactattcccagcagggggttccagccagcatcacattttttagtccctctggcctcacatacagtctcaagcacattcaggagttatctggtgacaatatcgatcaaattaagacccagggcccccaacacccgaagaagaactgtctgcagctagagcctctgaggaaggactgcactgacacagccgtgatgtttgcagccatcggccccactacggctcgcgcgctggccgcccagggccttcctgtaagctgcactgcagagagccccacgccacaagccctggccactggcatcaggaaggctctccagccccatggctgctgctgagtcagccacctagcgctggccccatgcagcctccctgggctgggctggctctggatggagccaggcatcggcaagggctctcgggagctgctgccgtcagactcctgcctcaagcctgagtggaagcacctgaggaccggggatcgggacctgacctggggctggcctcaggcccacgtgcacgtgactgccctctgtggaagccagcttaaaccctagccctgtgagagcttcctgtgcccagcaggaaggaagtcaaataaaccacactgactacctgtg

SEQ ID NO: 421557 - DNA, 1922 bp, Homo sapiens
ggatggcggtgcgcatgcgcgagcgcctagctgcgcgcagccacccacgcgaccccagtctgaggtgcggggtcctggggcccggcgcgggtggccgccgcggcccctcgggctgcgtggggagggggcttccgcccctgttgtcattgctcctgcagccttttcgctgggactgcgcgacaccgccccccgaccgggtgcccgctgtgtgccaggccgggtgctgggcacggtcccgcgagtgccctataaggactgccaggcaataatgaaggttcttttactgaaggatgcgaaggaagatgactgtggccaggatccgtatatcagggaattaggattatatggacttgaagccactttgatccctgttttatcgtttgagtttttgtctcttcccagtttctctgagaagctttctcatcctgaagattacgggggactcatttttaccagccccagagcagtggaagcagcagagttatgtttggagcaaaacaataaaactgaagtctgggaaaggtctctgaaagaaaaatggaatgccaagtcagtgtatgtggttggaaatgctactgcttctctagtgagtaaaattggcctggatacagaaggagaaacctgtggaaatgcagaaaagcttgcagaatatatttgttccagggagtcctcagcactgcctcttctatttccctgtggaaacctcaaaagagaaatcctgccaaaagcgctcaaggacaaagggattgccatggaaagcataactgtgtatcagacagttgcacacccaggaatccaagggaacctgaacagctactattcccagcagggggttccagccagcatcacattttttagtccctctggcctcacatacagtctcaagcacattcaggagttatctggtgacaatatcgatcaaattaagaaacacctttgaactggctccagagggactgaggagagggtgcaggatgtgacccagagcccaaggacagacactgccactcactgcagtcaggaagagcaaaaggcttcacctgccttctcacaggtgcatctcatgtggggagtatgcaccgctctcccagttttaaagatggagcacggggctcagagacgtcatatggcctgtctgtaggtcacactgctgagaaggaagagctgcagttgaacctgggaagactgattccacattgtcagccatggtgatgccttgccatggtctcaggagctgctgagcagttgatgcacttctgggcagtaactgatacaattctcacaccagtccagtggtgggtatccagaaaaagaggtcagtgttcctcattacaggtgaggacactgagggctagagaggtgaaacaacttgccaaagtcatgttttgagttcctagaaggcccaggactcacacaggtcaccgaggaagaaaaacaatatctgaatcttatggttagaaagattagagagaggccgggcgctgtggctcccacctggaatcccagcactttgggaggcctcaggcggatcacctgaggtcaggtgttccagaccagcctgtccaatatgatgaaaaccccgtctttactaaaaatataaaaattagctgggcatggtggcatgcgcctataatcccagctacatgggaggctgagacaggagaatcgcttgaaccctggagactgaggttgcagtgagccgagatcgcgccacggcactccagcctgggtgacaagagtgaaactccgtacctgccccataaaagaaaaaaagaaagaaaaagaaaaattaaagagataggacccatgaagtgcttagcatggcaactggtccatatgaccagcgcttacgtcatattgcaggtcaggatgggtcacggtgctgtcctgcctggttcttgtccctctgtgccctgctgcct

SEQ ID NO: 421558 - DNA, 1420 bp, Homo sapiens
ggatggcggtgcgcatgcgcgagcgcctagctgcgcgcagccacccacgcgaccccagtctgaggtgcggggtcctggggcccggcgcgggtggccgccgcggcccctcgggctgcgtggggagggggcttccgcccctgttgtcattgctcctgcagccttttcgctgggactgcgcgacaccgccccccgaccgggtgcccgctgtgtgccaggccgggtgctgggcacggtcccgcgagtgccctataaggactgccaggcaataatgaaggttcttttactgaaggatgcgaaggaagatgactgtggccaggatccgtatatcagggaattaggattatatggacttgaagccactttgatccctgttttatcgtttgagtttttgtctcttcccagtttctctgagaagctttctcatcctgaagattacgggggactcatttttaccagccccagagcagtggaagcagcagagttatgtttggagcaaaacaataaaactgaagtctgggaaaggtctctgaaagaaaaatggaatgccaagtcagtgtatgtggttggaaatgctactgcttctctagtgagtaaaattggcctggatacagaaggagaaacctgtggaaatgcagaaaagcttgcagaatatatttgttccagggagtcctcagcactgcctcttctatttccctgtggaaacctcaaaagagaaatcctgccaaaagcgctcaaggacaaagaagcctgagttttcactacttttcacctaccatctggctgcccctcataagtcaatatctgactgaaattgcggattgccatggaaagcataactgtgtatcagacagttgcacacccaggaatccaagggaacctgaacagctactattcccagcagggggttccagccagcatcacattttttagtccctctggcctcacatacagtctcaagcacattcaggagttatctggtgacaatatcgatcaaattaagtttgcagccatcggccccactacggctcgcgcgctggccgcccagggccttcctgtaagctgcactgcagagagccccacgccacaagccctggccactggcatcaggaaggctctccagccccatggctgctgctgagtcagccacctagcgctggccccatgcagcctccctgggctgggctggctctggatggagccaggcatcggcaagggctctcgggagctgctgccgtcagactcctgcctcaagcctgagtggaagcacctgaggaccggggatcgggacctgacctggggctggcctcaggcccacgtgcacgtgactgccctctgtggaagccagcttaaaccctagccctgtgagagcttcctgtgcccagcaggaaggaagtcaaataaaccacactgactacctgtg

SEQ ID NO: 421559 - DNA, 1251 bp, Homo sapiens
ggatggcggtgcgcatgcgcgagcgcctagctgcgcgcagccacccacgcgaccccagtctgaggtgcggggtcctggggcccggcgcgggtggccgccgcggcccctcgggctgcgtggggagggggcttccgcccctgttgtcattgctcctgcagccttttcgctgggactgcgcgacaccgccccccgaccgggtgcccgctgtgtgccaggccgggtgctgggcacggtcccgcgagtgccctataaggactgccaggcaataatgaaggttcttttactgaaggatgcgaaggaagatgactgtggccaggatccgtatatcagggaattaggattatatggacttgaagccactttgatccctgttttatcgtttgagtttttgtctcttcccagtttctctgagaagctttctcatcctgaagattacgggggactcatttttaccagccccagagcagtggaagcagcagagttatgtttggagcaaaacaataaaactgaagtctgggaaaggtctctgaaagaaaaatggaatgccaagtcagtgtatgtggttggaaatgctactgcttctctagtgagtaaaattggcctggatacagaaggagaaacctgtggaaatgcagaaaagcttgcagaatatatttgttccagggagtcctcagcactgcctcttctatttccctgtggaaacctcaaaagagaaatcctgccaaaagcgctcaaggacaaagggattgccatggaaagcataactgtgtatcagacagttgcacacccaggaatccaagggaacctgaacagctactattcccagcagggggttccagccagcatcacattttttagtccctctggcctcacatacagtctcaagcacattcaggagttatctggtgacaatatcgatcaaattaagctcctggatggaggagagttgctgaagaagttcatgcagggaaggaataaaggatcacacaggaatttgagagccaaagtaaagtgcaactggccccccaggcccagaggggctagcagtgagaactgaagatgttccctctggaccttccggccacagctcattgatgggacatgttctcagacagtgttgtaagttttgtgtgctttaactcatgagttacacgtggtcactcacttaatgagttaagcgttaatacaacttccctgtgaatagaaggtaacaaaataaaaacattgtgttgtatacaagtcttcagaaaa

SEQ ID NO: 421560 - DNA, 1206 bp, Homo sapiens
ggatggcggtgcgcatgcgcgagcgcctagctgcgcgcagccacccacgcgaccccagtctgaggtgcggggtcctggggcccggcgcgggtggccgccgcggcccctcgggctgcgtggggagggggcttccgcccctgttgtcattgctcctgcagccttttcgctgggactgcgcgacaccgccccccgaccgggtgcccgctgtgtgccaggccgggtgctgggcacggtcccgcgagtgccctataaggactgccaggcaataatgaaggttcttttactgaaggatgcgaaggaagatgactgtggccaggatccgtatatcagggaattaggattatatggacttgaagccactttgatccctgttttatcgtttgagtttttgtctcttcccagtttctctgagaagctttctcatcctgaagattacgggggactcatttttaccagccccagagcagtggaagcagcagagttatgtttggagcaaaacaataaaactgaagtctgggaaaggtctctgaaagaaaaatggaatgccaagtcagtgtatgtggttggaaatgctactgcttctctagtgagtaaaattggcctggatacagaaggagaaacctgtggaaatgcagaaaagcttgcagaatatatttgttccagggagtcctcagcactgcctcttctatttccctgtggaaacctcaaaagagaaatcctgccaaaagcgctcaaggacaaagggattgccatggaaagcataactgtgtatcagacagttgcacacccaggaatccaagggaacctgaacagctactattcccagcagggggttccagccagcatcacattttttagtccctctggcctcacatacagtctcaagcacattcaggagttatctggtgacaatatcgatcaaattaagatcgaagagctggagctccagtgggcatcttgggccctgagatgacattggggaaagaaagttttctggaacaaggtgacactgtgggcacaaaaactatcccaactctagacttcttgagtgtaaaagacatatcgacttctatcttgtttaagccactattactacgagattttttcttttacaatcaaatctaaatgataaaataatcaagtgaattggtagagtaaacatcaagataaaccgtttccgagtttgaataaaatgcccttttaaga

SEQ ID NO: 421561 - DNA, 1264 bp, Homo sapiens
ggatggcggtgcgcatgcgcgagcgcctagctgcgcgcagccacccacgcgaccccagtctgaggtgcggggtcctggggcccggcgcgggtggccgccgcggcccctcgggctgcgtggggagggggcttccgcccctgttgtcattgctcctgcagccttttcgctgggactgcgcgacaccgccccccgaccgggtgcccgctgtgtgccaggccgggtgctgggcacggtcccgcgagtgccctataaggactgccaggcaataatgaaggttcttttactgaaggatgcgaaggaagatgactgtggccaggatccgtatatcaggctttctcatcctgaagattacgggggactcatttttaccagccccagagcagtggaagcagcagagttatgtttggagcaaaacaataaaactgaagtctgggaaaggtctctgaaagaaaaatggaatgccaagtcagtgtatgtggttggaaatgctactgcttctctagtgagtaaaattggcctggatacagaaggagaaacctgtggaaatgcagaaaagcttgcagaatatatttgttccagggagtcctcagcactgcctcttctatttccctgtggaaacctcaaaagagaaatcctgccaaaagcgctcaaggacaaagggattgccatggaaagcataactgtgtatcagacagttgcacacccaggaatccaagggaacctgaacagctactattcccagcagggggttccagccagcatcacattttttagtccctctggcctcacatacagtctcaagcacattcaggagttatctggtgacaatatcgatcaaattaagtttgcagccatcggccccactacggctcgcgcgctggccgcccagggccttcctgtaagctgcactgcagagagccccacgccacaagccctggccactggcatcaggaaggctctccagccccatggctgctgctgagtcagccacctagcgctggccccatgcagcctccctgggctgggctggctctggatggagccaggcatcggcaagggctctcgggagctgctgccgtcagactcctgcctcaagcctgagtggaagcacctgaggaccggggatcgggacctgacctggggctggcctcaggcccacgtgcacgtgactgccctctgtggaagccagcttaaaccctagccctgtgagagcttcctgtgcccagcaggaaggaagtcaaataaaccacactgactacctgtg

SEQ ID NO: 421562 - DNA, 1267 bp, Homo sapiens
ggatggcggtgcgcatgcgcgagcgcctagctgcgcgcagccacccacgcgaccccagtctgaggtgcggggtcctggggcccggcgcgggtggccgccgcggcccctcgggctgcgtggggagggggcttccgcccctgttgtcattgctcctgcagccttttcgctgggactgcgcgacaccgccccccgaccgggtgcccgctgtgtgccaggccgggtgctgggcacggtcccgcgagtgccctataaggactgccaggcaataatgaaggttcttttactgaaggatgcgaaggaagatgactgtggccaggatccgtatatcagggaattaggattatatggacttgaagccactttgatccctgttttatcgtttgagtttttgtctcttcccagtttctctgagaagctttctcatcctgaagattacgggggactcatttttaccagccccagagcagtggaagcagcagagttatgtttggagcaaaacaataaaactgaagtctgggaaaggtctctgaaagaaaaatggaatgccaagtcagtgtatgtggttggaaatgctactgcttctctagtgagtaaaattggcctggatacagaaggagaaacctgtggaaatgcagaaaagcttgcagaatatatttgttccaggattgccatggaaagcataactgtgtatcagacagttgcacacccaggaatccaagggaacctgaacagctactattcccagcagggggttccagccagcatcacattttttagtccctctggcctcacatacagtctcaagcacattcaggagttatctggtgacaatatcgatcaaattaagtttgcagccatcggccccactacggctcgcgcgctggccgcccagggccttcctgtaagctgcactgcagagagccccacgccacaagccctggccactggcatcaggaaggctctccagccccatggctgctgctgagtcagccacctagcgctggccccatgcagcctccctgggctgggctggctctggatggagccaggcatcggcaagggctctcgggagctgctgccgtcagactcctgcctcaagcctgagtggaagcacctgaggaccggggatcgggacctgacctggggctggcctcaggcccacgtgcacgtgactgccctctgtggaagccagcttaaaccctagccctgtgagagcttcctgtgcccagcaggaaggaagtcaaataaaccacactgactacctgtg

SEQ ID NO: 421563 - DNA, 1078 bp, Homo sapiens
ggatggcggtgcgcatgcgcgagcgcctagctgcgcgcagccacccacgcgaccccagtctgaggtgcggggtcctggggcccggcgcgggtggccgccgcggcccctcgggctgcgtggggagggggcttccgcccctgttgtcattgctcctgcagccttttcgctgggactgcgcgacaccgccccccgaccgggtgcccgctgtgtgccaggccgggtgctgggcacggtcccgcgagtctgggaaaggtctctgaaagaaaaatggaatgccaagtcagtgtatgtggttggaaatgctactgcttctctagtgagtaaaattggcctggatacagaaggagaaacctgtggaaatgcagaaaagcttgcagaatatatttgttccagggagtcctcagcactgcctcttctatttccctgtggaaacctcaaaagagaaatcctgccaaaagcgctcaaggacaaagggattgccatggaaagcataactgtgtatcagacagttgcacacccaggaatccaagggaacctgaacagctactattcccagcagggggttccagccagcatcacattttttagtccctctggcctcacatacagtctcaagcacattcaggagttatctggtgacaatatcgatcaaattaagtttgcagccatcggccccactacggctcgcgcgctggccgcccagggccttcctgtaagctgcactgcagagagccccacgccacaagccctggccactggcatcaggaaggctctccagccccatggctgctgctgagtcagccacctagcgctggccccatgcagcctccctgggctgggctggctctggatggagccaggcatcggcaagggctctcgggagctgctgccgtcagactcctgcctcaagcctgagtggaagcacctgaggaccggggatcgggacctgacctggggctggcctcaggcccacgtgcacgtgactgccctctgtggaagccagcttaaaccctagccctgtgagagcttcctgtgcccagcaggaaggaagtcaaataaaccacactgactacctgtg

SEQ ID NO: 421564 - DNA, 1630 bp, Homo sapiens
ggatggcggtgcgcatgcgcgagcgcctagctgcgcgcagccacccacgcgaccccagtctgaggtgcggggtcctggggcccggcgcgggtggccgccgcggcccctcgggctgcgtggggagggggcttccgcccctgttgtcattgctcctgcagccttttcgctgggactgcgcgacaccgccccccgaccgggtgcccgctgtgtgccaggccgggtgctgggcacggtcccgcgagtgccctataaggactgccaggcaataatgaaggttcttttactgaaggatgcgaaggaagatgactgtggccaggatccgtatatcagggaattaggattatatggacttgaagccactttgatccctgttttatcgtttgagtttttgtctcttcccagtttctctgagaagctttctcatcctgaagattacgggggactcatttttaccagccccagagcagtggaagcagcagagttatgtttggagcaaaacaataaaactgaagtctgggaaaggtctctgaaagaaaaatggaatgccaagtcagtgtatgtggttggaaatgctactgcttctctagtgagtaaaattggcctggatacagaaggagaaacctgtggaaatgcagaaaagcttgcagaatatatttgttccagtgaagaagtcaaaggaatcttttgaagtgaagaaagtgggtttggacgtgcccttatgctgatgaatcattggagtaatatctggggtttagccgcatccttggtggcaaggcggtggggaaagcccctgagggtgaggccagcctgagccccaagggaaaggggctgctgggacctcctgacctcaactcatctccaggagcgcacagggcctcgcacagatgcctcagtctgtaccgctgggagttcgtgccatctcagacctaccctccctacctgggctgtacctaaagagatactgctaggctttctctagaatgtttcatgagccagcactgtgagacattttcaagctaaaaacatacagttcaggagactgtaatctgtggtagaaagtgttcaccatttgctgctagtaaagacggttggccctgtgcttctctggccacttgtgccacatggtgttctcggaagaggcctctccatgcaccagtgtggagaagccctctggaggccaattcaaagagcatctgaggctaagcaactgaaaggaaaaggcctgatggccaacgtgttgctttctgtggaatgttccagactggattgctgggggtcattttctttaacagcagcctagacaggcagtgactctcttttattcagccaggtgttgaaatagctgcagggaagccacagacagttgttccagctttccggatcagagagcactggttgggccccgtgccatgtggccccagccccatgggatcgctcctcaggtcatggagccacacatcagtgtggagggttcgctccaggggttcctggtacaggatgcagatgggtcttgtctggctccaggctttttgtttctaatgttgtttctagagagtcatcatcaccgcataaatggtatcaaagcccttcttttaaaaatgtagaaataaatgtaaatggtagatcttga

SEQ ID NO: 421565 - DNA, 768 bp, Homo sapiens
cctctggccaggcagacacagacctggggcagcaccagctttctgatggcagcctgctctttccaacagttccctaccagaatcctgcctcactggagcagaggatgccagcatcagccgggaaccactcctgtgctaaaaccgccttggtggcctgtggcttgaggtcttgatgcggatgaagccggaggaatgttgtctctcctcagtctcatggcaaggactgatcttgttttctgttccccacagggggttccagccagcatcacattttttagtccctctggcctcacatacagtctcaagcacattcaggagttatctggtgacaatatcgatcaaattaagtttgcagccatcggccccactacggctcgcgcgctggccgcccagggccttcctgtaagctgcactgcagagagccccacgccacaagccctggccactggcatcaggaaggctctccagccccatggctgctgctgagtcagccacctagcgctggccccatgcagcctccctgggctgggctggctctggatggagccaggcatcggcaagggctctcgggagctgctgccgtcagactcctgcctcaagcctgagtggaagcacctgaggaccggggatcgggacctgacctggggctggcctcaggcccacgtgcacgtgactgccctctgtggaagccagcttaaaccctagccctgtgagagcttcctgtgcccagcaggaaggaagtcaaataaaccacactgactacctgtg

SEQ ID NO: 421566 - DNA, 1256 bp, Homo sapiens
ggatggcggtgcgcatgcgcgagcgcctagctgcgcgcagccacccacgcgaccccagtctgaggtgcggggtcctggggcccggcgcgggtggccgccgcggcccctcgggctgcgtggggagggggcttccgcccctgttgtcattgctcctgcagccttttcgctgggactgcgcgacaccgccccccgaccgggtgcccgctgtgtgccaggccgggtgctgggcacggtcccgcgagtgccctataaggactgccaggcaataatgaaggttcttttactgaaggatgcgaaggaagatgactgtggccaggatccgtatatcagggaattaggattatatggacttgaagccactttgatccctgttttatcgtttgagtttttgtctcttcccagtttctctgagaagctttctcatcctgaagattacgggggactcatttttaccagccccagagcagtggaagcagcagagttatgtttggagcaaaacaataaaactgaagtctgggaaaggtctctgaaagaaaaatggaatgccaagtcagtgtatgtggttggaaatgctactgcttctctagtgagtaaaattggcctggatacagaaggagaaacctgtggaaatgcagaaaagcttgcagaatatatttgttccagtaagtagaaaaacatcactccaaatgaagccatttattttttgttgacctcacaaccactacctagggaaaagaatatttcctcagtgcattcttggtggtgagattgattggtgagcatcgtataacccactctgggagcatagcctatttgtatttgtgtatgtctatactttgtgaggtttagcccacttccttctaccccctgtaccaaagaacttgacttgaacataacacaaaataaaacatttgggagataaaaacagtggagagatcacttgagggattccaaagagagcagaggcaggaggtgtgagtgggtactctccccttactgaggactgtcctttcccttctcaggagctacttctgtctctgaattccctctcccagcttgctcccaggtaaagaactgactcatgattgggctgcctgtggacttggatttaaagtggcacttgttctaggggtgttagcatttaaatggggacttagtcttaaactaattatggaattgtaggcttcctgggcagaagatggtgactgggagtggccattgccctgtcctccagataccactgaggttcattgccc

SEQ ID NO: 421567 - DNA, 1141 bp, Homo sapiens
gaaactgagctcagagagggaaaacttgtccataggaacagagctaatagtggtaggctggggctcaagcctaggactggctgactccaaagctcttcctgtctcccttgctctgtgtgcttctaaaagatacttagtccaagtccaaaatatgctcatttctcttccctcaggtgaagaagtcaaaggaatcttttgaagtgaagaaagtgggtttggacgtgcccttatgctgatgaatcattggagtaatatctggggtttagccgcatccttggtggcaaggcggtggggaaagcccctgagggtgaggccagcctgagccccaagggaaaggggctgctgggacctcctgacctcaactcatctccaggagcgcacagggcctcgcacagatgcctcagtctgtaccgctgggagttcgtgccatctcagacctaccctccctacctgggctgtacctaaagagatactgctaggctttctctagaatgtttcatgagccagcactgtgagacattttcaagctaaaaacatacagttcaggagactgtaatctgtggtagaaagtgttcaccatttgctgctagtaaagacggttggccctgtgcttctctggccacttgtgccacatggtgttctcggaagaggcctctccatgcaccagtgtggagaagccctctggaggccaattcaaagagcatctgaggctaagcaactgaaaggaaaaggcctgatggccaacgtgttgctttctgtggaatgttccagactggattgctgggggtcattttctttaacagcagcctagacaggcagtgactctcttttattcagccaggtgttgaaatagctgcagggaagccacagacagttgttccagctttccggatcagagagcactggttgggccccgtgccatgtggccccagccccatgggatcgctcctcaggtcatggagccacacatcagtgtggagggttcgctccaggggttcctggtacaggatgcagatgggtcttgtctggctccaggctttttgtttctaatgttgtttctagagagtcatcatcaccgcataaatggtatcaaagcccttcttttaaaaatgtagaaataaatgtaaatggtagatcttga

SEQ ID NO: 421568 - DNA, 1081 bp, Homo sapiens
aatccaaatacaacaagacaatacaaccaaaataagctagtacgaaggctgggtggctgatcggccgaggagaacctgtggaatgcagaagagcttgcgatatatttgttccagtgaagaagtcaaaggaatcttttgaagtgaagaaagtgggtttggacgtgcccttatgctgatgaatcattggagtaatatctggggtttagccgcatccttggtggcaaggcggtggggaaagcccctgagggtgaggccagcctgagccccaagggaaaggggctgctgggacctcctgacctcaactcatctccaggagcgcacagggcctcgcacagatgcctcagtctgtaccgctgggagttcgtgccatctcagacctaccctccctacctgggctgtacctaaagagatactgctaggctttctctagaatgtttcatgagccagcactgtgagacattttcaagctaaaaacatacagttcaggagactgtaatctgtggtagaaagtgttcaccatttgctgctagtaaagacggttggccctgtgcttctctggccacttgtgccacatggtgttctcggaagaggcctctccatgcaccagtgtggagaagccctctggaggccaattcaaagagcatctgaggctaagcaactgaaaggaaaaggcctgatggccaacgtgttgctttctgtggaatgttccagactggattgctgggggtcattttctttaacagcagcctagacaggcagtgactctcttttattcagccaggtgttgaaatagctgcagggaagccacagacagttgttccagctttccggatcagagagcactggttgggccccgtgccatgtggccccagccccatgggatcgctcctcaggtcatggagccacacatcagtgtggagggttcgctccaggggttcctggtacaggatgcagatgggtcttgtctggctccaggctttttgtttctaatgttgtttctagagagtcatcatcaccgcataaatggtatcaaagcccttcttttaaaaatgtagaaataaatgtaaatggtagatcttga

SEQ ID NO: 421569 - DNA, 916 bp, Homo sapiens
ggatggcggtgcgcatgcgcgagcgcctagctgcgcgcagccacccacgcgaccccagtctgaggtgcggggtcctggggcccggcgcgggtggccgccgcggcccctcgggctgcgtggggagggggcttccgcccctgttgtcattgctcctgcagccttttcgctgggactgcgcgacaccgccccccgaccgggtgcccgctgtgtgccaggccgggtgctgggcacggtcccgcgagtgccctataaggactgccaggcaataatgaaggttcttttactgaaggatgcgaaggaagatgactgtggccaggatccgtatatcagggaattaggattatatggacttgaagccactttgatccctgttttatcgtttgagtttttgtctcttcccagtttctctgagaagctttctcatcctgaagattacgggggactcatttttaccagccccagagcagtggaagcagcagagttatgtttggagcaaaacaataaaactgaaggggagtcctcagcactgcctcttctatttccctgtggaaacctcaaaagagaaatcctgccaaaagcgctcaaggacaaagggattgccatggaaagcataactgtgtatcagacagttgcacacccaggaatccaagggaacctgaacagctactattcccagcagggggttccagccagcatcacattttttagtccctctggcctcacatacagtctcaagcacattcaggagttatctggtgacaatatcgatcaaattaagtttgcagccatcggccccactacggctcgcgcgctggccgcccagggccttcctgtaagctgcactgcagagagccccacgccacaagccctgtgcccagcaggaaggaagtcaaataaaccacactgactacctgtg

SEQ ID NO: 421570 - DNA, 4235 bp, Homo sapiens
ggccgctcgcgcttttctctccttctccaagatggcggcgatcggcggcgttgaggcgggatccgggcgagccgagtgaagacctggtcctgtagacgggaaggagcctggacacagtgacacattctcaaaggccctgcaggaccaccatggcttatgatgactccgtgaagaaagaagattgttttgatggtgatcatacctttgaggacataggacttgcagctggccgaagccaacgagagaaaaaacgttcttacaaagattttttaagggaagaggaagaaattgctgctcaggtcaggaattcttccaagaagaagttgaaggatagtgaactttacttcttggggacggacacacacaagaagaagaggaagcactcctctgatgattactactatggaggacagtggttcttgttctgagtgccgataaaccagtgtgaaggaggagagaggtggagggctggtattttggaggattcagcatagaagaacagtctgcatttgtgatacaccagatatttcgtctttggaatcgtcacagaagaaaaagaaaaagtccagcccacagtctactgatacagctatggacctgttgaaagctatcacttccccactggcagcaggctccaagccctccaaaaagactggggagaaatcctctggctcttcaagccattcggagagtaaaaaggagcaccacaggaagaaagtcagtggaagcagtggggaactacccctagaggatggtgtctcccacaaatcgaaaaaaatgaaacctctctatgtgaacacagagacactgacccttcgggagcctgatggtttaaaaatgaaacttattctgtcaccaaaggagaagggaagcagctctgttgatgaggagtcttttcaatatccctcccaacaagcgactgtgaaaaaatcctcaaagaaatcagctcgggatgagcagggtgctttactcctaggacatgagttacagagctttctgaaaacagcccggaaaaagcacaagtcatcctcagacgcacattcatctcctggccctgaaggctgtgggtctgacgcctcccagttcgcagagtcccacagtgctaaccttgatctttcagggcttgaacctattctggtagaatcagactcatcctctggtggggaactagaggctggggagttagtgatagatgattcttaccgagaaatcaagaagaaaaagaagtcaaagaagagcaaaaagaagaaagacaaggagaagcataaagagaagcgacactccaagtccaagagaagtttaggactttctgccgtgccagtgggagaggtcacagtgacatctggccctcctcccagcatcccatacgctggagcagcagcacctcccctgccacttcctggcctccacacagatgggcatagtgaaaaaaaaaagaaaaaagaagagaaggacaaagagagagagagaggagaaaagccaaaaaagaagaacatgtcggcctaccaggtgttctgtaaagagtatcgcgtgaccattgtggctgaccatccaggtatagattttggggaacttagtaaaaaactggctgaggtgtggaagcaattaccagaaaaagacaaactgatttggaagcaaaaagctcagtatctgcagcacaaacagaacaaagcagaagccacaactgtgaaaaggaaagcatccagctcagaaggttccatgaaagtcaaagcctcttctgtaggagtactgtcaccccagaagaagtccccacccaccaccatgctgttaccagcctcaccagccaaagcccctgagacagagcccattgatgttgctgctcatcttcagctgttgggagagtccctaagcctcattggacaccgtctgcaggaaactgagggtatggtggctgtgtctggcagtttgtcagtgcttctggattccattatctgtgcccttggccccttggcatgtctcaccacacaactacctgaattgaatggctgtcccaaacaggtcttgtcaaacacattagacaacattgcttacatcatgccgggactgtgacagcaaagaatcctgggacagaaaccttatcctacaccattgctggtttgtgtatatatgactgttgcagattccttcagtggcctctggctgtaggttttaaatttttatatctatacatacatatatacatatatatataatgtacaatatatacatagactgtaactactttgcttttaataattttatgaaatggcaaaggtttagccaagaggaaattttggcatgaatacaggcttgggattcttttttctcctgtggtggataaatctgccttaaaaatcaatgtaacttgggggctgggggcttgttctgggtgccaagcgcatctctttatggacagctaaaatgtgattattttccaagctcagttggacctccagacccatcactgaccatttgccttacctgtcttagtctgaaatgtaataggaaagataacgggaagatgccagttgactgaaaattcaaagcctttcaatttgaagtgacctaggtgggaggtgataaaatttgttccctttatagttacggaggtggcttaggtgaattgagtagagggttcattccaattcctactgtataggtgtctgtgtctcaaaatttattgtaatcattggtaccattggtggcctcaacagaggccaaggagttctgtgagccctggcagcaaaaaacaccttggggggtgaagctgtcaatgccaccagttggacctccatacattctgagctaacccagaatctttagtcggcagaattaagtgctggtgtctttcactggcagcatgaagttagccaccaagtcctcacaagccgtgctgcttagttgctcggtggttatggataaactttgcccagcatgatttttgggttcatcttatcagttcccctggtgggcagatacacagtgttctgcattccacatgtaagtgaattgcaaaaacaaaacaaaactcactctcttgtaggtttatttatgtgtgtgtgaatgtgtattttaattatgtgtatttaactctttaaaatctcttagattttaatttatcctgtaaatttctgtatatataatttaataacagaagcctccaccagcaacagcatgtggaagatacagatttgtcatttctcccttccgccctcccttctttccttccttccttccctgtttccttccctctttccttccttcctcctggtctgttccaaaaactctgaatcatctacattttaaggtattttacctcaaaaatgaatcattgtgttaggattctaattctttataaagaacttcatgggcttcaataatgtctagaaagtaaaataaagaggaatgttaccatccccagctgcccttatttccagagaaccagacgtttgtttcccagttggaaagaagacagttgagcacttcaggatggtttttaaatttggtatgagattctctgccaacaccaagctctgagttaactgtgctttcttctcctggccctgacagagcactacagcatcaaagtaaatctttggggacagtgtagcccatctgcatcctatttaatttcttcccttctccccaccagtgttgtcacagggctatgttgcttaaaggtagtctggctgctgaatccctttctcagctcagagcagttttaagatttaattgggaatacagagaaacaggattgtttgagaaccaaaatcaagaggaacagaaatcttaacttgatttcatgtgttagaacattgtaccatgcctcttctgtatctgtggaagtttcctgtttgacacagggtatctaggaggggcggggaagacatggatagtataggaagacattaatcctagcattgtcatttatatacattaatgaaatcctgatgaggacctgctttttgtttgttttcctttgaaacccagccctattgtatttgtatttaaaatttgtacacatttgtataataatctgtaccttgtggtatttggtactattagaggaaaaactttggattcagaccttcttgcagtttttatatcattgttttattttgttttttaaataaattctagtggtttgatccaaatcccattacagttgtataaagaaataaaattttgtacttatattattaaaaatcacatttttaatatttgtaaaccagtct

SEQ ID NO: 421571 - DNA, 4181 bp, Homo sapiens
ggccgctcgcgcttttctctccttctccaagatggcggcgatcggcggcgttgaggcgggatccgggcgagccgagtgaagacctggtcctgtagacgggaaggagcctggacacagtgacacattctcaaaggccctgcaggaccaccatggcttatgatgactccgtgaagaaagaagattgttttgatggtgatcatacctttgaggacataggacttgcagctggccgaagccaacgagagaaaaaacgttcttacaaagattttttaagggaagaggaagaaattgctgctcaggtcaggaattcttccaagaagaagttgaaggatagtgaactttacttcttggggacggacacacacaagaagaagaggaagcactcctctgatgattactactatggaggacagtggttcttgttctgagtgccgataaaccagtgtgaaggaggagagaggtggagggctggtattttggaggattcagcatagaagaacagtctgcatttgtgatacaccagatatttcgtctttggaatcgtcacagaagaaaaagaaaaagtccagcccacagtctactgatacagctatggacctgttgaaagctatcacttccccactggcagcaggctccaagccctccaaaaagactggggagaaatcctctggctcttcaagccattcggagagtaaaaaggagcaccacaggaagaaagtcagtggaagcagtggggaactacccctagaggatggtgtctcccacaaatcgaaaaaaatgaaacctctctatgtgaacacagagacactgacccttcgggagcctgatggtttaaaaatgaaacttattctgtcaccaaaggagaagggaagcagctctgttgatgaggagtcttttcaatatccctcccaacaagcgactgtgaaaaaatcctcaaagaaatcagctcgggatgagcagggtgctttactcctaggacatgagttacagagctttctgaaaacagcccggaaaaagcacaagtcatcctcagacgcacattcatctcctggccctgaaggctgtgggtctgacgcctcccagttcgcagagtcccacagtgctaaccttgatctttcagggcttgaacctattctggtagaatcagactcatcctctggtggggaactagaggctggggagttagtgatagatgattcttaccgagaaatcaagaagaaaaagaagtcaaagaagagcaaaaagaagaaagacaaggagaagcataaagagaagcgacactccaagtccaagagaagtttaggactttctgccgtgccagtgggagaggtcacagtgacatctggccctcctcccagcatcccatacgctggagcagcagcacctcccctgccacttcctggcctccacacagatgggcatagtgaaaaaaaaaagaaaaaagaagagaaggacaaagagagagagagaggagaaaagccaaaaaagaagaacatgtcggcctaccaggtgttctgtaaagagtatcgcgtgaccattgtggctgaccatccaggtatagattttggggaacttagtaaaaaactggctgaggtgtggaagcaattaccagaaaaagacaaactgatttggaagcaaaaagctcagtatctgcagcacaaacagaacaaagcagaagccacaactgtgaaaaggaaagcatccagctcagaaggttccatgaaagtcaaagcctcttctgtaggagtactgtcaccccagaagaagtccccacccaccaccatgctgttaccagcctcaccagccaaagcccctgagacagagcccattgatgttgctgctcatcttcagctgttgggagagtccctaagcctcattggacaccgtctgcaggaaactgagggtatggtggctgtgtctggcagtttgtcagtgcttctggattccattatctgtgcccttggccccttggcatgtctcaccacacaactacctgaattgaatggctgtcccaaacaggtcttgtcaaacacattagacaacattgcttacatcatgccgggactgtgacagcaaagaatcctgggacagaaaccttatcctacaccattgctggtttgtgtatatatgactgttgcagattccttcagtggcctctggctgtaggttttaaatttttatatctatacatacatatatacatatatatataatgtacaatatatacatagactgtaactactttgcttttaataattttatgaaatggcaaaggtttagccaagaggaaattttggcatgaatacaggcttgggattcttttttctcctgtggtggataaatctgccttaaaaatcaatgtaacttgggggctgggggcttgttctgggtgccaagcgcatctctttatggacagctaaaatgtgattattttccaagctcagttggacctccagacccatcactgaccatttgccttacctgtcttagtctgaaatgtaataggaaagataacgggaagatgccagttgactgaaaattcaaagcctttcaatttgaagtgacctaggtgggaggtgataaaatttgttccctttatagttacggaggtggcttaggtgaattgagtagagggttcattccaattcctactgtataggtgtctgtgtctcaaaatttattgtaatcattggtaccattggtggcctcaacagaggccaaggagttctgtgagccctggcagcaactgagctaacccagaatctttagtcggcagaattaagtgctggtgtctttcactggcagcatgaagttagccaccaagtcctcacaagccgtgctgcttagttgctcggtggttatggataaactttgcccagcatgatttttgggttcatcttatcagttcccctggtgggcagatacacagtgttctgcattccacatgtaagtgaattgcaaaaacaaaacaaaactcactctcttgtaggtttatttatgtgtgtgtgaatgtgtattttaattatgtgtatttaactctttaaaatctcttagattttaatttatcctgtaaatttctgtatatataatttaataacagaagcctccaccagcaacagcatgtggaagatacagatttgtcatttctcccttccgccctcccttctttccttccttccttccctgtttccttccctctttccttccttcctcctggtctgttccaaaaactctgaatcatctacattttaaggtattttacctcaaaaatgaatcattgtgttaggattctaattctttataaagaacttcatgggcttcaataatgtctagaaagtaaaataaagaggaatgttaccatccccagctgcccttatttccagagaaccagacgtttgtttcccagttggaaagaagacagttgagcacttcaggatggtttttaaatttggtatgagattctctgccaacaccaagctctgagttaactgtgctttcttctcctggccctgacagagcactacagcatcaaagtaaatctttggggacagtgtagcccatctgcatcctatttaatttcttcccttctccccaccagtgttgtcacagggctatgttgcttaaaggtagtctggctgctgaatccctttctcagctcagagcagttttaagatttaattgggaatacagagaaacaggattgtttgagaaccaaaatcaagaggaacagaaatcttaacttgatttcatgtgttagaacattgtaccatgcctcttctgtatctgtggaagtttcctgtttgacacagggtatctaggaggggcggggaagacatggatagtataggaagacattaatcctagcattgtcatttatatacattaatgaaatcctgatgaggacctgctttttgtttgttttcctttgaaacccagccctattgtatttgtatttaaaatttgtacacatttgtataataatctgtaccttgtggtatttggtactattagaggaaaaactttggattcagaccttcttgcagtttttatatcattgttttattttgttttttaaataaattctagtggtttgatccaaatcccattacagttgtataaagaaataaaattttgtacttatattattaaaaatcacatttttaatatttgtaaaccagtct

SEQ ID NO: 421572 - DNA, 4136 bp, Homo sapiens
ggccgctcgcgcttttctctccttctccaagatggcggcgatcggcggcgttgaggcgggatccgggcgagccgagtgaagattgttttgatggtgatcatacctttgaggacataggacttgcagctggccgaagccaacgagagaaaaaacgttcttacaaagattttttaagggaagaggaagaaattgctgctcaggtcaggaattcttccaagaagaagttgaaggatagtgaactttacttcttggggacggacacacacaagaagaagaggaagcactcctctgatgattactactatggaggacagtggttcttgttctgagtgccgataaaccagtgtgaaggaggagagaggtggagggctggtattttggaggattcagcatagaagaacagtctgcatttgtgatacaccagatatttcgtctttggaatcgtcacagaagaaaaagaaaaagtccagcccacagtctactgatacagctatggacctgttgaaagctatcacttccccactggcagcaggctccaagccctccaaaaagactggggagaaatcctctggctcttcaagccattcggagagtaaaaaggagcaccacaggaagaaagtcagtggaagcagtggggaactacccctagaggatggtgtctcccacaaatcgaaaaaaatgaaacctctctatgtgaacacagagacactgacccttcgggagcctgatggtttaaaaatgaaacttattctgtcaccaaaggagaagggaagcagctctgttgatgaggagtcttttcaatatccctcccaacaagcgactgtgaaaaaatcctcaaagaaatcagctcgggatgagcagggtgctttactcctaggacatgagttacagagctttctgaaaacagcccggaaaaagcacaagtcatcctcagacgcacattcatctcctggccctgaaggctgtgggtctgacgcctcccagttcgcagagtcccacagtgctaaccttgatctttcagggcttgaacctattctggtagaatcagactcatcctctggtggggaactagaggctggggagttagtgatagatgattcttaccgagaaatcaagaagaaaaagaagtcaaagaagagcaaaaagaagaaagacaaggagaagcataaagagaagcgacactccaagtccaagagaagtttaggactttctgccgtgccagtgggagaggtcacagtgacatctggccctcctcccagcatcccatacgctggagcagcagcacctcccctgccacttcctggcctccacacagatgggcatagtgaaaaaaaaaagaaaaaagaagagaaggacaaagagagagagagaggagaaaagccaaaaaagaagaacatgtcggcctaccaggtgttctgtaaagagtatcgcgtgaccattgtggctgaccatccaggtatagattttggggaacttagtaaaaaactggctgaggtgtggaagcaattaccagaaaaagacaaactgatttggaagcaaaaagctcagtatctgcagcacaaacagaacaaagcagaagccacaactgtgaaaaggaaagcatccagctcagaaggttccatgaaagtcaaagcctcttctgtaggagtactgtcaccccagaagaagtccccacccaccaccatgctgttaccagcctcaccagccaaagcccctgagacagagcccattgatgttgctgctcatcttcagctgttgggagagtccctaagcctcattggacaccgtctgcaggaaactgagggtatggtggctgtgtctggcagtttgtcagtgcttctggattccattatctgtgcccttggccccttggcatgtctcaccacacaactacctgaattgaatggctgtcccaaacaggtcttgtcaaacacattagacaacattgcttacatcatgccgggactgtgacagcaaagaatcctgggacagaaaccttatcctacaccattgctggtttgtgtatatatgactgttgcagattccttcagtggcctctggctgtaggttttaaatttttatatctatacatacatatatacatatatatataatgtacaatatatacatagactgtaactactttgcttttaataattttatgaaatggcaaaggtttagccaagaggaaattttggcatgaatacaggcttgggattcttttttctcctgtggtggataaatctgccttaaaaatcaatgtaacttgggggctgggggcttgttctgggtgccaagcgcatctctttatggacagctaaaatgtgattattttccaagctcagttggacctccagacccatcactgaccatttgccttacctgtcttagtctgaaatgtaataggaaagataacgggaagatgccagttgactgaaaattcaaagcctttcaatttgaagtgacctaggtgggaggtgataaaatttgttccctttatagttacggaggtggcttaggtgaattgagtagagggttcattccaattcctactgtataggtgtctgtgtctcaaaatttattgtaatcattggtaccattggtggcctcaacagaggccaaggagttctgtgagccctggcagcaaaaaacaccttggggggtgaagctgtcaatgccaccagttggacctccatacattctgagctaacccagaatctttagtcggcagaattaagtgctggtgtctttcactggcagcatgaagttagccaccaagtcctcacaagccgtgctgcttagttgctcggtggttatggataaactttgcccagcatgatttttgggttcatcttatcagttcccctggtgggcagatacacagtgttctgcattccacatgtaagtgaattgcaaaaacaaaacaaaactcactctcttgtaggtttatttatgtgtgtgtgaatgtgtattttaattatgtgtatttaactctttaaaatctcttagattttaatttatcctgtaaatttctgtatatataatttaataacagaagcctccaccagcaacagcatgtggaagatacagatttgtcatttctcccttccgccctcccttctttccttccttccttccctgtttccttccctctttccttccttcctcctggtctgttccaaaaactctgaatcatctacattttaaggtattttacctcaaaaatgaatcattgtgttaggattctaattctttataaagaacttcatgggcttcaataatgtctagaaagtaaaataaagaggaatgttaccatccccagctgcccttatttccagagaaccagacgtttgtttcccagttggaaagaagacagttgagcacttcaggatggtttttaaatttggtatgagattctctgccaacaccaagctctgagttaactgtgctttcttctcctggccctgacagagcactacagcatcaaagtaaatctttggggacagtgtagcccatctgcatcctatttaatttcttcccttctccccaccagtgttgtcacagggctatgttgcttaaaggtagtctggctgctgaatccctttctcagctcagagcagttttaagatttaattgggaatacagagaaacaggattgtttgagaaccaaaatcaagaggaacagaaatcttaacttgatttcatgtgttagaacattgtaccatgcctcttctgtatctgtggaagtttcctgtttgacacagggtatctaggaggggcggggaagacatggatagtataggaagacattaatcctagcattgtcatttatatacattaatgaaatcctgatgaggacctgctttttgtttgttttcctttgaaacccagccctattgtatttgtatttaaaatttgtacacatttgtataataatctgtaccttgtggtatttggtactattagaggaaaaactttggattcagaccttcttgcagtttttatatcattgttttattttgttttttaaataaattctagtggtttgatccaaatcccattacagttgtataaagaaataaaattttgtacttatattattaaaaatcacatttttaatatttgtaaaccagtct

SEQ ID NO: 421573 - DNA, 4181 bp, Homo sapiens
ggccgctcgcgcttttctctccttctccaagatggcggcgatcggcggcgttgaggcgggatccgggcgagccgagtgaagacctggtcctgtagacgggaaggagcctggacacagtgacacattctcaaaggccctgcaggaccaccatggcttatgatgactccgtgaagaaagaagattgttttgatggtgatcatacctttgaggacataggacttgcagctggccgaagccaacgagagaaaaaacgttcttacaaagattttttaagggaagaggaagaaattgctgctcaggtcaggaattcttccaagaagaagttgaaggatagtgaactttacttcttggggacggacacacacaagaagaagaggaagcactcctctgatgattactactatggaggacagtggttcttgttctgagtgccgataaaccagtgtgaaggaggagagaggtggagggctggtattttggaggattcagcatagaagaacagtctgcatttgtgatacaccagatatttcgtctttggaatcgtcacagaagaaaaagaaaaagtccagcccacagtctactgatacagctatggacctgttgaaagctatcacttccccactggcagcaggctccaagccctccaaaaagactggggagaaatcctctggctcttcaagccattcggagagtaaaaaggagcaccacaggaagaaagtcagtggaagcagtggggaactacccctagaggatggtgtctcccacaaatcgaaaaaaatgaaacctctctatgtgaacacagagacactgacccttcgggagcctgatggtttaaaaatgaaacttattctgtcaccaaaggagaagggaagcagctctgttgatgaggagtcttttcaatatccctcccaacaagcgactgtgaaaaaatcctcaaagaaatcagctcgggatgagcagggtgctttactcctaggacatgagttacagagctttctgaaaacagcccggaaaaagcacaagtcatcctcagacgcacattcatctcctggccctgaaggctgtgggtctgacgcctcccagttcgcagagtcccacagtgctaaccttgatctttcagggcttgaacctattctggtagaatcagactcatcctctggtggggaactagaggctggggagttagtgatagatgattcttaccgagaaatcaagaagaaaaagaagtcaaagaagagcaaaaagaagaaagacaaggagaagcataaagagaagcgacactccaagtccaagagaagtttaggactttctgccgtgccagtgggagaggtcacagtgacatctggccctcctcccagcatcccatacgctggagcagcagcacctcccctgccacttcctggcctccacacagatgggcatagtgaaaaaaaaaagaaaaaagaagagaaggacaaagagagagagagaggagaaaagccaaaaaagaagaacatgtcggcctaccaggtgttctgtaaagagtatcgcgtgaccattgtggctgaccatccaggtatagattttggggaacttagtaaaaaactggctgaggtgtggaagcaattaccagaaaaagacaaactgatttggaagcaaaaagctcagtatctgcagcacaaacagaacaaagcagaagccacaactgtgaaaaggaaagcatccagctcagaaggttccatgaaagtcaaagcctcttctgtaggagtactgtcaccccagaagaagtccccacccaccaccatgctgttaccagcctcaccagccaaagcccctgagacagagcccattgatgttgctgctcatcttcagctgttgggagagtccctaagcctcattggacaccgtctgcaggaaactgagggtatggtggctgtgtctggcagtttgtcagtgcttctggattccattatctgtgcccttggccccttggcatgtctcaccacacaactacctgaattgaatggctgtcccaaacaggtcttgtcaaacacattagacaacattgcttacatcatgccgggactgtgacagcaaagaatcctgggacagaaaccttatcctacaccattgctggtttgtgtatatatgactgttgcagattccttcagtggcctctggctgtaggttttaaatttttatatctatacatacatatatacatatatatataatgtacaatatatacatagactgtaactactttgcttttaataattttatgaaatggcaaaggtttagccaagaggaaattttggcatgaatacaggcttgggattcttttttctcctgtggtggataaatctgccttaaaaatcaatgtaacttgggggctgggggcttgttctgggtgccaagcgcatctctttatggacagctaaaatgtgattattttccaagctcagttggacctccagacccatcactgaccatttgccttacctgtcttagtctgaaatgtaataggaaagataacgggaagatgccagttgactgaaaattcaaagcctttcaatttgaagtgacctaggtgggaggtgatttcattccaattcctactgtataggtgtctgtgtctcaaaatttattgtaatcattggtaccattggtggcctcaacagaggccaaggagttctgtgagccctggcagcaaaaaacaccttggggggtgaagctgtcaatgccaccagttggacctccatacattctgagctaacccagaatctttagtcggcagaattaagtgctggtgtctttcactggcagcatgaagttagccaccaagtcctcacaagccgtgctgcttagttgctcggtggttatggataaactttgcccagcatgatttttgggttcatcttatcagttcccctggtgggcagatacacagtgttctgcattccacatgtaagtgaattgcaaaaacaaaacaaaactcactctcttgtaggtttatttatgtgtgtgtgaatgtgtattttaattatgtgtatttaactctttaaaatctcttagattttaatttatcctgtaaatttctgtatatataatttaataacagaagcctccaccagcaacagcatgtggaagatacagatttgtcatttctcccttccgccctcccttctttccttccttccttccctgtttccttccctctttccttccttcctcctggtctgttccaaaaactctgaatcatctacattttaaggtattttacctcaaaaatgaatcattgtgttaggattctaattctttataaagaacttcatgggcttcaataatgtctagaaagtaaaataaagaggaatgttaccatccccagctgcccttatttccagagaaccagacgtttgtttcccagttggaaagaagacagttgagcacttcaggatggtttttaaatttggtatgagattctctgccaacaccaagctctgagttaactgtgctttcttctcctggccctgacagagcactacagcatcaaagtaaatctttggggacagtgtagcccatctgcatcctatttaatttcttcccttctccccaccagtgttgtcacagggctatgttgcttaaaggtagtctggctgctgaatccctttctcagctcagagcagttttaagatttaattgggaatacagagaaacaggattgtttgagaaccaaaatcaagaggaacagaaatcttaacttgatttcatgtgttagaacattgtaccatgcctcttctgtatctgtggaagtttcctgtttgacacagggtatctaggaggggcggggaagacatggatagtataggaagacattaatcctagcattgtcatttatatacattaatgaaatcctgatgaggacctgctttttgtttgttttcctttgaaacccagccctattgtatttgtatttaaaatttgtacacatttgtataataatctgtaccttgtggtatttggtactattagaggaaaaactttggattcagaccttcttgcagtttttatatcattgttttattttgttttttaaataaattctagtggtttgatccaaatcccattacagttgtataaagaaataaaattttgtacttatattattaaaaatcacatttttaatatttgtaaaccagtct

SEQ ID NO: 421574 - DNA, 4021 bp, Homo sapiens
ggccgctcgcgcttttctctccttctccaagatggcggcgatcggcggcgttgaggcgggatccgggcgagccgagtgaagattgttttgatggtgatcatacctttgaggacataggacttgcagctggccgaagccaacgagagaaaaaacgttcttacaaagattttttaagggaagaggaagaaattgctgctcaggtcaggaattcttccaagaagaagttgaaggatagtgaactttacttcttggggacggacacacacaagaagaagaggaagcactcctctgatgattactactatggagatatttcgtctttggaatcgtcacagaagaaaaagaaaaagtccagcccacagtctactgatacagctatggacctgttgaaagctatcacttccccactggcagcaggctccaagccctccaaaaagactggggagaaatcctctggctcttcaagccattcggagagtaaaaaggagcaccacaggaagaaagtcagtggaagcagtggggaactacccctagaggatggtgtctcccacaaatcgaaaaaaatgaaacctctctatgtgaacacagagacactgacccttcgggagcctgatggtttaaaaatgaaacttattctgtcaccaaaggagaagggaagcagctctgttgatgaggagtcttttcaatatccctcccaacaagcgactgtgaaaaaatcctcaaagaaatcagctcgggatgagcagggtgctttactcctaggacatgagttacagagctttctgaaaacagcccggaaaaagcacaagtcatcctcagacgcacattcatctcctggccctgaaggctgtgggtctgacgcctcccagttcgcagagtcccacagtgctaaccttgatctttcagggcttgaacctattctggtagaatcagactcatcctctggtggggaactagaggctggggagttagtgatagatgattcttaccgagaaatcaagaagaaaaagaagtcaaagaagagcaaaaagaagaaagacaaggagaagcataaagagaagcgacactccaagtccaagagaagtttaggactttctgccgtgccagtgggagaggtcacagtgacatctggccctcctcccagcatcccatacgctggagcagcagcacctcccctgccacttcctggcctccacacagatgggcatagtgaaaaaaaaaagaaaaaagaagagaaggacaaagagagagagagaggagaaaagccaaaaaagaagaacatgtcggcctaccaggtgttctgtaaagagtatcgcgtgaccattgtggctgaccatccaggtatagattttggggaacttagtaaaaaactggctgaggtgtggaagcaattaccagaaaaagacaaactgatttggaagcaaaaagctcagtatctgcagcacaaacagaacaaagcagaagccacaactgtgaaaaggaaagcatccagctcagaaggttccatgaaagtcaaagcctcttctgtaggagtactgtcaccccagaagaagtccccacccaccaccatgctgttaccagcctcaccagccaaagcccctgagacagagcccattgatgttgctgctcatcttcagctgttgggagagtccctaagcctcattggacaccgtctgcaggaaactgagggtatggtggctgtgtctggcagtttgtcagtgcttctggattccattatctgtgcccttggccccttggcatgtctcaccacacaactacctgaattgaatggctgtcccaaacaggtcttgtcaaacacattagacaacattgcttacatcatgccgggactgtgacagcaaagaatcctgggacagaaaccttatcctacaccattgctggtttgtgtatatatgactgttgcagattccttcagtggcctctggctgtaggttttaaatttttatatctatacatacatatatacatatatatataatgtacaatatatacatagactgtaactactttgcttttaataattttatgaaatggcaaaggtttagccaagaggaaattttggcatgaatacaggcttgggattcttttttctcctgtggtggataaatctgccttaaaaatcaatgtaacttgggggctgggggcttgttctgggtgccaagcgcatctctttatggacagctaaaatgtgattattttccaagctcagttggacctccagacccatcactgaccatttgccttacctgtcttagtctgaaatgtaataggaaagataacgggaagatgccagttgactgaaaattcaaagcctttcaatttgaagtgacctaggtgggaggtgataaaatttgttccctttatagttacggaggtggcttaggtgaattgagtagagggttcattccaattcctactgtataggtgtctgtgtctcaaaatttattgtaatcattggtaccattggtggcctcaacagaggccaaggagttctgtgagccctggcagcaaaaaacaccttggggggtgaagctgtcaatgccaccagttggacctccatacattctgagctaacccagaatctttagtcggcagaattaagtgctggtgtctttcactggcagcatgaagttagccaccaagtcctcacaagccgtgctgcttagttgctcggtggttatggataaactttgcccagcatgatttttgggttcatcttatcagttcccctggtgggcagatacacagtgttctgcattccacatgtaagtgaattgcaaaaacaaaacaaaactcactctcttgtaggtttatttatgtgtgtgtgaatgtgtattttaattatgtgtatttaactctttaaaatctcttagattttaatttatcctgtaaatttctgtatatataatttaataacagaagcctccaccagcaacagcatgtggaagatacagatttgtcatttctcccttccgccctcccttctttccttccttccttccctgtttccttccctctttccttccttcctcctggtctgttccaaaaactctgaatcatctacattttaaggtattttacctcaaaaatgaatcattgtgttaggattctaattctttataaagaacttcatgggcttcaataatgtctagaaagtaaaataaagaggaatgttaccatccccagctgcccttatttccagagaaccagacgtttgtttcccagttggaaagaagacagttgagcacttcaggatggtttttaaatttggtatgagattctctgccaacaccaagctctgagttaactgtgctttcttctcctggccctgacagagcactacagcatcaaagtaaatctttggggacagtgtagcccatctgcatcctatttaatttcttcccttctccccaccagtgttgtcacagggctatgttgcttaaaggtagtctggctgctgaatccctttctcagctcagagcagttttaagatttaattgggaatacagagaaacaggattgtttgagaaccaaaatcaagaggaacagaaatcttaacttgatttcatgtgttagaacattgtaccatgcctcttctgtatctgtggaagtttcctgtttgacacagggtatctaggaggggcggggaagacatggatagtataggaagacattaatcctagcattgtcatttatatacattaatgaaatcctgatgaggacctgctttttgtttgttttcctttgaaacccagccctattgtatttgtatttaaaatttgtacacatttgtataataatctgtaccttgtggtatttggtactattagaggaaaaactttggattcagaccttcttgcagtttttatatcattgttttattttgttttttaaataaattctagtggtttgatccaaatcccattacagttgtataaagaaataaaattttgtacttatattattaaaaatcacatttttaatatttgtaaaccagtct

SEQ ID NO: 421575 - DNA, 4120 bp, Homo sapiens
ggccgctcgcgcttttctctccttctccaagatggcggcgatcggcggcgttgaggcgggatccgggcgagccgagtgaagacctggtcctgtagacgggaaggagcctggacacagtgacacattctcaaaggccctgcaggaccaccatggcttatgatgactccgtgaagaaagaagattgttttgatggtgatcatacctttgaggacataggacttgcagctggccgaagccaacgagagaaaaaacgttcttacaaagattttttaagggaagaggaagaaattgctgctcaggtcaggaattcttccaagaagaagttgaaggatagtgaactttacttcttggggacggacacacacaagaagaagaggaagcactcctctgatgattactactatggagatatttcgtctttggaatcgtcacagaagaaaaagaaaaagtccagcccacagtctactgatacagctatggacctgttgaaagctatcacttccccactggcagcaggctccaagccctccaaaaagactggggagaaatcctctggctcttcaagccattcggagagtaaaaaggagcaccacaggaagaaagtcagtggaagcagtggggaactacccctagaggatggtgtctcccacaaatcgaaaaaaatgaaacctctctatgtgaacacagagacactgacccttcgggagcctgatggtttaaaaatgaaacttattctgtcaccaaaggagaagggaagcagctctgttgatgaggagtcttttcaatatccctcccaacaagcgactgtgaaaaaatcctcaaagaaatcagctcgggatgagcagggtgctttactcctaggacatgagttacagagctttctgaaaacagcccggaaaaagcacaagtcatcctcagacgcacattcatctcctggccctgaaggctgtgggtctgacgcctcccagttcgcagagtcccacagtgctaaccttgatctttcagggcttgaacctattctggtagaatcagactcatcctctggtggggaactagaggctggggagttagtgatagatgattcttaccgagaaatcaagaagaaaaagaagtcaaagaagagcaaaaagaagaaagacaaggagaagcataaagagaagcgacactccaagtccaagagaagtttaggactttctgccgtgccagtgggagaggtcacagtgacatctggccctcctcccagcatcccatacgctggagcagcagcacctcccctgccacttcctggcctccacacagatgggcatagtgaaaaaaaaaagaaaaaagaagagaaggacaaagagagagagagaggagaaaagccaaaaaagaagaacatgtcggcctaccaggtgttctgtaaagagtatcgcgtgaccattgtggctgaccatccaggtatagattttggggaacttagtaaaaaactggctgaggtgtggaagcaattaccagaaaaagacaaactgatttggaagcaaaaagctcagtatctgcagcacaaacagaacaaagcagaagccacaactgtgaaaaggaaagcatccagctcagaaggttccatgaaagtcaaagcctcttctgtaggagtactgtcaccccagaagaagtccccacccaccaccatgctgttaccagcctcaccagccaaagcccctgagacagagcccattgatgttgctgctcatcttcagctgttgggagagtccctaagcctcattggacaccgtctgcaggaaactgagggtatggtggctgtgtctggcagtttgtcagtgcttctggattccattatctgtgcccttggccccttggcatgtctcaccacacaactacctgaattgaatggctgtcccaaacaggtcttgtcaaacacattagacaacattgcttacatcatgccgggactgtgacagcaaagaatcctgggacagaaaccttatcctacaccattgctggtttgtgtatatatgactgttgcagattccttcagtggcctctggctgtaggttttaaatttttatatctatacatacatatatacatatatatataatgtacaatatatacatagactgtaactactttgcttttaataattttatgaaatggcaaaggtttagccaagaggaaattttggcatgaatacaggcttgggattcttttttctcctgtggtggataaatctgccttaaaaatcaatgtaacttgggggctgggggcttgttctgggtgccaagcgcatctctttatggacagctaaaatgtgattattttccaagctcagttggacctccagacccatcactgaccatttgccttacctgtcttagtctgaaatgtaataggaaagataacgggaagatgccagttgactgaaaattcaaagcctttcaatttgaagtgacctaggtgggaggtgataaaatttgttccctttatagttacggaggtggcttaggtgaattgagtagagggttcattccaattcctactgtataggtgtctgtgtctcaaaatttattgtaatcattggtaccattggtggcctcaacagaggccaaggagttctgtgagccctggcagcaaaaaacaccttggggggtgaagctgtcaatgccaccagttggacctccatacattctgagctaacccagaatctttagtcggcagaattaagtgctggtgtctttcactggcagcatgaagttagccaccaagtcctcacaagccgtgctgcttagttgctcggtggttatggataaactttgcccagcatgatttttgggttcatcttatcagttcccctggtgggcagatacacagtgttctgcattccacatgtaagtgaattgcaaaaacaaaacaaaactcactctcttgtaggtttatttatgtgtgtgtgaatgtgtattttaattatgtgtatttaactctttaaaatctcttagattttaatttatcctgtaaatttctgtatatataatttaataacagaagcctccaccagcaacagcatgtggaagatacagatttgtcatttctcccttccgccctcccttctttccttccttccttccctgtttccttccctctttccttccttcctcctggtctgttccaaaaactctgaatcatctacattttaaggtattttacctcaaaaatgaatcattgtgttaggattctaattctttataaagaacttcatgggcttcaataatgtctagaaagtaaaataaagaggaatgttaccatccccagctgcccttatttccagagaaccagacgtttgtttcccagttggaaagaagacagttgagcacttcaggatggtttttaaatttggtatgagattctctgccaacaccaagctctgagttaactgtgctttcttctcctggccctgacagagcactacagcatcaaagtaaatctttggggacagtgtagcccatctgcatcctatttaatttcttcccttctccccaccagtgttgtcacagggctatgttgcttaaaggtagtctggctgctgaatccctttctcagctcagagcagttttaagatttaattgggaatacagagaaacaggattgtttgagaaccaaaatcaagaggaacagaaatcttaacttgatttcatgtgttagaacattgtaccatgcctcttctgtatctgtggaagtttcctgtttgacacagggtatctaggaggggcggggaagacatggatagtataggaagacattaatcctagcattgtcatttatatacattaatgaaatcctgatgaggacctgctttttgtttgttttcctttgaaacccagccctattgtatttgtatttaaaatttgtacacatttgtataataatctgtaccttgtggtatttggtactattagaggaaaaactttggattcagaccttcttgcagtttttatatcattgttttattttgttttttaaataaattctagtggtttgatccaaatcccattacagttgtataaagaaataaaattttgtacttatattattaaaaatcacatttttaatatttgtaaaccagtct

SEQ ID NO: 421576 - DNA, 2804 bp, Homo sapiens
ggccgctcgcgcttttctctccttctccaagatggcggcgatcggcggcgttgaggcgggatccgggcgagccgagtgaagacctggtcctgtagacgggaaggagcctggacacagtgacacattctcaaaggccctgcaggaccaccatggcttatgatgactccgtgaagaaagaagattgttttgatggtgatcatacctttgaggacataggacttgcagctggccgaagccaacgagagaaaaaacgttcttacaaagattttttaagggaagaggaagaaattgctgctcaggtcaggaattcttccaagaagaagttgaaggatagtgaactttacttcttggggacggacacacacaagaagaagaggaagcactcctctgatgattactactatggaggacagtggttcttgttctgagtgccgataaaccagtgtgaaggaggagagaggtggagggctggtattttggaggattcagcatagaagaacagtctgcatttgtgatacaccagatatttcgtctttggaatcgtcacagaagaaaaagaaaaagtccagcccacagtctactgatacagctatggacctgttgaaagctatcacttccccactggcagcaggctccaagccctccaaaaagactggggagaaatcctctggctcttcaagccattcggagagtaaaaaggagcaccacaggaagaaagtcagtggaagcagtggggaactacccctagaggatggtgtctcccacaaatcgaaaaaaatgaaacctctctatgtgaacacagagacactgacccttcgggagcctgatggtttaaaaatgaaacttattctgtcaccaaaggagaagggaagcagctctgttgatgaggagtcttttcaatatccctcccaacaagcgactgtgaaaaaatcctcaaagaaatcagctcgggatgagcagggtgctttactcctaggacatgagttacagagctttctgaaaacagcccggaaaaagcacaagtcatcctcagacgcacattcatctcctggccctgaaggctgtgggtctgacgcctcccagttcgcagagtcccacagtgctaaccttgatctttcagggcttgaacctattctggtagaatcagactcatcctctggtggggaactagaggctggggagttagtgatagatgattcttaccgagaaatcaagaagaaaaagaagtcaaagaagagcaaaaagaagaaagacaaggagaagcataaagagaagcgacactccaagtccaagagaagtttaggactttctgccgtgccagtgggagaggtcacagtgacatctggccctcctcccagcatcccatacgctggagcagcagcacctcccctgccacttcctggcctccacacagatgggcatagtgaaaaaaaaaagaaaaaagaagagaaggacaaagagagagagagaggagaaaagccaaaaaagaagaacatgtcggcctaccaggtgttctgtaaagagtatcgcgtgaccattgtggctgaccatccaggtatagattttggggaacttagtaaaaaactggctgaggtgtggaagcaattaccagaaaaagacaaactgatttggaagcaaaaagctcagtatctgcagcacaaacagaacaaagcagaagccacaactgtgaaaaggaaagcatccagctcagaaggttccatgaaagtcaaagcctcttctgtaggagtactgtcaccccagaagaagtccccacccaccaccatgctgttaccagcctcaccagccaaagcccctgagacagagcccattgatgttgctgctcatcttcagctgttgggagagtccctaagcctcattggacaccgtctgcaggaaactgagggtatggtggctgtgtctggcagtttgtcagtgcttctggattccattatctgtgcccttggccccttggcatgtctcaccacacaactacctgaattgaatggctgtcccaaacaggtcttgtcaaacacattagacaacattgcttacatcatgccgggactgtgacagcaaagaatcctgggacagaaaccttatcctacaccattgctggtttgtgtatatatgactgttgcagattccttcagtggcctctggctgtaggttttaaatttttatatctatacatacatatatacatatatatataatgtacaatatatacatagactgtaactactttgcttttaataattttatgaaatggcaaaggtttagccaagaggaaattttggcatgaatacaggcttgggattcttttttctcctgtggtggataaatctgccttaaaaatcaatgtaacttgggggctgggggcttgttctgggtgccaagcgcatctctttatggacagctaaaatgtgattattttccaagctcagttggacctccagacccatcactgaccatttgccttacctgtcttagtctgaaatgtaataggaaagataacgggaagatgccagttgactgaaaattcaaagcctttcaatttgaagtgacctaggtgggaggtgatttcattccaattcctactgtataggtgtctgtgtctcaaaatttattgtaatcattggtaccattggtggcctcaacagaggccaaggagttctgtgagccctggcagcaaaaaacaccttggggggtgaagctgtctatttcatatctccgatgctcattccactctgagctacgtcaccacctttttatgactctcttcacatgccgtcgtcttttactcg

SEQ ID NO: 421577 - DNA, 2847 bp, Homo sapiens
ctcagctcgctacctgttacatgtagcatagtgacgaacacaagaacaagaagacaaggaccacgcagtagagagagcatccgagaaaaagccaaaaaagaagaacatgtcggcctaccaggtgttctgtaaagagtatcgcgtgaccattgtggctgaccatccaggtatagattttggggaacttagtaaaaaactggctgaggtgtggaagcaattaccagaaaaagacaaactgatttggaagcaaaaagctcagtatctgcagcacaaacagaacaaagcagaagccacaactgtgaaaaggaaagcatccagctcagaaggttccatgaaagtcaaagcctcttctgtaggagtactgtcaccccagaagaagtccccacccaccaccatgctgttaccagcctcaccagccaaagcccctgagacagagcccattgatgttgctgctcatcttcagctgttgggagagtccctaagcctcattggacaccgtctgcaggaaactgagggtatggtggctgtgtctggcagtttgtcagtgcttctggattccattatctgtgcccttggccccttggcatgtctcaccacacaactacctgaattgaatggctgtcccaaacaggtcttgtcaaacacattagacaacattgcttacatcatgccgggactgtgacagcaaagaatcctgggacagaaaccttatcctacaccattgctggtttgtgtatatatgactgttgcagattccttcagtggcctctggctgtaggttttaaatttttatatctatacatacatatatacatatatatataatgtacaatatatacatagactgtaactactttgcttttaataattttatgaaatggcaaaggtttagccaagaggaaattttggcatgaatacaggcttgggattcttttttctcctgtggtggataaatctgccttaaaaatcaatgtaacttgggggctgggggcttgttctgggtgccaagcgcatctctttatggacagctaaaatgtgattattttccaagctcagttggacctccagacccatcactgaccatttgccttacctgtcttagtctgaaatgtaataggaaagataacgggaagatgccagttgactgaaaattcaaagcctttcaatttgaagtgacctaggtgggaggtgataaaatttgttccctttatagttacggaggtggcttaggtgaattgagtagagggttcattccaattcctactgtataggtgtctgtgtctcaaaatttattgtaatcattggtaccattggtggcctcaacagaggccaaggagttctgtgagccctggcagcaaaaaacaccttggggggtgaagctgtcaatgccaccagttggacctccatacattctgagctaacccagaatctttagtcggcagaattaagtgctggtgtctttcactggcagcatgaagttagccaccaagtcctcacaagccgtgctgcttagttgctcggtggttatggataaactttgcccagcatgatttttgggttcatcttatcagttcccctggtgggcagatacacagtgttctgcattccacatgtaagtgaattgcaaaaacaaaacaaaactcactctcttgtaggtttatttatgtgtgtgtgaatgtgtattttaattatgtgtatttaactctttaaaatctcttagattttaatttatcctgtaaatttctgtatatataatttaataacagaagcctccaccagcaacagcatgtggaagatacagatttgtcatttctcccttccgccctcccttctttccttccttccttccctgtttccttccctctttccttccttcctcctggtctgttccaaaaactctgaatcatctacattttaaggtattttacctcaaaaatgaatcattgtgttaggattctaattctttataaagaacttcatgggcttcaataatgtctagaaagtaaaataaagaggaatgttaccatccccagctgcccttatttccagagaaccagacgtttgtttcccagttggaaagaagacagttgagcacttcaggatggtttttaaatttggtatgagattctctgccaacaccaagctctgagttaactgtgctttcttctcctggccctgacagagcactacagcatcaaagtaaatctttggggacagtgtagcccatctgcatcctatttaatttcttcccttctccccaccagtgttgtcacagggctatgttgcttaaaggtagtctggctgctgaatccctttctcagctcagagcagttttaagatttaattgggaatacagagaaacaggattgtttgagaaccaaaatcaagaggaacagaaatcttaacttgatttcatgtgttagaacattgtaccatgcctcttctgtatctgtggaagtttcctgtttgacacagggtatctaggaggggcggggaagacatggatagtataggaagacattaatcctagcattgtcatttatatacattaatgaaatcctgatgaggacctgctttttgtttgttttcctttgaaacccagccctattgtatttgtatttaaaatttgtacacatttgtataataatctgtaccttgtggtatttggtactattagaggaaaaactttggattcagaccttcttgcagtttttatatcattgttttattttgttttttaaataaattctagtggtttgatccaaatcccattacagttgtataaagaaataaaattttgtacttatattattaaaaatcacatttttaatatttgtaaaccagtct

SEQ ID NO: 421578 - DNA, 906 bp, Homo sapiens
cgttcagggcgtctcggctttccccgctgctgcttctgctaggcccagtgcgagaccagagcacgagcgactcccgtcgtccccggccaggcagatgttggcctagtcctggcgcgaacgaagcgcgctatttccctgcttcctctaggccaagcctgctttacggcagggcccgcctcgggagcgagcacagaccggggcagcgaggccagccaggcgccgacgaggtccccgaacgcgcacgcgctccgttcagctccgggtggcggccgccggagtagacgttagccatggaaaccgagagctggcccgggcggggccgcggtgagctcgttattcggccgccgcagcttttctgcctccgcattcgggcactaaccaacctcccggcgggatcgcccagcccgggtttacctgcaaaaatgcggtccctgggatgccttcgcgtcttctcttccctcgggtgacttgaggtacgttcgttgtccgacgtccacctcgggacttcttcggcatcttaatgtccaagcctgtgcggagagccaagttgttctaggggctttcattgccacaagaaacatatttttcgtttttcgttgcaaaacctttaagtgcaattattgcgcttaatgaactcagtcattagagatagtaattcagtgtgattttaactttcctttgaaagactactttagcctgttgaattgtagcattttgtttctaagagactcgtacgaaatggaatatggcacacccacccggagctgtgtccgttaggtagaactgtactctcgcaatatctccaactaaacctcttttgtccgaattgttcaactcatggccccctgaacgtgaagcgctccttccccactgatctcgacctctgtccccacaacctcttgtctc

SEQ ID NO: 421579 - DNA, 498 bp, Homo sapiens
  misc_feature (5)..(5): n is a, c, g, or t
  misc_feature (37)..(37): n is a, c, g, or t
  misc_feature (39)..(39): n is a, c, g, or t
  misc_feature (41)..(41): n is a, c, g, or t
  misc_feature (49)..(49): n is a, c, g, or t
  misc_feature (56)..(56): n is a, c, g, or t
  misc_feature (102)..(102): n is a, c, g, or t
  misc_feature (115)..(115): n is a, c, g, or t
  misc_feature (117)..(117): n is a, c, g, or t
  misc_feature (131)..(131): n is a, c, g, or t
  misc_feature (231)..(237): n is a, c, g, or t
  misc_feature (259)..(259): n is a, c, g, or t
  misc_feature (265)..(265): n is a, c, g, or t
  misc_feature (299)..(299): n is a, c, g, or t
  misc_feature (378)..(378): n is a, c, g, or t
  misc_feature (478)..(478): n is a, c, g, or t
  misc_feature (487)..(487): n is a, c, g, or t
tacancttgtaagacccagctactcgggagcccgagncnangaggattnctttgancctgcccagggagcgttgagcccacagtgggctatgattgggaatnccggccttggagncncatctatgtcaacncacttacggttattagtaatgttcatcatgtctgctggaacagctatagcatcatatttcattccaagcactgttggtgtggttcttttcatgactggannnnnnnggatactttcctaacccagagnggccanaggagcacaggacgcccaggccgagggcagtgangcttgcagacccaggctgtgcaacccccacagcaggtctcctcacgggatagatagactattggccccaattcctcagncctacatatgcacccaccccttgccatggtttcgttgtgggttggagggtacttttcccagcccctggctttgggctttgcccacgtgtcttgctctggncatggaatnaagcaacaaat

SEQ ID NO: 421580 - DNA, 3897 bp, Homo sapiens
cgttcagggcgtctcggctttccccgctgctgcttctgctaggcccagtgcgagaccagagcacgagcgactcccgtcgtccccggccaggcagatgttggcctagtcctggcgcgaacgaagcgcgctatttccctgcttcctctaggccaagcctgctttacggcagggcccgcctcgggagcgagcacagaccggggcagcgaggccagccaggcgccgacgaggtccccgaacgcgcacgcgctccgttcagctccgggtggcggccgccggagtagacgttagccatggaaaccgagagctggcccgggcggggccgcggtgagctcgttattcggccgccgcagcttttctgcctccgcattcgggcactaaccaacctcccggcgggatcgcccagcccgggtttacctgcaaaaatgcggtccctgggatgccttcgcgtcttctcttccctcgggtgacttgaggtttgtggtaaatatgccagctctagaacacatgaatcagattttacacatcttgtttgtatttttaccctttctgtgggcacttgggactctgcccccacccgatgcacttctcttatgggcaatggagcaggttttagagttcggccttggaggctcatctatgtcaacccacttacggttattagtaatgttcatcatgtctgctggaacagctatagcatcatatttcattccaagcactgttggtgtggttcttttcatgactggatttggtttcttgctgagtctgaacttaagtgatatgggtcacaaaattggaaccaaatctaaggatttacccagtggtccggaaaaacatttttcatggaaggaatgccttttctacatcattatattagtcttggctcttttagaaactagcttgcttcatcactttgctggcttctcacagatttctaaaagcaattcccaggctattgtgggctatggtttgatgatattacttataatactgtggatacttagagaaattcaaagcgtatatatcattggaattttccgaaatcccttttatccgaaggatgtgcaaactgtgactgtattctttgagaagcaaactaggctcatgaagattggtattgtcagacggattttgctaactttagtatcaccttttgccatgatagcatttctttcattggacagttccttacaagggctccactcagtgtctgtctgtattggattcacaagagcctttagaatggtatggcagaatacagaaaatgctttattggagacagtcattgtatcaacagtacacttgatctccagtacagacatatggtggaacagaagcctggatacaggactcagactcttactggttggtatcatacgtgatcgtttgattcagttcatctctaaattgcagtttgccgtgactgtgcttttgacatcatggacagagaaaaaacaacgtcgaaaaacaactgccactttatgtatactcaacattgtcttttctccattcgtgttggtcatcatagttttttctacactactctcttctcccttactccctcttttcacccttcctgtgttcttggtggggtttccccgacctattcagagttggccaggagcagcaggcaccacagcctgtgtgtgtgcagatacagtgtactactaccaaatggtgcccaggttgactgctgtactgcagactgcaatggcagctggaagtttaggtctcctcctacctggatctcattacttgggccgttttcaggatcgtttaatgtggataatgattctggaatgtggctatacttactgctctattaacattaaggggttagaattgcaggaaacatcctgtcatactgcagaagctcgcagagttgatgaagtttttgaagatgcttttgagcaagaatacacaagagtatgttcccttaatgaacactttggaaatgtcttgacaccctgtactgttttgcctgtgaaattgtattctgatgccaggaatgttctatcaggcataattgattctcatgaaaacttaaaagaatttaaaggtgacctcattaaagtacttgtgtggatacttgttcaatactgctccaaaaggcctggcatgaaagagaatgttcacaacactgaaaataaagggaaagcacctctaatgttgcctgctttgaacactttgccacctcccaaatccccagaagacatagacagtttaaattcagaaacttttaatgactggtctgatgataatatttttgatgatgagccaactatcaaaaaagtaatagaagaaaaacatcagttgaaagatttgccaggtacaaatttgtttattccaggatcagtagaatcacagagggttggtgatcattctacaggcactgttcctgaaaacgatctttacaaagcagttctattaggataccctgctgttgacaaaggaaaacaagaggacatgccatatattcctctcatggagttcagttgttcacattctcacttagtatgcttacccgcagagtggaggactagctgtatgcccagttccaaaatgaaggagatgagctcgttatttccagaagactggtaccaatttgttctaaggcagttggaatgttatcattcagaagagaaggcctcaaatgtactggaagaaattgccaaggacaaagttttaaaagacttttatgttcatacagtaatgacttgttattttagtttatttggaatagacaatatggctcctagtcctggtcatatattgagagtttacggtggtgttttgccttggtctgttgctttggactggctcacagaaaagccagaactgtttcaactagcactgaaagcattcaggtatactctgaaactaatgattgataaagcaagtttaggtccaatagaagactttagagaactgattaagtaccttgaagaatatgaacgtgactggtacattggtttggtatctgatgaaaagtggaaggaagcaattttacaagaaaagccatacttgttttctctggggtatgattctaatatgggaatttacactgggagagtgcttagccttcaagaattattgatccaagtgggaaagttaaatcctgaagctgttagaggtcagtgggccaatctttcatgggaattactttatgccacaaacgatgatgaagaacgttatagtatacaagctcatccactacttttaagaaatcttacggtacaagcagcagaacctcccctgggatatccgatttattcttcaaaacctctccacatacatttgtattagagctcattttgactgtaatgtcatcaaatgcaatgtttttattttttcatcctaaaaaagtaactgtgattcttgtaacttgaggacttctccacacccccattcagatgcctgagaacagctaagctccgtaaagttggttctcttagccatcttaatggttctaaaaaacagcaaaaacatctttatgtctaagataaaagaactatttggccaatatttgtgccctctggactttagtaggctttggtaaatgtgagaaaacttttgtagaattatcatataatgaattttgtaatgctttcttaaatgtgttataggtgaattgccatacaaagttaacagctatgtaatttttacatacttaagagataaacatatcagtgttctaagtagtgataatggatcctgttgaaggttaacataatgtgtatatatttgtttgaaatataatttatagtattttcaaatgtgctgatttattttgacatctaatatctgaatgtttttgtatcaagtagtttgttttcatagacttcaattcataaactttaaaaaacttttaataaaatattttccttccttttcaaaaaa

SEQ ID NO: 421581 - DNA, 2190 bp, Homo sapiens
caagacagacactcgggtaaacagatcagtgcaaacaagattgcggcataagccatttcggatcgtttaatgtggataatgattctggaatgtggctatacttactgctctattaacattaaggggttagaattgcaggaaacatcctgtcatactgcagaagctcgcagagttgatgaagtttttgaagatgcttttgagcaagaatacacaagagtatgttcccttaatgaacactttggaaatgtcttgacaccctgtactgttttgcctgtgaaattgtattctgatgccaggaatgttctatcaggcataattgattctcatgaaaacttaaaagaatttaaaggtgacctcattaaagtacttgtgtggatacttgttcaatactgctccaaaaggcctggcatgaaagagaatgttcacaacactgaaaataaagggaaagcacctctaatgttgcctgctttgaacactttgccacctcccaaatccccagaagacatagacagtttaaattcagaaacttttaatgactggtctgatgataatatttttgatgatgagccaactatcaaaaaagtaatagaagaaaaacatcagttgaaagatttgccaggtacaaatttgtttattccaggatcagtagaatcacagagggttggtgatcattctacaggcactgttcctgaaaacgatctttacaaagcagttctattaggataccctgctgttgacaaaggaaaacaagaggacatgccatatattcctctcatggagttcagttgttcacattctcacttagtatgcttacccgcagagtggaggactagctgtatgcccagttccaaaatgaaggagatgagctcgttatttccagaagactggtaccaatttgttctaaggcagttggaatgttatcattcagaagagaaggcctcaaatgtactggaagaaattgccaaggacaaagttttaaaagacttttatgttcatacagtaatgacttgttattttagtttatttggaatagacaatatggctcctagtcctggtcatatattgagagtttacggtggtgttttgccttggtctgttgctttggactggctcacagaaaagccagaactgtttcaactagcactgaaagcattcaggtatactctgaaactaatgattgataaagcaagtttaggtccaatagaagactttagagaactgattaagtaccttgaagaatatgaacgtgactggtacattggtttggtatctgatgaaaagtggaaggaagcaattttacaagaaaagccatacttgttttctctggggtatgattctaatatgggaatttacactgggagagtgcttagccttcaagaattattgatccaagtgggaaagttaaatcctgaagctgttagaggtcagtgggccaatctttcatgggaattactttatgccacaaacgatgatgaagaacgttatagtatacaagctcatccactacttttaagaaatcttacggtacaagcagcagaacctcccctgggatatccgatttattcttcaaaacctctccacatacatttgtattagagctcattttgactgtaatgtcatcaaatgcaatgtttttattttttcatcctaaaaaagtaactgtgattcttgtaacttgaggacttctccacacccccattcagatgcctgagaacagctaagctccgtaaagttggttctcttagccatcttaatggttctaaaaaacagcaaaaacatctttatgtctaagataaaagaactatttggccaatatttgtgccctctggactttagtaggctttggtaaatgtgagaaaacttttgtagaattatcatataatgaattttgtaatgctttcttaaatgtgttataggtgaattgccatacaaagttaacagctatgtaatttttacatacttaagagataaacatatcagtgttctaagtagtgataatggatcctgttgaaggttaacataatgtgtatatatttgtttgaaatataatttatagtattttcaaatgtgctgatttattttgacatctaatatctgaatgtttttgtatcaagtagtttgttttcatagacttcaattcataaactttaaaaaacttttaataaaatattttccttccttttcaaaaaa

SEQ ID NO: 421582 - DNA, 4211 bp, Homo sapiens
cgttcagggcgtctcggctttccccgctgctgcttctgctaggcccagtgcgagaccagagcacgagcgactcccgtcgtccccggccaggcagatgttggcctagtcctggcgcgaacgaagcgcgctatttccctgcttcctctaggccaagcctgctttacggcagggcccgcctcgggagcgagcacagaccggggcagcgaggccagccaggcgccgacgaggtccccgaacgcgcacgcgctccgttcagctccgggtggcggccgccggagtagacgttagccatggaaaccgagagctggcccgggcggggccgcggtgagctcgttattcggccgccgcagcttttctgcctccgcattcgggcactaaccaacctcccggcgggatcgcccagcccgggtttacctgcaaaaatgcggtccctgggatgccttcgcgtcttctcttccctcgggtgacttgaggtttgtggtaaatatgccagctctagaacacatgaatcagattttacacatcttgtttgtatttttaccctttctgtgggcacttgggactctgcccccacccgatgcacttctcttatgggcaatggagcaggttttagagttcggccttggaggctcatctatgtcaacccacttacggttattagtaatgttcatcatgtctgctggaacagctatagcatcatatttcattccaagcactgttggtgtggttcttttcatgactggatttggtttcttgctgagtctgaacttaagtgatatgggtcacaaaattggaaccaaatctaaggatttacccagtggtccggaaaaacatttttcatggaaggaatgccttttctacatcattatattagtcttggctcttttagaaactagcttgcttcatcactttgctggcttctcacagatttctaaaagcaattcccaggctattgtgggctatggtttgatgatattacttataatactgtggatacttagagaaattcaaagcgtatatatcattggaattttccgaaatcccttttatccgaaggatgtgcaaactgtgactgtattctttgagaagcaaactaggctcatgaagattggtattgtcagacggattttgctaactttagtatcaccttttgccatgatagcatttctttcattggacagttccttacaagggctccactcagtgtctgtctgtattggattcacaagagcctttagaatggtatggcagaatacagaaaatgctttattggagacagtcattgtatcaacagtacacttgatctccagtacagacatatggtggaacagaagcctggatacaggactcagactcttactggttggtatcatacgtgatcgtttgattcagttcatctctaaattgcagtttgccgtgactgtgcttttgacatcatggacagagaaaaaacaacgtcgaaaaacaactgccactttatgtatactcaacattgtcttttctccattcgtgttggtcatcatagttttttctacactactctcttctcccttactccctcttttcacccttcctgtgttcttggtggggtttccccgacctattcagagttggccaggagcagcaggcaccacagcctgtgtgtgtgcagatacagtgtactactaccaaatggtgcccaggttgactgctgtactgcagactgcaatggcagctggaagtttaggtctcctcctacctggatctcattacttgggccgttttcaggatcgtttaatgtggataatgattctggaatgtggctatacttactgctctattaacattaaggggttagaattgcaggaaacatcctgtcatactgcagaagctcgcagagttgatgaagtttttgaagatgcttttgagcaagaatacacaagagtatgttcccttaatgaacactttggaaatgtcttgacaccctgtactgttttgcctgtgaaattgtattctgatgccaggaatgttctatcaggcataattgattctcatgaaaacttaaaagaatttaaaggtgacctcattaaagtacttgtgtggatacttgttcaatactgctccaaaaggcctggcatgaaagagaatgttcacaacactgaaaataaagggaaagcacctctaatgttgcctgctttgaacactttgccacctcccaaatccccagaagacatagacagtttaaattcagaaacttttaatgactggtctgatgataatatttttgatgatgagccaactatcaaaaaagtaatagaagaaaaacatcagttgaaagatttgccaggtacaaatttgtttattccaggatcagtagaatcacagagggttggtgatcattctacaggcactgttcctgaaaacgatctttacaaagcagttctattaggataccctgctgttgacaaaggaaaacaagaggacatgccatatattcctctcatggagttcagttgttcacattctcacttagtatgcttacccgcagagtggaggactagctgtatgcccagttccaaaatgaaggagatgagctcgttatttccagaagactggtaccaatttgttctaaggcagttggaatgttatcattcagaagagaaggcctcaaatgtactggaagaaattgccaaggacaaagttttaaaagacttttatgttcatacagtaatgacttgttattttagtttatttggaatagacaatatggctcctagtcctggtcatatattgagagtttacggtggtgttttgccttggtctgttgctttggactggctcacagaaaagccagaactgtttcaactagcactgaaagcattcaggtatactctgaaactaatgattgataaagcaagtttaggtccaatagaagactttagagaactgattaagtaccttgaagaatatgaacgtgactggtacattggtttggtatctgatgaaaagtggaaggaagcaattttacaagaaaagccatacttgttttctctggggtatgattctaatatgtatttatgactatgcatcgctgaggcaacagatcagaaaaggcagacaaagagaagtgactaagattttgcctaatggtgattgagatggctgccaggaaacttttatttaaagaaccaaggaagtagaggtaattcttgattctgaatacaggcaacttgtgtacatttttaaacactactttctgttttttgaacttgggaaaagtttgcctaattacaatgcaatttttctctaagtttatgaataaaatataaagacctaaatggaatctcttttctttttctcctcctcctaccctttttactttaaagggaatttacactgggagagtgcttagccttcaagaattattgatccaagtgggaaagttaaatcctgaagctgttagaggtcagtgggccaatctttcatgggaattactttatgccacaaacgatgatgaagaacgttatagtatacaagctcatccactacttttaagaaatcttacggtacaagcagcagaacctcccctgggatatccgatttattcttcaaaacctctccacatacatttgtattagagctcattttgactgtaatgtcatcaaatgcaatgtttttattttttcatcctaaaaaagtaactgtgattcttgtaacttgaggacttctccacacccccattcagatgcctgagaacagctaagctccgtaaagttggttctcttagccatcttaatggttctaaaaaacagcaaaaacatctttatgtctaagataaaagaactatttggccaatatttgtgccctctggactttagtaggctttggtaaatgtgagaaaacttttgtagaattatcatataatgaattttgtaatgctttcttaaatgtgttataggtgaattgccatacaaagttaacagctatgtaatttttacatacttaagagataaacatatcagtgttctaagtagtgataatggatcctgttgaaggttaacataatgtgtatatatttgtttgaaatataatttatagtattttcaaatgtgctgatttattttgacatctaatatctgaatgtttttgtatcaagtagtttgttttcatagacttcaattcataaactttaaaaaacttttaataaaatattttccttccttttcaaaaaa

SEQ ID NO: 421583 - DNA, 2956 bp, Homo sapiens
cgttcagggcgtctcggctttccccgctgctgcttctgctaggcccagtgcgagaccagagcacgagcgactcccgtcgtccccggccaggcagatgttggcctagtcctggcgcgaacgaagcgcgctatttccctgcttcctctaggccaagcctgctttacggcagggcccgcctcgggagcgagcacagaccggggcagcgaggccagccaggcgccgacgaggtccccgaacgcgcacgcgctccgttcagctccgggtggcggccgccggagtagacgttagccatggaaaccgagagctggcccgggcggggccgcggtgagctcgttattcggccgccgcagcttttctgcctccgcattcgggcactaaccaacctcccggcgggatcgcccagcccgggtttacctgcaaaaatgcggtccctgggatgccttcgcgtcttctcttccctcgggtgacttgaggtttgtggtaaatatgccagctctagaacacatgaatcagattttacacatcttgtttgtatttttaccctttctgtgggcacttgggactctgcccccacccgatgcacttctcttatgggcaatggagcaggttttagagttcggccttggaggctcatctatgtcaacccacttacggttattagtaatgttcatcatgtctgctggaacagctatagcatcatatttcattccaagcactgttggtgtggttcttttcatgactggatttggtttcttgctgagtctgaacttaagtgatatgggtcacaaaattggaaccaaatctaaggatttacccagtggtccggaaaaacatttttcatggaaggaatgccttttctacatcattatattagtcttggctcttttagaaactagcttgcttcatcactttgctggcttctcacagatttctaaaagcaattcccaggctattgtgggctatggtttgatgatattacttataatactgtggatacttagagaaattcaaagcgtatatatcattggaattttccgaaatcccttttatccgaaggatgtgcaaactgtgactgtattctttgagaagcaaactaggctcatgaagattggtattgtcagacggattttgctaactttagtatcaccttttgccatgatagcatttctttcattggacagttccttacaagggctccactcagtgtctgtctgtattggattcacaagagcctttagaatggtatggcagaatacagaaaatgctttattggagacagtcattgtatcaacagtacacttgatctccagtacagacatatggtggaacagaagcctggatacaggactcagactcttactggttggtatcatacgtgatcgtttgattcagttcatctctaaattgcagtttgccgtgactgtgcttttgacatcatggacagagaaaaaacaacgtcgaaaaacaactgccactttatgtatactcaacattgtcttttctccattcgtgttggtcatcatagttttttctacactactctcttctcccttactccctcttttcacccttcctgtgttcttggtggggtttccccgacctattcagagttggccaggagcagcaggcaccacagcctgtgtgtgtgcagatacagtgtactactaccaaatggtgcccaggttgactgctgtactgcagactgcaatggcagctggaagtttaggtctcctcctacctggatctcattacttgggccgttttcaggatcgtttaatgtggataatgattctggaatgtggctatacttactgctctattaacattaaggggttagaattgcaggaaacatcctgtcatactgcagaagctcgcagagttgatgaagtttttgaagatgcttttgagcaagaatacacaagagtatactctgaaactaatgattgataaagcaagtttaggtccaatagaagactttagagaactgattaagtaccttgaagaatatgaacgtgactggtacattggtttggtatctgatgaaaagtggaaggaagcaattttacaagaaaagccatacttgttttctctggggtatgattctaatatgggaatttacactgggagagtgcttagccttcaagaattattgatccaagtgggaaagttaaatcctgaagctgttagaggtcagtgggccaatctttcatgggaattactttatgccacaaacgatgatgaagaacgttatagtatacaagctcatccactacttttaagaaatcttacggtacaagcagcagaacctcccctgggatatccgatttattcttcaaaacctctccacatacatttgtattagagctcattttgactgtaatgtcatcaaatgcaatgtttttattttttcatcctaaaaaagtaactgtgattcttgtaacttgaggacttctccacacccccattcagatgcctgagaacagctaagctccgtaaagttggttctcttagccatcttaatggttctaaaaaacagcaaaaacatctttatgtctaagataaaagaactatttggccaatatttgtgccctctggactttagtaggctttggtaaatgtgagaaaacttttgtagaattatcatataatgaattttgtaatgctttcttaaatgtgttataggtgaattgccatacaaagttaacagctatgtaatttttacatacttaagagataaacatatcagtgttctaagtagtgataatggatcctgttgaaggttaacataatgtgtatatatttgtttgaaatataatttatagtattttcaaatgtgctgatttattttgacatctaatatctgaatgtttttgtatcaagtagtttgttttcatagacttcaattcataaactttaaaaaacttttaataaaatattttccttccttttcaaaaaa

SEQ ID NO: 421584 - DNA, 1401 bp, Homo sapiens
cgttcagggcgtctcggctttccccgctgctgcttctgctaggcccagtgcgagaccagagcacgagcgactcccgtcgtccccggccaggcagatgttggcctagtcctggcgcgaacgaagcgcgctatttccctgcttcctctaggccaagcctgctttacggcagggcccgcctcgggagcgagcacagaccggggcagcgaggccagccaggcgccgacgaggtccccgaacgcgcacgcgctccgttcagctccgggtggcggccgccggagtagacgttagccatggaaaccgagagctggcccgggcggggccgcggtgagctcgttattcggccgccgcagcttttctgcctccgcattcgggcactaaccaacctcccggcgggatcgcccagcccgggtttacctgcaaaaatgcggtccctgggatgccttcgcgtcttctcttccctcgggtgacttgagaaactgctgtgttacagaaaagcatgtgactttcagaataatcccgagtgaggatgagtccagatgtgcctctactgaatgattacaagcaggacttctttctgaagcccttcaagaattattgatccaagtgggaaagttaaatcctgaagctgttagaggtcagtgggccaatctttcatgggaattactttatgccacaaacgatgatgaagaacgttatagtatacaagctcatccactacttttaagaaatcttacggtacaagcagcagaacctcccctgggatatccgatttattcttcaaaacctctccacatacatttgtattagagctcattttgactgtaatgtcatcaaatgcaatgtttttattttttcatcctaaaaaagtaactgtgattcttgtaacttgaggacttctccacacccccattcagatgcctgagaacagctaagctccgtaaagttggttctcttagccatcttaatggttctaaaaaacagcaaaaacatctttatgtctaagataaaagaactatttggccaatatttgtgccctctggactttagtaggctttggtaaatgtgagaaaacttttgtagaattatcatataatgaattttgtaatgctttcttaaatgtgttataggtgaattgccatacaaagttaacagctatgtaatttttacatacttaagagataaacatatcagtgttctaagtagtgataatggatcctgttgaaggttaacataatgtgtatatatttgtttgaaatataatttatagtattttcaaatgtgctgatttattttgacatctaatatctgaatgtttttgtatcaagtagtttgttttcatagacttcaattcataaactttaaaaaacttttaataaaatattttccttccttttcaaaaaa

SEQ ID NO: 421585 - DNA, 1523 bp, Homo sapiens
cgttcagggcgtctcggctttccccgctgctgcttctgctaggcccagtgcgagaccagagcacgagcgactcccgtcgtccccggccaggcagatgttggcctagtcctggcgcgaacgaagcgcgctatttccctgcttcctctaggccaagcctgctttacggcagggcccgcctcgggagcgagcacagaccggggcagcgaggccagccaggcgccgacgaggtccccgaacgcgcacgcgctccgttcagctccgggtggcggccgccggagtagacgttagccatggaaaccgagagctggcccgggcggggccgcggtgagctcgttattcggccgccgcagcttttctgcctccgcattcgggcactaaccaacctcccggcgggatcgcccagcccgggtttacctgcaaaaatgcggtccctgggatgccttcgcgtcttctcttccctcgggtgacttgagaaactgctgtgttacagaaaagcatgtgactttcagaataatcccgagtgaggatgagtccagatgtgcctctactgaatgattacaagcaggacttctttctgaagcgctttccacagactgttcttggaggccctcgattcaaattaggctattgtgcccctccttacatatatgttaatcaaattattctttttctaatgccatgggtttggggtggagtcggaacacttttgtaccagttaggcatcctgaaagactattatacagcagcactttcaggtggattaatgctttttactgcatttgtcatccagttcacaagtttatacgccaaaaacaaatcaacaacagtagaaagaatactaaccacggatatcttagcagaggaggatgagcatgaatttaccagttgtactggtgctgagactgtcaaatttctcattcctggcaagaaatatgtagccaatacagtttttcattctattcttgctggattagcgtgtggtcttggaacatggtatctgctcccaaatagaataaccttgctgtatggcagtacaggaggcactgctctactattcttctttggatggatgacactatgtatagcagaatattctttaattgtaaacacagctacagagactgcgactttccaaacacaggatacttatgaaattattcctcttatgagacctctttatatttttttctttgtttctgtggatctggcacacaggtaaaaacctaccaaatactttgtaactaactttgtttttaagtatacagagtaagagagctttccttttagtgttacaaaaaaatgaatccatggattaaaaatcatcaaaccattgggtgacagactgagactctgtctcaaaaaagaaaatgaaagaaaaggacaaagtaacaggaagaaaagaaaaccgtcatgtcaaagagctaatgcccttcatatatgaaaagttcttccaaattcgtaagaaaaatgttcaaaaatgatcacttcaatagaaaaataggcaaaggacatgagccaattta

SEQ ID NO: 421586 - DNA, 382 bp, Homo sapiens
gtttgttttcatagacttcaattcataaactttaaaaaacttttaataaaatattttccttccttttcaaaaaatatccttctaatatatgtgaaaggagcggggttcatcccattcatcatgtgaatattcacaggaagagcaatgttagggtaatctgcatatgactactaaagcatatatctgactcattatgtatttctttcaactgaatttactgcttctgaaaaatgatttacccaacaggactaccagttactagtgtcttaaggtatatgaactaaagtcagaaggagatggaagaaaatttttataatacgatctgaattttattttcattctcttcttgcttaggaacgttttacagatacatgtaaggggg

SEQ ID NO: 421587 - DNA, 663 bp, Homo sapiens
cgttcagggcgtctcggctttccccgctgctgcttctgctaggcccagtgcgagaccagagcacgagcgactcccgtcgtccccggccaggcagatgttggcctagtcctggcgcgaacgaagcgcgctatttccctgcttcctctaggccaagcctgctttacggcagggcccgcctcgggagcgagcacagaccggggcagcgaggccagccaggcgccgacgaggtccccgaacgcgcacgcgctccgttcagctccgggtggcggccgccggagtagacgttagccatggaaaccgagagctggcccgggcggggccgcggtgagctcgttattcggccgccgcagcttttctgcctccgcattcgggcactaaccaacctcccggcgggatcgcccagcccgggtttacctgcaaaaatgcggtccctgggatgccttcgcgtcttctcttccctcgggtgacttgaggtacgttcgttgtccgacgtccacctcgggacttcttcggcatcttaatgtccaagcctgtgcggagagccaagttgttctaggggctttcattgccacaagaaacaaaatgctacaattcaacaggctaaagtagtctttcaaaggaaagttaaaatcacactgaattactatctctaatgactgagtt

SEQ ID NO: 421588 - DNA, 3651 bp, Homo sapiens
cgttcagggcgtctcggctttccccgctgctgcttctgctaggcccagtgcgagaccagagcacgagcgactcccgtcgtccccggccaggcagatgttggcctagtcctggcgcgaacgaagcgcgctatttccctgcttcctctaggccaagcctgctttacggcagggcccgcctcgggagcgagcacagaccggggcagcgaggccagccaggcgccgacgaggtccccgaacgcgcacgcgctccgttcagctccgggtggcggccgccggagtagacgttagccatggaaaccgagagctggcccgggcggggccgcggtgagctcgttattcggccgccgcagcttttctgcctccgcattcgggcactaaccaacctcccggcgggatcgcccagcccgggtttacctgcaaaaatgcggtccctgggatgccttcgcgtcttctcttccctcgggtgacttgaggtttgtggtaaatatgccagctctagaacacatgaatcagattttacacatcttgtttgtatttttaccctttctgtgggcacttgggactctgcccccacccgatgcacttctcttatgggcaatggagcaggttttagagttcggccttggaggctcatctatgtcaacccacttacggttattagtaatgttcatcatgtctgctggaacagctatagcatcatatttcattccaagcactgttggtgtggttcttttcatgactggatttggtttcttgctgagtctgaacttaagtgatatgggtcacaaaattggaaccaaatctaaggatttacccagtggtccggaaaaacatttttcatggaaggaatgccttttctacatcattatattagtcttggctcttttagaaactagcttgcttcatcactttgctggcttctcacagatttctaaaagcaattcccaggctattgtgggctatggtttgatgatattacttataatactgtggatacttagagaaattcaaagcgtatatatcattggaattttccgaaatcccttttatccgaaggatgtgcaaactgtgactgtattctttgagaagcaaactaggctcatgaagattggtattgtcagacggattttgctaactttagtatcaccttttgccatgatagcatttctttcattggacagttccttacaagggctccactcagtgtctgtctgtattggattcacaagagcctttagaatggtatggcagaatacagaaaatgctttattggagacagtcattgtatcaacagtacacttgatctccagtacagacatatggtggaacagaagcctggatacaggactcagactcttactgagttggccaggagcagcaggcaccacagcctgtgtgtgtgcagatacagtgtactactaccaaatggtgcccaggttgactgctgtactgcagactgcaatggcagctggaagtttaggtctcctcctacctggatctcattacttgggccgttttcaggatcgtttaatgtggataatgattctggaatgtggctatacttactgctctattaacattaaggggttagaattgcaggaaacatcctgtcatactgcagaagctcgcagagttgatgaagtttttgaagatgcttttgagcaagaatacacaagagtatgttcccttaatgaacactttggaaatgtcttgacaccctgtactgttttgcctgtgaaattgtattctgatgccaggaatgttctatcaggcataattgattctcatgaaaacttaaaagaatttaaaggtgacctcattaaagtacttgtgtggatacttgttcaatactgctccaaaaggcctggcatgaaagagaatgttcacaacactgaaaataaagggaaagcacctctaatgttgcctgctttgaacactttgccacctcccaaatccccagaagacatagacagtttaaattcagaaacttttaatgactggtctgatgataatatttttgatgatgagccaactatcaaaaaagtaatagaagaaaaacatcagttgaaagatttgccaggtacaaatttgtttattccaggatcagtagaatcacagagggttggtgatcattctacaggcactgttcctgaaaacgatctttacaaagcagttctattaggataccctgctgttgacaaaggaaaacaagaggacatgccatatattcctctcatggagttcagttgttcacattctcacttagtatgcttacccgcagagtggaggactagctgtatgcccagttccaaaatgaaggagatgagctcgttatttccagaagactggtaccaatttgttctaaggcagttggaatgttatcattcagaagagaaggcctcaaatgtactggaagaaattgccaaggacaaagttttaaaagacttttatgttcatacagtaatgacttgttattttagtttatttggaatagacaatatggctcctagtcctggtcatatattgagagtttacggtggtgttttgccttggtctgttgctttggactggctcacagaaaagccagaactgtttcaactagcactgaaagcattcaggtatactctgaaactaatgattgataaagcaagtttaggtccaatagaagactttagagaactgattaagtaccttgaagaatatgaacgtgactggtacattggtttggtatctgatgaaaagtggaaggaagcaattttacaagaaaagccatacttgttttctctggggtatgattctaatatgggaatttacactgggagagtgcttagccttcaagaattattgatccaagtgggaaagttaaatcctgaagctgttagaggtcagtgggccaatctttcatgggaattactttatgccacaaacgatgatgaagaacgttatagtatacaagctcatccactacttttaagaaatcttacggtacaagcagcagaacctcccctgggatatccgatttattcttcaaaacctctccacatacatttgtattagagctcattttgactgtaatgtcatcaaatgcaatgtttttattttttcatcctaaaaaagtaactgtgattcttgtaacttgaggacttctccacacccccattcagatgcctgagaacagctaagctccgtaaagttggttctcttagccatcttaatggttctaaaaaacagcaaaaacatctttatgtctaagataaaagaactatttggccaatatttgtgccctctggactttagtaggctttggtaaatgtgagaaaacttttgtagaattatcatataatgaattttgtaatgctttcttaaatgtgttataggtgaattgccatacaaagttaacagctatgtaatttttacatacttaagagataaacatatcagtgttctaagtagtgataatggatcctgttgaaggttaacataatgtgtatatatttgtttgaaatataatttatagtattttcaaatgtgctgatttattttgacatctaatatctgaatgtttttgtatcaagtagtttgttttcatagacttcaattcataaactttaaaaaacttttaataaaatattttccttccttttcaaaaaa

SEQ ID NO: 421589 - DNA, 4027 bp, Homo sapiens
cgttcagggcgtctcggctttccccgctgctgcttctgctaggcccagtgcgagaccagagcacgagcgactcccgtcgtccccggccaggcagatgttggcctagtcctggcgcgaacgaagcgcgctatttccctgcttcctctaggccaagcctgctttacggcagggcccgcctcgggagcgagcacagaccggggcagcgaggccagccaggcgccgacgaggtccccgaacgcgcacgcgctccgttcagctccgggtggcggccgccggagtagacgttagccatggaaaccgagagctggcccgggcggggccgcggtgagctcgttattcggccgccgcagcttttctgcctccgcattcgggcactaaccaacctcccggcgggatcgcccagcccgggtttacctgcaaaaatgcggtccctgggatgccttcgcgtcttctcttccctcgggtgacttgaggtttgtggtaaatatgccagctctagaacacatgaatcagattttacacatcttgtttgtatttttaccctttctgtgggcacttgggactctgcccccacccgatgcacttctcttatgggcaatggagcaggttttagagttcggccttggaggctcatctatgtcaacccacttacggttattagtaatgttcatcatgtctgctggaacagctatagcatcatatttcattccaagcactgttggtgtggttcttttcatgactggatttggtttcttgctgagtctgaacttaagtgatatgggtcacaaaattggaaccaaatctaaggatttacccagtggtccggaaaaacatttttcatggaaggaatgccttttctacatcattatattagtcttggctcttttagaaactagcttgcttcatcactttgctggcttctcacagatttctaaaagcaattcccaggctattgtgggctatggtttgatgatattacttataatactgtggatacttagagaaattcaaagcgtatatatcattggaattttccgaaatcccttttatccgaaggatgtgcaaactgtgactgtattctttgagaagcaaactaggctcatgaagattggtattgtcagacggattttgctaactttagtatcaccttttgccatgatagcatttctttcattggacagttccttacaagggctccactcagtgtctgtctgtattggattcacaagagcctttagaatggtatggcagaatacagaaaatgctttattggagacagtcattgtatcaacagtacacttgatctccagtacagacatatggtggaacagaagcctggatacaggactcagactcttactggttggtatcatacgtgatcgtttgattcagttcatctctaaattgcagtttgccgtgactgtgcttttgacatcatggacagagaaaaaacaacgtcgaaaaacaactgccactttatgtatactcaacattgtcttttctccattcgtgttggtcatcatagttttttctacactactctcttctcccttactccctcttttcacccttcctgtgttcttggtggggtttccccgacctattcagagttggccaggagcagcaggcaccacagcctgtgtgtgtgcagatacagtgtactactaccaaatggtgcccaggttgactgctgtactgcagactgcaatggcagctggaagtttaggtctcctcctacctggatctcattacttgggccgttttcaggatcgtttaatgtggataatgattctggaatgtggctatacttactgctctattaacattaaggggttagaattgcaggaaacatcctgtcatactgcagaagctcgcagagttgatgaagtttttgaagatgcttttgagcaagaatacacaagagtatgttcccttaatgaacactttggaaatgtcttgacaccctgtactgttttgcctgtgaaattgtattctgatgccaggaatgttctatcaggcataattgattctcatgaaaacttaaaagaatttaaaggtgacctcattaaagtacttgtgtggatacttgttcaatactgctccaaaaggcctggcatgaaagagaatgttcacaacactgaaaataaagggaaagcacctctaatgttgcctgctttgaacactttgccacctcccaaatccccagaagacatagacagtttaaattcagaaacttttaatgactggtctgatgataatatttttgatgatgagccaactatcaaaaaagtaatagaagaaaaacatcagttgaaagatttgccaggtacaaatttgtttattccaggatcagtagaatcacagagggttggtgatcattctacaggcactgttcctgaaaacgatctttacaaagcagttctattaggataccctgctgttgacaaaggaaaacaagaggacatgccatatattcctctcatggagttcagttgttcacattctcacttagtatgcttacccgcagagtggaggactagctgtatgcccagttccaaaatgaaggagatgagctcgttatttccagaagactggtaccaatttgttctaaggcagttggaatgttatcattcagaagagaaggcctcaaatgtactggaagaaattgccaaggacaaagttttaaaagacttttatgttcatacagtaatgacttgttattttagtttatttggaatagacaatatggctcctagtcctggtcatatattgagagtttacggtggtgttttgccttggtctgttgctttggactggctcacagaaaagccagaactgtttcaactagcactgaaagcattcaggtatactctgaaactaatgattgataaagcaagtttaggtccaatagaagactttagagaactgattaagtaccttgaagaatatgaacgtgactggtacattggtttggtatctgatgaaaagtggaaggaagcaattttacaagaaaagccatacttgttttctctggggtatgattctaatatgtatttatgactatgcatcgctgaggcaacagatcagaaaaggcagacaaagagaagtgactaagattttgcctaatggtgattgagatggctgccaggaaacttttatttaaagaaccaaggaagtagagggaatttacactgggagagtgcttagccttcaagaattattgatccaagtgggaaagttaaatcctgaagctgttagaggtcagtgggccaatctttcatgggaattactttatgccacaaacgatgatgaagaacgttatagtatacaagctcatccactacttttaagaaatcttacggtacaagcagcagaacctcccctgggatatccgatttattcttcaaaacctctccacatacatttgtattagagctcattttgactgtaatgtcatcaaatgcaatgtttttattttttcatcctaaaaaagtaactgtgattcttgtaacttgaggacttctccacacccccattcagatgcctgagaacagctaagctccgtaaagttggttctcttagccatcttaatggttctaaaaaacagcaaaaacatctttatgtctaagataaaagaactatttggccaatatttgtgccctctggactttagtaggctttggtaaatgtgagaaaacttttgtagaattatcatataatgaattttgtaatgctttcttaaatgtgttataggtgaattgccatacaaagttaacagctatgtaatttttacatacttaagagataaacatatcagtgttctaagtagtgataatggatcctgttgaaggttaacataatgtgtatatatttgtttgaaatataatttatagtattttcaaatgtgctgatttattttgacatctaatatctgaatgtttttgtatcaagtagtttgttttcatagacttcaattcataaactttaaaaaacttttaataaaatattttccttccttttcaaaaaa

SEQ ID NO: 421590 - DNA, 3359 bp, Homo sapiens
cgttcagggcgtctcggctttccccgctgctgcttctgctaggcccagtgcgagaccagagcacgagcgactcccgtcgtccccggccaggcagatgttggcctagtcctggcgcgaacgaagcgcgctatttccctgcttcctctaggccaagcctgctttacggcagggcccgcctcgggagcgagcacagaccggggcagcgaggccagccaggcgccgacgaggtccccgaacgcgcacgcgctccgttcagctccgggtggcggccgccggagtagacgttagccatggaaaccgagagctggcccgggcggggccgcggtgagctcgttattcggccgccgcagcttttctgcctccgcattcgggcactaaccaacctcccggcgggatcgcccagcccgggtttacctgcaaaaatgcggtccctgggatgccttcgcgtcttctcttccctcgggtgacttgaggtttgtggtaaatatgccagctctagaacacatgaatcagattttacacatcttgtttgtatttttaccctttctgtgggcacttgggactctgcccccacccgatgcacttctcttatgggcaatggagcaggttttagagttcggccttggaggctcatctatgtcaacccacttacggttattagtaatgttcatcatgtctgctggaacagctatagcatcatatttcattccaagcactgttggtgtggttcttttcatgactggatttggtttcttgctgagtctgaacttaagtgatatgggtcacaaaattggaaccaaatctaaggatttacccagtggtccggaaaaacatttttcatggaaggaatgccttttctacatcattatattagtcttggctcttttagaaactagcttgcttcatcactttgctggcttctcacagatttctaaaagcaattcccaggctattgtgggctatggtttgatgatattacttataatactgtggatacttagagaaattcaaagcgtatatatcattggaattttccgaaatcccttttatccgaaggatgtgcaaactgtgactgtattctttgagaagcaaactaggctcatgaagattggtattgtcagacggattttgctaactttagtatcaccttttgccatgatagcatttctttcattggacagttccttacaagggctccactcagtgtctgtctgtattggattcacaagagcctttagaatggtatggcagaatacagaaaatgctttattggagacagtcattgtatcaacagtacacttgatctccagtacagacatatggtggaacagaagcctggatacaggactcagactcttactggttggtatcatacgtgatcgtttgattcagttcatctctaaattgcagtttgccgtgactgtgcttttgacatcatggacagagaaaaaacaacgtcgaaaaacaactgccactttatgtatactcaacattgtcttttctccattcgtgttggtcatcatagttttttctacactactctcttctcccttactccctcttttcacccttcctgtgttcttggtggggtttccccgacctattcagagttggccaggagcagcaggcaccacagcctgtgtgtgtgcagatacagtgtactactaccaaatggtgcccaggttgactgctgtactgcagactgcaatggcagctggaagtttaggtctcctcctacctggatctcattacttgggccgttttcaggatcgtttaatgtggataatgattctggaatgtggctatacttactgctctattaacattaaggggttagaattgcaggaaacatcctgtcatactgcagaagctcgcagagttgatgaagtttttgaagatgcttttgagcaagaatacacaagagtatgttcccttaatgaacactttggaaatgtcttgacaccctgtactgttttgcctgtgaaattgtattctgatgccaggaatgttctatcaggcataattgattctcatgaaaacttaaaagaatttaaaggtgacctcattaaagtacttgtgtggatacttgttcaatactgctccaaaaggcctggcatgaaagagaatgttcacaacactgaaaataaagggaaagcacctctaatgttgcctgctttgaacactttgccacctcccaaatccccagaagacatagacagtttaaattcagaaacttttaatgactggtctgatgataatatttttgatgatgagccaactatcaaaaaagtaatagaagaaaaacatcagttgaaagatttgccaggtatactctgaaactaatgattgataaagcaagtttaggtccaatagaagactttagagaactgattaagtaccttgaagaatatgaacgtgactggtacattggtttggtatctgatgaaaagtggaaggaagcaattttacaagaaaagccatacttgttttctctggggtatgattctaatatgggaatttacactgggagagtgcttagccttcaagaattattgatccaagtgggaaagttaaatcctgaagctgttagaggtcagtgggccaatctttcatgggaattactttatgccacaaacgatgatgaagaacgttatagtatacaagctcatccactacttttaagaaatcttacggtacaagcagcagaacctcccctgggatatccgatttattcttcaaaacctctccacatacatttgtattagagctcattttgactgtaatgtcatcaaatgcaatgtttttattttttcatcctaaaaaagtaactgtgattcttgtaacttgaggacttctccacacccccattcagatgcctgagaacagctaagctccgtaaagttggttctcttagccatcttaatggttctaaaaaacagcaaaaacatctttatgtctaagataaaagaactatttggccaatatttgtgccctctggactttagtaggctttggtaaatgtgagaaaacttttgtagaattatcatataatgaattttgtaatgctttcttaaatgtgttataggtgaattgccatacaaagttaacagctatgtaatttttacatacttaagagataaacatatcagtgttctaagtagtgataatggatcctgttgaaggttaacataatgtgtatatatttgtttgaaatataatttatagtattttcaaatgtgctgatttattttgacatctaatatctgaatgtttttgtatcaagtagtttgttttcatagacttcaattcataaactttaaaaaacttttaataaaatattttccttccttttcaaaaaa

SEQ ID NO: 421591 - DNA, 1553 bp, Homo sapiens
cgttcagggcgtctcggctttccccgctgctgcttctgctaggcccagtgcgagaccagagcacgagcgactcccgtcgtccccggccaggcagatgttggcctagtcctggcgcgaacgaagcgcgctatttccctgcttcctctaggccaagcctgctttacggcagggcccgcctcgggagcgagcacagaccggggcagcgaggccagccaggcgccgacgaggtccccgaacgcgcacgcgctccgttcagctccgggtggcggccgccggagtagacgttagccatggaaaccgagagctggcccgggcggggccgcggtgagctcgttattcggccgccgcagcttttctgcctccgcattcgggcactaaccaacctcccggcgggatcgcccagcccgggtttacctgcaaaaatgcggtccctgggatgccttcgcgtcttctcttccctcgggtgacttgagaaactgctgtgttacagaaaagcatgtgactttcagaataatcccgagtgaggatgagtccagatgtgcctctactgaatgattacaagcaggacttctttctgaagcgctttccacagactgttcttggaggccctcgattcaaattaggctattgtgcccctccttacatatatgttaatcaaattattctttttctaatgccatgggtttggggtggagtcggaacacttttgtaccagttaggcatcctgaaagactattatacagcagcactttcaggtggattaatgctttttactgcatttgtcatccagttcacaagtttatacgccaaaaacaaatcaacaacagtagaaagaatactaaccacggatatcttagcagaggaggatgagcatgaatttaccagttgtactggtgctgagactgtcaaatttctcattcctggcaagaaatatgtagccaatacagtttttcattctattcttgctggattagcgtgtggtcttggaacatggtatctgctcccaaatagaataaccttgctgtatggcagtacaggaggcactgctctactattcttctttggatggatgacactatgtatagcagaatattctttaattgtaaacacagctacagagactgcgactttccaaacacaggatacttatgaaattattcctcttatgagacctctttatatttttttctttgtttctgtggatctggcacacaggtaaaaacctaccaaatactttgtaactaactttgtttttaagtatacagagtaagagagctttccttttagtgttacaaaaaaatgaatccatggattaaaaatcatcaaaccattgggtgacaggttattttgataattattcttttaggattaatctctgtaaaacatactaaagcaatagttaaaacttactaaagagtttttttaaaaaaccctttttgagataaggaacttttcaattttgtgtttcactttaaataaggagctttgagtttttaagatagcctggctaaaacctgtgtaaggagatggaactttcctgtggggggaaagaa

SEQ ID NO: 421592 - DNA, 409 bp, Homo sapiens
aggctattgtgggctatggtttgatgatattacttataatactgtggatacttagagaaattcaaagcgtatatatcattggaattttccgaaatcccttttatccgaaggatgtgcaaactgtgactgtattctttgagaagcaaactaggctcatgaagattggtattgtcagacggattttgctaactttaggtaggaagataaagtctattaaccttgtgttacaaatcatatcctggaagtattcaaaaatattactcaattcccatatttgtgtggtattataccatatacaagtgtttgttcttttatgttatggttttttgtttattggctttttagttcatcgcttaaatgtgctcataaaaaatgtgtatttgccagaataaaatatggtagaaggagc

SEQ ID NO: 421593 - DNA, 1032 bp, Homo sapiens
ctgggccacagagcgagactccgtctcaaaaaataaaataaatcataatgttgacctcaaagaggaagcctaccgttgagtttagtaagatctttgctacacacaatgtgatgctggcagtggcaggggcagtaatctttatttcgtcatttttgaaacatagaagccgtaacggaagcaagtgaaatgctcagtcttagacgactgcgtcgtgctatgaccggactttttcttgaaaggggatgacagcatgggaggcaatggctccacatgtaaacccgacactgaaagacaaggcactctctccacagcagccccaacaactagccctgcaccctgtctctctaaccaccacaacaaaaaacatttaatccttgccttttgtgctggggttctactgacactgctgctgatagcctttatcttcctcatcataaagagctacagaaaatatcactccaagccccaggccccagatcctcactcagatcctccagccaagctttcatccatcccaggggaatcacttacctatgccagcacaactttcaaactctcagaagaaaagagcaatcacttggctgagaaccattctgcagactttgaccccattgtctatgctcaaattaaagtaacaaactaactcagcttttccaatgaggcttgaatccatttcctctcatctcagccctatcttcacacatcactttcacttttttacaaattttggaccaccacctgtgtgaaactgcagtcggagttgtttagatgtgatctggcaatgctatccagcatctttggagaccaatggtcagtcttttcctggccagaggaaagattgatggccctcccacttgaactgacagcctgtgagccccttgggggcatagactgccttccttggacccttccaaagtgtgtggtacagagctcagtgcacagagtattcacccagcatcatgaatcaacttgggaggagtcaaccaaatgaacaatctaccaaaaatttcaaataaagtcaaaccccccaca

SEQ ID NO: 421594 - DNA, 978 bp, Homo sapiens
ctgggccacagagcgagactccgtctcaaaaaataaaataaatcataatgttgacctcaaagaggaagcctaccgttgagtttagtaagatctttgctacacacaatgtgatgctggcagtggcaggggcagtaatctttatttcgtcatttttgaaacatagaagccgtaacggaagcaagtgaaatgctcagtcttagacgactgcgtcgtgctatgaccggactttttcttgaaaggggatgacagcatgggaggcaatggctccacatgtaaacccgacactgaaagacaaggcactctctccacagcagccccaacaactagccctgcaccctgtctctctaaccaccacaacaaaaaacatttaatccttgccttttgtgctggggttctactgacactgctgctgatagcctttatcttcctcatcataaagagctacagaaaatatcactccaagccccaggccccagatcctcactcagatcctccagccaagctttcatccatcccaggggaatcacttacctatgccagcacaactttcaaactctcagaagatgctcaaattaaagtaacaaactaactcagcttttccaatgaggcttgaatccatttcctctcatctcagccctatcttcacacatcactttcacttttttacaaattttggaccaccacctgtgtgaaactgcagtcggagttgtttagatgtgatctggcaatgctatccagcatctttggagaccaatggtcagtcttttcctggccagaggaaagattgatggccctcccacttgaactgacagcctgtgagccccttgggggcatagactgccttccttggacccttccaaagtgtgtggtacagagctcagtgcacagagtattcacccagcatcatgaatcaacttgggaggagtcaaccaaatgaacaatctaccaaaaatttcaaataaagtcaaaccccccaca

SEQ ID NO: 421595 - DNA, 603 bp, Homo sapiens
ctgggccacagagcgagactccgtctcaaaaaataaaataaatcataatgttgacctcaaagaggaagcctaccgttgagtttagtaagatctttgctacacacaatgtgatgctggcagtggcaggggcagtaatctttatttcgtcatttttgaaacatagaagccgtaacggaagcaagtgaaatgctcagtcttagacgactgcgtcgtgctatgaccggactttttcttgaaaggggatgacagcatgggaggcaatggctccacatgtaaacccgacactgaaagacaaggcactctctccacagcagccccaacaactagccctgcaccctgtctctctaaccaccacaagtaaatgagcattctcctatctgtttcatcttgtaccacgtgggatttgatgttgtgctgacagcctcggcttggggatttgggcagggagactggggagaaaggactagaaacagtaaaagaacaaagtcagtttgtgatctcaggagtatggctcttaatttggcatcccctaagcttcaagagatccatggatcccctaagcttataggtaaaatttgctgggtggggaattatgaacattgt

SEQ ID NO: 421596 - DNA, 287 bp, Homo sapiens
atcgaagggagaggcttcccatttccccaggcccattgctgagatgggtccctcttctttctggcaccatggcagatcactccaagccccaggccccagatcctcactcagatcctccagccaaggtaagatgaccacactgttttggggacactgaagggctaccgtcattggaattcccctccatactcttcattatctgctagaatggtggtattgatttccagacactgggcaagtgattctttgaccaaagtgctcaggttgcttctaaagagcaacctttt

SEQ ID NO: 421597 - DNA, 1107 bp, Homo sapiens
ctgggccacagagcgagactccgtctcaaaaaataaaataaatcataatgttgacctcaaagaggaagcctaccgttgagtttagtaagatctttgctacacacaatgtgatgctggcagtggcaggggcagtaatctttatttcgtcatttttgaaacatagaagccgtaacggaagcaagtgaaatgctcagtcttagacgactgcgtcgtgctatgaccggactttttcttgaaaggggatgacagcatgggaggcaatggctccacatgtaaacccgacactgaaagacaaggcactctctccacagcagccccaacaactagccctgcaccctgtctctctaaccaccacaacaaaaaacatttaatccttgccttttgtgctggggttctactgacactgctgctgatagcctttatcttcctcatcataaagagctacagaaaatatcgaagggagaggcttcccatttccccaggcccattgctgagatgggtccctcttctttctggcaccatggcagatcactccaagccccaggccccagatcctcactcagatcctccagccaagctttcatccatcccaggggaatcacttacctatgccagcacaactttcaaactctcagaagaaaagagcaatcacttggctgagaaccattctgcagactttgaccccattgtctatgctcaaattaaagtaacaaactaactcagcttttccaatgaggcttgaatccatttcctctcatctcagccctatcttcacacatcactttcacttttttacaaattttggaccaccacctgtgtgaaactgcagtcggagttgtttagatgtgatctggcaatgctatccagcatctttggagaccaatggtcagtcttttcctggccagaggaaagattgatggccctcccacttgaactgacagcctgtgagccccttgggggcatagactgccttccttggacccttccaaagtgtgtggtacagagctcagtgcacagagtattcacccagcatcatgaatcaacttgggaggagtcaaccaaatgaacaatctaccaaaaatttcaaataaagtcaaaccccccaca
